United States Patent Application Publication US 2008/0114160 A1 - sequence listing, part 6

SEQ ID NO: 4350 - DNA, 12377 bp, Oryza sativa
gagcgaacgaacgtgaacaagaacgagcgaacgaacgtgaacgagaacatgaatgagcgaacgaatgtgaacgagaattgaacgtgaaagaatgaacgaacgtgaatgaacgagcatgaacgaacgtcaacgaacgtgaacgtgaactaacgaacatgaacgaacgttaacgaatgtgaacgtgaatgaacgtgaacgtgaaatgcaatataggcaggtgaatgaatgtgaacgaacgaacgtacgtgaatgaaacgtgaccttaacgagaacgcgaacgtgaacgatcgtgaacgaaacgtgaacgtaaaatgcaatatatgttacttcgcgtttatcctaatacatctttttgtatcttgcagaaaagacgttgttggagtcgtccctcaagccggagtggtagctagccctcgaaggaattcgcgcagacaagtgacgtaattatatatatgattgttatatttgtaatgcaattaagactattagatttaatatacgacacttagacttagttttaatataagattattatagtttgtaattagactttagtatataatttattgactagctagggtcctataatatacgtcacctagacttagcatatatcactatttgagttttaatataagattattagatttgtaattagacttagcatataagattgtgtagggttctaatatacgacagttacacttagcatacatgactatttgagttttagtataagattatttacgttttaatataagattattatagtttgtaattatacttagtatataactattgactagctagggtcctataatatacgtcacctagacttagcatttatcactatttgagttttagtataagattatttaagttttaatataagattattagatttgtaattagacttactatataatttattgactagctagggtcctgtaatatacgtcacctagacttagcatatgattgttagcatataagattgttaaaacataaatgtctcatgacttagcagctgtttcatgtatgaacagatggctgatcgcgatgaggaacagatattgtatgatacaatcgcggagggaagcagccagtactggaacgaagaagaggggaacgaggatccaaaccagtatttgaacgaggaagtgcagagggatgcagaggggaaccaagaggggcacgttgaaagggatgtggaggggaaccaggaggaggaggatagtgcaagtcaaccctccgctggacagaagagggcacgcgggcaacgaggtgccgcgaagaagcttgagggtcggcacaacataacggaagtggacgaagacggccgacctagtgccccggcagaagccgccaagaactatgtacgtcatagcggttgggttgtgcgggataacgtgcctgtcagtacggtatactggcgcagaacaagggcacgcggagatcatgagagctttgtcccagattcgaagaaagagatgctgtggaccacaatgctcgagacattcacccttcccgcgggtacagaggacaaagtgaaaaggtggattctgaagaaaatggcagaacagtttcagagcttcaagggagatctgtaccagaaatatatcctgaaggggcagacaccgaacttcgacacattcccaaagctaagggatcactgggacgagttcgttgcatataagacatgtgaacaagggcaggcgatgatggaaagaaacaaagaaaatgccaccaagaagaagtaccatcaccacttggggtcaggcggctatagcgtcgcgatgccgaagtgggaggagatggaggctagcttgcttgagtggggtatcgaaccggccaccgctaattggccggaccgatcgaagttctggtactatgctcatggtggaacgctcaacctagctgatggctccctggtcttcggcgatcagatacgcgaggctgcgcatcgactaacagaagcagtggaagcctcttctcagggcacgttccgaccggacagagagaaggacgagctgtcactcgccctgcaaactctagagcatccaggacgaacacgagggaaatgggtgattccttggaagattgggttcaaggaggacatccacacgtacaggagtcggatgaggagcaagagagataccgaggcgaagattgcagatctagagttcagggtatcgagctacgagctcagcatgcaacaggaggtggcaaggaaggttgatgaacgcatggccgcacatcggtcccatgatccctagccgaccattcctcctgcaatggtgagcccgtcaggaaaccgtagcagctgcgcctcaacgaggcaggtaggatcacagagcatggacgccatgcaaacccagcacgaaaccacctgccccgttgatgacatcactcagcggacaccatgtgagctgcatattcccttcaagaacttatcaataaaggtaagctcgtagtttatagattttagatttggccattccgctagttgctgcttatatatgttgtttactaataaataacctctcaccacatgaaggtggcgtcgggcatggccatcccaacggacccttcaggtacttaccactgcaggccgattccagcaggatactccaaggtcgaagttgagttggtcgaaggcgcgtacgaggacctcgaggtggattaccctggaggagatggtgagacgcatctacgcgacacaagccacgccattatactatggcgcaagcgctacatcatcctccctgggcaacaagcggcgtctcatgcaccatcccctccggctcctgcaccgtctcctcctcaggctcctgcaccgtctcctcctcatcagtctcctgtaccgtctcctcctcaggctcctacaccgtctcctccttatcagtctcctgtaccgactcctcctcaggatcctgcacagactcctcctcctgcacagactcctcctcaggctcctgcgtcgtgtcctccagcaccttccaagtcaagaactcaccaagcaccaccgcctgcccgcacaagggcaacgaagaaggcgaaagttgacgccgccgagaacaaggagccaccgtacgattgcacgcaacaggagcttgacgcttacgtggaagcagaagtgaagagacaattgaagcctcggggtccagaaaagaagattcctatagacccgagtgccaagaagttcttcaggagtatgtcggcaccagccaaggaggccataaagctaacggattatgagcgaacacttaagaaagcatcttctggaaagtccaaaccagtccctcagcttggagagcaaccaaaccaggagatcgagccgttggtgaccggcgaatattttggaatacaagaatttattaatgacaccgggctaactacggatcaattgctaggagacgcaccaatcaaaaaggcggaagtgaaatacatgtacgaactcggtaaatcgcttgtcaagcctgagctgctgcagtccctacccacacaaatgtacaagttccatcagctgtacatggagatgagcgcaaccggtagagagatgatcggagtgaggattagggacacggacttcttgcaaggagatgacattctctggatcaatttcaggggaatctacgaactataccagctggacgcccttgatgtctctattatgagttgctggattttgtaagtatatcgttcagttagatttcttactacgtctcctttaattaattaggtccttgtatataagtagactatatataatatataatcccttttatcgttgtagaatggagattcaaaggggcccgacggcggggggttttcgatactggattcatcgaccctcggaaagtaaacgtcgcaatgctcgaccaatacccgcaagccacagaggacaatctcgtccatctcttgaaggcgcagcattacaagacgttcatactgttgttgtacaacacagagttagttaattttactgtcttcctataccaaatttcattctcgtacgaacattctaagtgtttcatatgtaatgcatcccacgcatattgcagattccactgggtgcttttactcttcgacctggaggcctacaccgtcaacatatatgactcaatggataaaaaagagtctacgttcgacaaggttttcgaacttatagacaggtactgtcataagttcctatgtgttaattaagaatcttgttatagttaattgctactacgaatcatagctttaaactccatgtagggcttggtatcggttccgtcatttggtccgcggcaaatggatagaaagacttaggcggaagttcaattttcctgtgagtacacatgctctacatttatatttctccgattcaaatacatacaagtgtatattaattagatctctcgtcgtttgtcatttatttatagtgcgcaaagcaaaagaagggaactaacttgtgcggctactacgtgtgcgagtattgccactgccttgcaaaccaaatcatcaccacaagagagctcgacgtacgtacaaataaattcaaattttcattacgtatcgatttgttgtttaattactaatcaatttcatacattcatatagtttattcgcatgagggataacctgatcacacacaaggaattcatcgcggcggttcaagaacaactcatgggattcatcaacgaacaaatccttgatcccaagggtgaattctactacgacggaaacacaattcataggtccttagcttctgagctagcgactactactacgtcgaaatcgtagctagctaggacatataatggattgtaattaatacatgactacatatgtttctatatgcatgtgtacacattttctataatgtaaatatatatatatatacacacacacacacatattatatatattatatatatatatatattatgcatgtacatatgtattgaaacatatatatgcatggtttatatatatatatatatatatatatatatatatatatatatatacagggccatgaaaaaaaaggtcagctcgatctttagtcccggttggtaacaccaaccgggagtaaagatgactcagttgatgttaccaaccgggactaaagatcgatctttagcctcgggtatttcacccgggattaaagatagcgatctttagtcccgaattggtcgtcccggtttggaaaccgggactaaaggggggttacgaaccgggactacaaatgctttctccaccagtgggtgaatttactctcacgttagtaattttaaaattttgtatataagctgttagaattagtaaaattaaaacaaaatattttttatttgttgctaccgattgctttaccttttgttaaaagattgtttaacattttctataatataggatattaacatggttaagttacatgtttccagttttaaccaatcacactagcactaagggcgtgaataatggtacgatcaccatgtaggagagaatgccacacaatatatttttttgttgtggaagtgagtgagaggagagagaatacgtatgtctattaattggtagacatatatgctagacacagtattttagatagatagcttatactatatatgcactccatatacaaaatatagaaccaaattactaattataatgtaggtaatatgctatatgaattcttttgtatatcgtgtaaatatgatatgtgactattatagggcaaccactctctgaactatttttcatgtttttattgggacatttcacaccaacattcctataatagtatgtaaatattgatattagtagaactactatatttgtcagtttttaatatttgtttatacttatcttttttatacacaaattttattatttgttgttttatttttaagtaatatatgaatattataacccaatcaaagtgtgtgcatttttttctttattctgttgcagactataccatactttctcttttttgagaaatatatgatgtgtttgtttttaaaatggcattgacactaaaatttgatcatcaatattcatacaaattatattattattaactataaaactaatactaatttgatgccacaaataattgtatattagaccaatatggtttgatttatatattttttttattccaagcttgtcatatgctacaatactcacatgcatgggttcagctcacaggttagccataactgactcggccagcacaggcgcacgggccaatgtggctagtccagctgggatgattgattttttttatagaactgggatgagagattaatgaatgtggttggcccagatggcagggacacgaggtgagacgacatccagaagctgctgttatttttgttttctaccgcaggaagacagcaatacatgcgcgagacactcgatcttttgccgaatgcttcatggacacgtggcgtaaaactgaatggggtaaaacgaaccaatcagcttgcagcggaaaccgccagctttagataatactagtaatcttgtacgtgcaaggcacgttttgacactatatattagtaaacgaagaagaatctatgcaatcatttctatgcaatgcactccgtataaattcttctagtaattaagacaattttacatagactatactaacatgataatttggatggttctctataaaaaccactattttgaatcactacttgcttaccaatgaatgtaaaagtatttagcgggacaaacacaatttatactgtgatgctgctaccttttgaaagcaaacaattaatgatcaaactcttaacaattttcagctagaagtgaaactgcaagtaaaagagaataactatcaaggcattattttcttacagaattatagttcaagtgctaaagggaaaccaggatgatatgttgtaaatgcaagaagtagctagaatataagaaaactacacagaacaaaaggtacgcaaaacttctgttagaaaaaaaccatatatatacttgatacatgtgaccgagactattgtgagtttttctcaagagaaaatgaaagaatacatacatattaacaatcctgaaaacaaattaagatgactaaattatatattcatgtataaaccttcatctcacttttactttcatgcatcaaaacgctaatcaaattcctaagaccagtataccacaaaaaagtatgcacactagacttctgatcaagacattttcaaggaggaattgcgagtacacatgcaaaccacagatgttctcggcaacaatggagatgtcagtcgatggtcaacaaacaatgaaatgcaataagaaaattatgtattttctaccagggagaaaaccaatgcaccagctttgagcttggctagcaggtgaggagtttgattccatggagagttggaggaagagagacatatgttcatagatggcatcaaaaccaacataataattaaattgctatttctttatcactgtggttggaagagaaaatttagcttgcaacagcaaaggcaacatacatctcaaagaacaaaagaaccatcgctcaaactccagcaccaatgagctctgcatagggaagctcttcaatacaatttcctgacaaatttataggcatgacatatgaagaataggtaaaatccttatataatactaacttggatttgaagaatgtcacgatagcaactccacactcccctatgtgcgcacaaaagtacaacagaaatattgttactgcacgaaaagaaatccccaatccgcgtatgccctattcaagaacattttaacttcagtataataaagacaatagtacacaaaaaccattttggagtacgcctatacagtatcacaaaacaatggatatcattagacctatatataacatgacacttaatgtatttactaaatattaaccaaattgcatcgatttgtgtagtgatctaaataaaccagttcatgggtatagcagtaatttcagaaaactgaaggcaatatcatctagctgcagcaacattctaactttaacaccaatctttttacgtttttggaatatgacaagtactgtatcaagaagcaatggatatcattaaacctacatataacatgagacttaatgcatacacctgaatagtgaatactaaccaaataattaaattccaaatcgcattgatttgttgtgtgggctaaatcatccatatgttcagaccggtcgatttcatgaggttggtacaggatcaataaagaacatgctgcactgttaaaattattttgaaataacttaagaattgagtcaccaacattggcattggcagtcatcaactgttgttgttgctagctgagaaaattgccacccattgaacacttgctggatgaaaacaaagtgagttttggacgaactcatcagaaacacattacaaattttcaatgattttggatcctgtgagttgattaccaacatgcgaggaccgtactgctaaggaatagagagcttgagatcctcattccagatagggtcaagttggctttgatcactgtcgccactaagattcctggcattccaatggtccagttcagaggaagaagcctgaaaccagatgtagctaggtttgtcatttcatctgagcaatgcatatttgtatcaagtatggctagcgattattgttggagaacaaaaacatacatatatgtggatcattcttggacaacctctcggctgtcagctttaagcttaccacaccgcactgcgtggccggtatgcgaacatatcctaattaaaacacacaagtattaattcagaactgcaaaaattaccatgtggcccttttttaatgcagcactccatataaattcttcacgtaaaaaattgagtttcatagacttgttgaacacaacaaaccttcaattagcaaccagttgatcattagagcatgattaagaatcaagatatgtgtgcagcgtttcagggtaaatatttccaatccacgtaacattgcatttgcaactgatggttacataatgaatttggtagaactgaaaaaaacaggtcataatctaatacaatcaccttaagaaggtgcagactgcagcctcatcattcctttattttttatgagcactatgctcaataagttttaggacctaggataggaaaaactccccttgctgattcatttgcatccattgccaacaatggcatatcacagtccaagcatttatttgccaataatttaagaactcggcaaagaaagtaagaatcaaatcaagcaagaaaggaaatatcgttgactacttggctcatagcacaacaaagtttcagttaataattagtgcatgaagaaagataaaagaacaatcaatgtgcctgtgcttaccaccatggtgagtgagaccaacaaatcgaagggcgcggccacgacggtaatcacgaaagccaatagagcaactcagtcatcagaagcagtcggcagaccaccaatcacatgaaggatggaagaagcaaattccatatgtttgtagtcagatttctgaaattttccattaagttcagtgcagtaaacattttagatactcaaaccttatatatactgatacatatttagttgtttatatattgcttaatatcttaattttacaattcatctgcacctgtggtcagtacgtgtacaaatccagctggtttgcacatgcatctgtagattactatataactcatatagaaaagaaatggattagggaacaacatgcctgtcattggctcgagcagtctaaatttcaacagcttttcggacttttcctagcacaggaattgcttcaacctcagtccttttgattgctctactgatgtttgtatacaagaagaaggacaggataagaaacatcataagtcgtgaccagactcataatataacagatatagaccagagcacatatatgaacaaaatgaagaaggtgtaatatattccaacctggtccagaacctgcaattgttagtaccagatgattcagatgaatatacctatcaagtatcaacaggagtagcaaatatccatagaactaaccccagcttgagtgatccaaacaagtcgatctggccatatgggcgagggcatgcactggaatgtgacaaggtgtggcagcagcgggggatcgacgacgttacttgagggtgagaagggaggagatcaccggcgaggaggcccatgcgatggggaaggagcagggagcccggcgagcttcttggggcgccatgagtgacggcgatcttcctgggtggcaccatggggtgggggtaggcagtgggcgacgaacggcgctcgagctccactgagccgtcggagtagagaggatgcgcaaagaggggatggccggcgcggcggagggggcggttgaggtggagtgggagggatgacgggcgacggcggcgcggtgcgttggcaggggagaggtggcataatttttgggtgagccgtggtctgcgggaggagggatgggaacggggaggagaggctgaggggagaacgtggaataatctgaaccgttggattcgttgaatggatggatggatggtaaggatttggctggttgatttcaccagttggattgcaaggggacaactcctcctttttatattagtatagatataagataccgaattctaagaggatttctcgtgcaaaaagcccaccgccagctttagataataagataccgaattctgagaggatttctcgtgcaaaaagccctgccacgtggcacatgtggttccaactccccctcccccccccccccggacagtcgtgcgatcaggtttcattagcaaaaagttaaaactccaatgataccgacctaggcaccccaatccagctttcttagtactagatgttggggcgcgcctttgcgcgctgcctgaaagacatcaacacaataagttaatgatccaagaaacaaatgctaattatacaagaatggcttaagatttggtggaaggaaacaaattcacattgggagaggctagaaacaactagggaataggaaagcaaaagtgaaatgaccaaagaatgagctggggtcgagtttgatatctacaacggctaggtgacgtcatctagccattactcacatatttgatatgaaatactgcctggaagttccagtcctgggcgctaggaactttcggccaacacttaggaaaattctcttccactcctaggcccagaagttccggccaaagcttccaaaacttccaggtaggattctctgtcttgggaggggctattttcaaaaaatagctcccaaaaatatttcactaagaaaatatggctaagagcacttaaggatcctcagaaccacacatatgaaacccctcttaatagtatggtttttcccaaactcaaagtgtaaaatagagctagcctaactcggctccggttcttctgaccactttgaatttgatgaattggggggttgtcgacgtttgagatcgcgactacggtatttgcatagtatggggatcgttggtaccatggtatatgcaagattgaagtaaaagagatgcagacaaggatttttatacaggttcgggccccttatctgacaggtaatagccctactcctgttggccaaagccggtgttgctcttattcattataatcacaccagtacaatatttgggataacacatctagctgtcatcgacttagcggcatggataaccaacccgtagtcgacgacagcgtagttttcctcctcaagcacgaacttgtcgagatcagagatgacgctagatccctcttaccagcctctgtaggtaccggatggggtatgtctaggcttatctctgacatcgatagctggcggcgtgtgttggcttgtgtgtatgttgtgttggtcttgtggcttgtcccctctcctcataggggggcttgtatttatacccatagatgtccctttgtccaagtagaactagggagaccaacatggatacaatccaggtagtccttgtcgttttcatatagaactctgttcgtccttccttatctggaactccttttatatacaatgtatgattccgtataagacatgttatgtggtaggccctaccgagcttagtcaactactattaggtatgtggtatccataaccatgataggggtctccacgcgtcctagccttatgtgatcatggctactatagatacaatcgttgctcatatcatggatgaacaaggagatatcaagatcaagttctccatgtgctggaatccgatttagccacatgctacactgctgacttcaaacggctgccaaatctgcatacgacctccattttcagcccatgagtacttgatggaaagctctcggagtcctctttccaatggatcc

SEQ ID NO: 4351 - DNA, 23489 bp, Oryza sativa
ttcagtataccacatattgagatcataggctagtgaagtcccaatcaaaatgaacaatgtggtcaaagcctcgcagttttgcaataggatactctcatctatacaataagtatgatctgcaaaatctaccatccgtatgagcagtaccagcaattacgccaacgaaattgcagcataataataacatcacaaaaaaggaacacattagacgtcaaaatcgatgcacgggtggcgattctccaaccaacacacaacaacagagcaaagcgcgcgtcacgcgagattggcccgtaccttgaggctctcgacgacgccgggcacgacctcgtgctcgagccccgagtactccccctcggtgttctccctgatgacgacgatgtcgacgtcctggtgcctggtggggaggccggggaagttggagcagttgacgagcgaggcgtagaggtcgagctccttgcggagctgcatgttgagggaggagaccccgccgccgacgggggtggcgaggccgcccttgaggcacaccttgttgcggcggatggactcgatgacggcgggcggcacggtgggcatgtcgccgcggacctcgtaggtctcgaagtagaccggcgcgtgcatcacctccatcacctgctgcacggcccccgtcacgagcggcccgatcccgtcccccgggatcagcgtcacggcgcgcgggttcccgtcccctggcctgggcatgtaggtcaccgtgcggcgcgcgccggcgccgccatggtgcgccggggcgggggccggggaggagaggatgcggcggaggaggggggcggatcgccgcgccatgggtgggaggaggaggaggcgaattgcgatcgggaaggcggaggcgaggcgaggcggccgggaagagaggaggaaggagaccgggagacttggagaggggaagaggagagaggaggagaaagggaaggcggagatgtgtactcgagttgttttttgcggtctaatcccttggagatttttgtatttggagaattgcatttcgaagttagacttctttcacaagaataatgacgaggagtccctgccaaatgggcccatcaaaaggccaatctatatttatatatcccgtaataatttaatcggcaaaaaacacataaatgcgtatcaacttgcagaacataagttgagcaatggaagagatgagaggtaaactattgcttgcgtgcttgctggaatattatttttttggttcagcgaatgtatcgatcaattgccactcaatccatccaatattccagtaaactaacctaacgcctatcatcaactatcagttggagactgaggtctgaaggtagcaaatttgggcttttgttagataataatagcagagagaacaagtagaatatggaacgaatttgattcgctgaatgccacaaaagataatacaggagtgtagtatacttcagccattaagatggcagtttcaaaaacgataacgtgtgcgcctcgtctttttagatttacacaaatgtttccacaatttctttcttggtgtctaccatcgaatctgtttacaacgaggagcgagaacaggattgtcagccctgaaagcagcttcttcggctcgagattatactcaaggctcatagctcccaacttttcttataaccaatgcacactagcaaagaaggtgagaagtggtcagcgtgcagtgatagactgatagctagctttaaaacattgaagaattgaactgtactactactagtactagtaacgattcacgaacacctttggtaatgttggcagcacaatggaaccttacaaattaccatttcatacataatacaaagtaacttgctcacaatgagaattcctaaagagatatatacagcctacgcagggatagagcttctactaggctagcaagatccgtatgctctcacccgacccccaccccaatgtttgaagatttttatgattagtacttcatatatagtacataattgggtgcattctcttgttaattcctccatctacttaattgattttattatttttagagatatttaattgtgaaacaagtcgctgcgattagagtgtagaaatcaagaatatataatgaagaaacataagtatgcggtaatgttgtaatttagtatagatgcttttgttttagagctgctgtactcatgtattgcttagtcatgtgttttgtataactccaatgtctataaattccaaagaaccgcaatcttattttggcccctcttgagatttattagttcaagctccactattgtgtgtattgcttaacagcaaaaataattatcagcaaagacaatgcccttataatgcattttaaacaatcgcatgcatacagatagtacaacaaagatgggagtttatcaaatggctgattctatcaaataattacacttacagtcaaggaataatcactataataaggaaatagtgcaacaaaatgagcagccaaaatagtttggcaatttggaatgaacaaacagaaccttattgccttaatcttatcagagtaagtaacagggtaagtcagcaagcatataccttgttgttgctgagaacaaatcactgtccttatttcaatccagcaacctttttcctgagcaatgtattctgtttttcctacaaaacaatatcagaatacagatcagaaataccacatcaaagaataggctagttgttactaacagtagcatatctaaatgcaatccttgcaaaatttgtggccaggcatgactggatgaagtagtagtaataataataagacaacaataacatgatatagaccctgttaaatttgagttgtattataatgtagttcaatcacatgcctatgcaagatgaaaccatatatatgtgcagaaccttaaattctgcgcacagccaatctggatttatcattcaagtattcaatacaacactttgtactgtttctaaagcccttttcaaactaaaaaaacatggataataattatgtatagtccaaaggccccaaacaagttgcatgctcgtgaccatattcatttaccaagatcagcagcattccagggcttaaatcgtgattttgtggcttctgagcaaccaccaaaaagggcataactgctataactgattcttggaagcatatttttcaattctatttttagctttttatatatcataatttattaataatttaatatgagtcttatattgctcaaagtttattacgaagtacataaaacaccttttttacacataaagcatgtcaaaagaaaagaacaacgggtcttaaactcttaactgacagtttagtatcaattcacgtgaaattaagggtattcgagctacaggatttctcaaacagaagaaaattatccatgagaaatacagtatcagatagaggtgctatagctatagcactcacctgtactgctaattgcaattttagttgcctttgcagcttttcacaagatagatagcagtcaccgtctaagaaatgtgtcatggtactatggcggactatctagaagactagaacacagcagcactcaatctcacttagacctaacttgttcagccagactcaaccaaagcagactgcctcctggcaatcagaactgactcatgatatggatgaattacctctttaactattagtctatcaacaagcaagtaaaaaaaacagcactagttaaattagaaatcacaaatttcagatttatacatggttttggcagagctgtcaaggcatagtttcattcacactaggaccaaagtagagcgtggattatacatgtggttactcaaaactcaaactatgcaatttcttccatctcgcatatcaccacagtaatccagcgaaagagctcaccaccttattttggcttatgacaactcaaatagccacacttgtagtcaaaacaaaataatacaacacattgctacaccagaaataggtgttctaaaaagatgtttggtgaatgccttattaactatttagacctcccatagccacttggatcctgcagacctgcatggctggattcacgccctgctccaactcttcatataccactttatctcagcctcaggagatcccagactcccagttacccagcatatcctagctaaatcttattttgaaaatttccttgaagtgggcgatgccacatagcagattaagaaattaaagaagggtaatacaatctgcttccttaagcaaacacggatattcaaaaagaaaattggtttcaggaggcaatgttattgcgttaagcagaacatgaattctttggaaactgatttagcctttctatctagaaaatatttcataccccctctgtccatgatggcagattcatccaaattgttcgatcgtttcttctattctgatgtgaataaatcttgcctaattcacataacagaaatattgtttcaagttagcctaacaattgacacaggatcaatcaatttgtccatagagacaacaatatactccaaaaggcaaaattctgacaacacaaaactcaggatccaacaatcacctgatcgagcacgcgttcgttggtccgctcaacctgccgagcaagcccctccagcttccttagcatcccactgtacatctcctccatttcggaggtcagcgcagaggccgaggtcaccattgcccctaccctctccagcccgaacccttctaccatcccatcaagcgccttctgctcaccaatgctgtaaccctgctttacaggctgctccggcagcgacggcaacggcgactccggcgcgaaggcgtggtactgctccctgaatccgggcccagcgttgacgacgctgagggaggccggcacaaggcgggagtcaacgaggaggaacgcacggtagtcgaacgagtgaacggagaggccagcggcggaggaggatggtgccacgaggaggaagacgagcgggtgggcgagcaccagggtcttcgagagggagcgcgcgagggcggcctcgcgcatggaggggcgcagcggcgagcggcggcgggaggaggagaagaagccgatggcggcggaggggtcgggggagtaggacgacctggtgaagcggccgagcggatcggcgagggaggaaggctgcgcgaccgaggcgtgccccacgacggagatggagagggaggggcccgaggaggcgcgggcctggtcgtcgtcgtcgtcgtcgtagaaggacgggggagccgcggctgcgcggctagccacgccgaagaggagcccgtcggagtcgccgtcggccgagccgcagcaggcgagcagcgccgcgagggcggcgccggagacggagagcttcgcggcggcggcgggggccatcgccgtgagatgggattttctgggggaagctttctgttccggagttcggcgaggcttttccgagacgtgacgggcgagacgaaggtacagcgccttccagacttccacggatgagtgatggcacacgtgggctactaggctgggccgtattgaattctttgtttttcatttggattacgtctattttacctccctcaactcttgctcttgattgaatcgcctccctcaaccgcaataccatatataaccgccaaattgagcccctcggcggtttagctggtgctttggtcatatgtggcatccacgtggcatgttgactacgggccaacgttatagagcacgttgttgcctgccagagtagcttatcccgcggtggtggtgagcgagtgaaaggggaagatgacgtgaggctatggttgtggctcggagcggattaggggaaagcggacgctgcatgagggacggacacacctatagtggaggtgtgtcactcccgtgatcggttgattgtgccaccagaaccatcgtttaatcctcatgcctcctcctccgccgtcgacgcctacatcatcctcttgccgttgccattaggaaaaagggagataattagggatagggaaaagaagaggatgtgttaatgatatgtggggtccatcgtttttttattactccctccgtttcaggttaatggtcaaagtggaaatgacttgtaaatgagaatgagtggctttatgaacctctttgtaagcacttttggtagtgcaacctccggatggagtatgcttccagcaaagtttgtctgggtcttcatttggaacaagctgaacattctgaatggcttggattgcttcttggtcaaaaatttgttgcagcttttgtgtcccattttttgttctcatcccataattctgcaaccttagagggcaagtgcatattaatagcccgagagtttaaatgattatcaatgttttcccagattgaacatcaaggttgattccagatgaatacctgaccttgagagagttgccaaatagttgaagaatttagaaattttctaactttaaggatagaggaccagaaggcagatttggaaatgttttcattagctttccagaaagaggtattattcaaatattttgctttgataatagtagaaactagatcattgggattactaacaattctccaagttgattgaataagaagacttcgattaacattgagcaaatctcgtatacctagtcctccttggtctgtaggtttgcatataccctcccacgatcgccaacaaactcattttttactgtcctcagtttgaactcctgtccactaaaatttcctgataatagttgttagtttattaagcaagcatttagaattagaatagtggacatatataataaacatggatggaagcaaaagtggacttaataagagagtgcatgagaaagtttgtttgctttgatcattgtcaactttgctctaaatttattagggggtgtttagatatatgggggtaaagttttagcgtgtcacgttggatatacggacacacatttaaagtattaaacgcagactaataacaaaacaaattacagattcgtagtactagaatatatcatatctctccaaaataacttatattatgggacgaagggaatagtaaatataagcaccagcatggccatgttaaatataagatttaaattcggatgagctaattccaccacagaaaactttactagtcgagctacgctcacttcaatttgcctctagttttattcttggttttttttatcaaaaagagaaaaaaaagttattattgttggtattttaattgttgtcttctgcggtgtgagaaactaaatgggccatagaaaccgaaatatgggccaatacatgtcaagcccatttctcatgggccgccacaaccatcatctcactccctctctcgattctccgttgccacacgctcgcaagcagaggcggccggcgacggcgcgatgccgccgagacgagggtcgcaggcggcaagaacaaccggctggcggcgggagccgggcgggcgatgcgagcaaccggtgcggcggcggtccaacggccggggagggagtggaagtttggaaccactcgaggtaaaccttccgaatcggtagaaaccccccaactctgaatttgctaggcttttattctggggctgttcactttgatgccaaaaaaaaatcttaccaaattttggcattaccaaaattttagggcctgttcactttgttgccattttcaaccttactaaattttggtaaagttgtcaaaaaaaaagtagctacatttagtttgctgccaaattttggaaactatataagaaatcctgctaaaattttgttgccaaaattttggtaactatgccaaaattttggtagaatttcttatatagttaccaaattttggcagcaaactaaatatagccatatttttagcgactttattaaaatttagtaagcttgaaaatggcattaaagtaaacatgctctttatctttcctgtgaataatcgtatataatcttaggaaccgaataagcccaaccaatataatcgatataaaaaccatcatgaactgaggacataaatctcgcacccccaataaaaaagctatcgatcaacagatcaactgatacaacatttcagccatctgataacctgagctaactaggctatacagtattctgaatttctgacacaattcttgcgttaaaacggataaagtggcctaacaaagtaacaatgtaccaaaacaactcatttaaaagttccgacattggagaaaatccacgaaggcgccatccatgttttcatctgcatcacagaagcctgaaactctatccctgttctattagaaaatcatgctgatgaatacaatactagtaataggtgaaatgaaaaagattgaaatacccaaaatcagtgccctcacatgtcagaatgcaaagttgatttttttacactggaagcatgtcttcccattctaattgtcgtatctgatacaaacaacaaggaatttcaacattgaatacgaaaaacgtttaagaaataaaacaagacagacatgatcgaatctcagtgtggaaccatttggcactcgaacatgttcagtctatctgcattgttgcttgaagtgataagtcaaatctcaggatagaaccatttcgcactcgaacatgttcagtttatctatatcgttgctagtgagtagaagcgaatgaattgaacctccgaatgaaccgttttgcacttgaacagtttctgtattgttttgttttttgaccgatttatctgatactacagaaacaaaacttggctcatcgtccatccaatatttataaaactactgtacatttggcaacccaatacccaagatttaaaactattgtacattaggccacagccataaatagtgctacccaatacccaagatttaaaactattgtacattaggccacagccataaatagttcaggaaacaaatcttggttcatctaaatttgtatgataaatcttaagagtaaatcttggttcatctaaaattatatgagaaaacttaagagtgcaaatgttgttggttagacactcccccttcaggttctctcatttgcatgttgaatctgatgtactcattttctctcttttgcttgttgattctgatgtactctctcttttgcttgttgattctgatatattccaccaagtgttcggtttgggcccaggagaaattattcctatctgcagctgcaaattttccattcaatgtgaccatagctggctggttgcagcagattgggcaccaactttataactgccaataacaaacaatatagcttgacaaacaaataataacacatcctgtatgtgaaaatttcaatcttggaccaaaatatatgttgtactacaaataataaacattaaacaggtctgataaatcagagagaaagctttgtccatctaaaattaaatggaactaatgtacattggaccacagccataaatagttaaggaaacaaatcttggttcatctaaaattatatggaaacagcattgtccgattgagatgatgtttgcactcttcttctaacatggcaccggctgcaaggttccagaacagtcaaattaactgtagatggaactttatcctcaatgtatgttctgatagccgcgagcccccttggagcttccgtgagaacaccatctatcatgggaaaacaccgcctatacttatcttgatcacacctaggaccataaatggtatccaatgtaagacactcaagtgacaccgcattattgaggatataacatgttagttccaccaagctcttcgcagagctgaaaccagtgatcttcacactcttgaggtggccatggtggtgttcaggtatgtgtctcagttgtgaatccgtgaaaatcgattcattcaccatacgtagagtcacctgaccatgaaaaggatgatatgcttgaattagacccagagtgataaaaaaagctttggaggatgaaatgaatgaatgaacaacactagtgccttacatttaatatcaaagtctccaaggaaggagatgcattgataaaagaaaccagagagaaatagtcatatggccgggaaatggtcgatcctgttatcatacgaatggtcaggtgcttaaggtagatgaatttggtaggtagcattggtgcatcaaccacctgcacaacaaatatggcatgtatcagatttattatacaccaggtattattaatgtaatccgtatataacattccctaatgtaatccatatatatggttatactaatgtaatctgtatatatcgctgtactaaagtaatccgtatatattgctatactacaacacctcatcttttagagaatatatacctcattcactgattcaatgacaagagtttcaagatttggcataatggatggcagattggcacgagcatcatggattgcacatcccatgtctagtttcttcatttgcagcgtttccacaactgagaagttaaccctgaatcctctatggaaaaaactagagagatttggagctttgctctctatcactttcaagcttgagcattcaaaaacactaagtctgctgggctgctgtagggcgaaaggtatcttcaggcaagttatcttcgtgcattgagtgagctctaaatgctccaaagcaagagagttggaaagaaggcactctaactcagcccatgtagctcactaaccacagagacagacttgttaggcttctcaagggggcaagttcaggtgtgggatggagggcacaaaatcgaagtttaatgtaccgaagtgagtctcgaaccccatcagacaaaagtgagcatgggaagttgtattgtttgtttgtgtcaaacaaaaaaagggtgagttcttcgatccctggtttaagagcaatctgaagccaactgtcaagataactagtgccatcgaacccacacatgccactgtagtcaagcttgaacgttttcaagctaatgcctgagtggttcctgagaatgcacccaatttttccgtggaaattctcgccaaacgcatttctcttcaagccaatcgtgtctttattaaagataagattgggatgacacctccaagaacgtagaaaagcacgagatacgcaagcagcacgagcagcttcacgcattgacataaaggaatgtatacgagacaatatgtcctgcattacacaaacatcagataaaagatcaacattgatattgcaaatccatatgattacttcaattggagaaagaaaaaacagaagaatcacacagagtaatgttctgccccaggtagctctccacatgaatgcacagggtgaattgcattacataggttagatagtgcagaggaacataaccgtgctagggaaactcagtactgcatagagaggttttcctaacagtgttattttagtggttttctaaatgaaaaaagagacagttgctaacagctagcaccaattaacaactacatgatatatttttacttgcattagtagttgaccataatgtttccttgttattgcaagtagcacccaattattgtaagttatcaacatggtactaaagcatcccacttatgcatcaaattctggagagatgttagcaacctttgcagagagaacagtcactaatagtactaataatgtaggactgtgatcaaatcgcagcactaaaataatctttgctgtttataaatgagctccctccatttagtttcaaattgtacaaaccaatgccatataaaacaaatggagggagtaatatacagccagcctatgggtgagacgtggtgatattatgcttgcaatctaagcctgcatcatcagaattcaatgcctcgtacctcaggaagatatgggattgaatttctcatcattttgccagcttgagaatgaccatcgccatcatgttcacacggtgatatctttcttttacccgttgaggcaataaacccagctgctgcgacacgaaagggattgttatggtagcagagacatgaatcgaagaaaagcaagaaaaaggcacttcaatcccctgagatctcacaaaaaaaggagctcaaacgaagaatgtggaaaggcaataatctgagctgttcaccaaagtgaaaaatttgaagccaaacaaatgaaaaatgggtatccggctcacatcaaaccagatgagccagttattagttaggcaataaaaagagcagctttttatgagctgacaatgacaaacacatctaccgagccaaacgtgacagaaaaaaagatgggcgaaagagttgttcctgttcagagaggaaggaagcttacagcgggctcggatttgcggccggcgatgccgccgccgccgccggccgcgccgctgggacatgagccggttcggcgccaacatccccaaagacgagctcacgaagatacccccttcctccctcggatctgaccgagaaatcacttccgtttccccctccttcagatctctcctcttctcctctcctgccaatttgcggttcggttttgaactcaaattcgcaccggcgacggcgacggcgacggcgccggcgaacggcgggcggagctatctactcgcctacagaacgacaaaagtaaccaaaccctattcagtgtggggactggggagtggtttgatcttcttttttttttttttttggcttttggagatgatctcttgctccggtcttattggattgcggaataagtctattctgactccctcttgggcttgttgaatcgcatccccaactgtaaaaccaaccaggtataacgtctcccccaactttaaaaaggaataagtcaactttggatccctctattttgtcgcccagtccgattttcatcccttgaccgcaaaacgggtacaacccgtcccccaacttacaaaaaccggacaaacgagatccctcggcggttttggctgacgtggcgcctacgtggcttgtttgactaggtctccgtcccacgtggcattgacgtggcgcttacgtggcaattatatctagaaataataaaaagcgtggccccacatgtcagctgcacacaaaaaatatttttaaaatggtgggacccacgtgggccccacgtgtcagcctcactcctctcttcttcccactcccccctctctctctccttcctgggcagcggacggcgcggtaggcagcggagcaggcgagctccggcggcggcagcgggcatggtcggcgccgccctccgaccggagcgccgcggacagcgcggcgtaggcggcgggtgaccggagaagcgcgcgccgggcagtctgagtcggcgagcacagcgacatcgggcggcggaatcccggggtgcttcccgctgccgtcgcaacgagggcaacgggggtccgcctcggcgatgagcacgtaggtgaggcaggacgggtaggcggccgcacgcatggacgggctcgcgggcgtcgccgcgccccccgccggcggcgagcggtggcacttgccgatggaggaggacgaggaggtggacgccgacgatgacgacgacgtggccggggaggcacacgcggcggcggccgacctcccggccgtggcgcgctcgagcgcggagcggaccattcctagcgtgcagaccgcggccaatgtagacgcggccgcggcggtgtaggacggcggcggaggcaggttgaggtcttggtggccgacatggacgccctggagccgaggagtcagaaacgtcttccctgactgcaagaagaagaacaaaaaaaatcagtaaactccatttcttcaagattaacccaagaacagggcaagatcagagccttctgaaactaaattcagatggaacaagtttttttatgttcttcatatgaagaacagagtgcttaatctcctaatattcggaagaaatacagcatgcaacacatgaaccgatctctgatagttgcaaacattgcaaaattgtttccgatcaaagcaaaaaacaaataaccgaacgaatggaacagttcatctcaaaattcgtcgacacaaatagaggcgcagaaacataaaccgaaactctgaggagcggtggggaaggagcggtgggcgcgggcgaagaaggccggggtcaccgacgaggtggtggaggaggtgtgggggcagagggcgaggggccaggagctcgccggcgccccttgccgccacaggaatatggaggatgccgccgcccccgtccctggtattctccgccggcgcccccaactcgccgccggggcagcctcgtcctcgaactcgtcggcggcgtccgcatctgcgcctaccccgtcctggtgggagacgatgaggtcccacatcctcgcgctctccaacatcctcccgccgccggccaattccgacgtcgcggcgctcgccgactccgaccgcccagcgcgcgcgcttctccgtcacccgccgcctacgccgcgctgttcgaggcgctccggtcggggggcggcgccgaccatgcccgccgccgccgccggagcttgcctactccgccgcctacccacgccgtccactacccagataggagagagagaagggaaaaggaagaagagagagaagggagagggaagaagagaggagcgaggctgattatgtggggcccacgtgggccccacatttttaaaattattttttgtgtgcagctgacatgtggggccacgctttttattatttttccgagatataattgccacgtaagcgccacgtcaatgctacatgggacggagacctagttaaacaagccatgtaagcgccacgtcagccaaaaccgccttcagaaccgccgagggaccttgtttgcccggttttcgtaagttgggggacgggttgtacccggttttgtggtcaagggatgaaaatcggactgggcgacaaatagagggacacaaagtgaacttattccctttaaaaatcggtgcaaattgattcatttgtgggcctgccactagggagggtactggttagcctatatttatacccaaatttacccatcctcactacaatgcgtgcccctgagcgtgcacccggctcatgttgtctgtcgtccgtccacgaggtgtgcccctagagggaggcgcgacccccacgaggggaacacgcgcccttgacccctcaactccgcttttctggagccactccttcgaggctatgcgttgggggcttggggtgctcatggacacttattctatatctgcgatttccccttctacccttggcctcgtcgctgggaggaggtggacagtggtgggaaggaaccagaagcggcgaggaggtggagacgcagtcgacggccctggcgaggacagatttgcgacgacgacggcctggggacgacgcaaccgactagatctggactcctgacacaccgctcgtcgtcggccaccgcaccccacacgccactctccgtcagcagtgacaggagagagaggcggcgacaacaggtggcggcgaaagagaggtgacgggagagagagagaggatgtgagagagtggatttggctgccggcgaggtggacggcaaccggcgacgagagagagtaggagaaacggcgacggccgccgagatagagagggagacagcagtgacgggtgagagagggagagagagatgcgagcgatataggcaggagagagcgggaggcggcggcgcatctgggcgaggagggagaggagaagcggcgaggggataaaggggaagaaaaaccgcgaaaagaaaagacagaaaaagagaagagatgggaagaagctagtgggtgctcggtgggctaggggtagggaaggaaatccatatatgtggctatgggttgagacaccctgttgtgggttggagtaccttcattggttgcttgagattttgaagagcccagctgtgacctacgagtatcccccattgggagatgggtgccctatgaacttatgaagtggctttggttagtgagggcacccatagagtgactttggttacagatgtcctatgtgggtattgcagaagctaacagccgacaaaatgagtgagataaaagaagaaaaggaattgcctgggcagaagccttcttcagctcggggcacctacgccatgatatttccgtaccttcgcagttcatccttgccatagaacaacagcgtcgtcgatctcatgccattgcccctgtgcttcacggatgccaagcaaaaagaagccagcaacaacaaagtctattgtctatttaggcctcctttaattcaaagaaaattcataggaattttagaggatttcattcttatacgatttttttcatatatagccatttgaatcaaagaaatgaattctatgtaatcctataaaattcctatgagatgcctaataccatgcacatgaggttttatctcatggaaacttgcctctgagtcatctctcctctaatccctgcatcggcggcccaatcaaatggtcaatcctgcgattcaaatggcccgtagcatgttaaagtctattgtctatttcacaatataaatatttctttcttttgtgatgataagatagtattttcttttgagggataaagataatctattgttttatagtaaaaatgttgaggtatgacttctttaagttttctttttataaataataataaattacccatgcagatgcgcgagcttctttcctagttattataaagattactagccagaatcacgccctacgctgtgtgcatgggtatgaatgtttcaagctgtgttattaagatcaaaacaacacaggtgacttcttttcccaactttctcaactcaactcaatcgttttccacgtgcccgcttttcaaactactaaacggtatattttttgtaaaaaaatttctatacgaaagttgatttaaaaatcatattgatctatttttcaaaaaataataataaatacttaattaatcacgtgctaatggaccactccgttttccgtggacaggagattggttcccaacacacccaaacaaacacagccacagtatctacagttgtaacttttaagaattatatataaacattgtctaaaagaactttatgtcagaagcatacccacatatgcatgtacacattgtgactatcaccaagatttaaatgtgaatacaatctgtttgctcacataattgtttgtacaatcatgtacacttacaaaaaagtagcaatgacagaggacaatggatcttacataatgtggagtataggttagaaaaaacaacaatcattaggtgatatgagaattgcagcattttctcatagataccttcgtcatgaactaattgaatcttttctcatctatagcactgcagcacaaagaaaaatttagtgctttagctcaataaaaacaacagtacatcacttacaacagattagtagacgattggtacctcctttgcataatggcacagaattttgaggtatcccctacagaatacagggcatctttggatgtcatccatatattgctacacaatgagtatatagtaggtagtacaaatactcatataagaaaccgtgttgaaatatctctgtagctttggagaaggggcaaacataacatttcatgaattaaaaaaagttataaaatcatattttgaagtcagcttataatgaaaactctataagtatatttgcaaagaaaaaattcaattggaaggatgggttattagaaaattccaaaacaatgcagcgctgaaaaaaaatgaaagtaggaataatgcttgtcaagaaaaaattacaccccagtgtgccctattggaacatatgacatgtctcatgtaaaattgtttgaagtgcatgtcacttcgtcacacacaaataaattgaaataatactttatgatcaaagcagaaaagagaataacacagtacgtaaagctagagatactaagggttggattctttggaatagcacatatgtattgttaatcggtatggactacacagatcaaccgataatggaactatgcaggttacaactcagaagtacctgtggctttaattctctcaggcaaccatggtttcagtgtcactgaaacaccctgcaaacaacgctaacctatgaaatcaatgttccattaaatattaaacaatagtagcagatatagaaatgactctagcacaagaaaaatgttagctaatatacatagggcctgcactgattttaaaaatgtagtaattgcggtctagtaaagttcacaaatactgaaatcttcaatcgaaccaaataaatatttgttcgctagatgtacaacataacctgtgattaatgccttgacttatagacccaatattgacccaatgtattggttacaatatgattcgtagaataatggagcttcctccagataggaggctaaaagacccgcaccatgaaatcatatcattaccttaatatcggcacaattatctgtctatactgagccctaaagaccctgaggtttgtctcatagaaaattaactgcatgatccaaatataagggtaatatgccaagattgtcaggcttacagtgaatttctgatgatgtatgcatcacaatagccaatataagtttgtcgacaaagaataccatcaatgcaaatgcgtatgttaccattatgtgtactgaattagcgcacgacgaattaacaaataaaatatgatttgttggagaggaaggaaattgaggcaaaaccttccgatagcataaacatgatatgctatcgtggaactaaacctaaattatctgataagaaatatgaagaccacatatatcatcaaaagaagacaataagaaaacattcatacctaaaaacagaagcatagaaaggtggcagcaagaaaactcattgacatgcccacaaaatattattaccagtattgtacaatgaaggaatactgacattacttcgcactcattaacatttacaggaaaaggacaactaagcaaagaacatcaaaacttgaactctccaactaactttttatattttgaagtatatatcttgggaaaaaaatcacatctgccatgtagtactatatcatatacatttatctacaatcctgaatgagcgtaattgataataataaaaaaaggtttttttaagtatatattcttgtagaccaatttgttaagattccagaaacaattggcatatatatgtaccgatgtacatcaggatttcattatgaaggatcatgtacacatctttaacctgtacatttctggtagttgacatagatggtgcactgtcatcttcaatattttatcattattagtgaaaagttttttacgcagagttagctggcataaaagttatacgacattataattaaaaagttgcaggaacaaatgtatttgagaataaacttagatttgccactaaaaattttaccaagcacatagaaggcttttgttaaagagagaaattttactggcgtcagcctaatcatttcttctccttatctcagaagcccgcataggagccaatcagccgaagagagcaaactgaaaagaaagaaattcagcagcatacctgaacgactatggtgttatgtgcggtgacaacggaggagcagattgctcccagcgcggcgcaggccttgatgtgggcttggatgccgccatcgctgccaccagcatgaacaacacatgcggccatggcatctagtgggccatcgtagcaggctattggtgaggggcacaaatgctgttaggagaagatggttgagaatccataataatatacatttcaaatccattttctataataatattttcatagtaaaattttgctgctcctatataaagctattttgatttagcacgacattcatatagtgtaaaaaaaacatatacagatgaccaagaaaatctgtcaactattacagtgcaaaagatcttaatcatatcatataggcagctgcagtaatcctcaaacttttgtagacataatagcaatcaacagaatgatgtcagcaacctgaaaacatatattaaattccaatacaatatatacaggacagaaggagaggatttgatctgtacctggacggtgatgtttaaactttagtactgaataatctagcattctagcctgcactcccttttttctttccttcctaccaatcatgtgaaactcataatgagcagcaagtcaagaatagagatcaggggctagaacagatatgtatatatgcatataatagggatttaagtagtagtgtaccaaattgtgtctgctgatggcttcagcagaggagtagaacaacaaatatggaatcagcgcaagcaagcaggctggatcgatcatatatattgattaagaggattaggcaaagggagtgtaaagttgacctggggaggagtagaatgcgtggtagcagatcgtcaggtcgccaggtcgcagaggtgacgaaccagtcccggcaactccctacggtggcgaactaatcccagtgagattcggcgacacccaaactgtcaggggaagggaacggagacagtgcctgcggcgagagggcgcggccggggaatgagatggcgcttccgccatcccgcggagagagggcgagtgaaaggagacggcgccaccatcgtcttgcagcgagagggcgaggcggcggcaccagccatcaggcgtgggggtggggcgcgaggttgggggcggctgggcagcgctagggttttgtgggggagggtgaaagcatgagatctaagccgttcattcccaaatcaccgatctgagggcagtgaaacatccgccagctgagccacacggatggtcagatcgagcctcacggcgatcgtacggtgaacacaaactcagacgtgggcaatattttacgaaagtaggagggtttttctgaaaaaatcgcatgacgtggcgcagtaaattccaagcattcccacggcgtttaagtaaatcaatataagttagatgaccttgattttacaaaatcatagcttaactagagaaactacttagactactggtataaggataaagacaaacttcatctacagttggcgaaaatatatttaggctgtgttcgcatggggtggatgggaacttattccctccgcacggaaaacggagcggtccattagcgcgttattaattaagtattggctatttttttttcaaaaatagattaatttgatttttttaagcaacttttgtatagaaactttttgtaaaaaacacactgtttagctatttgaaaagcgcgcgcggaaaacgaggaagatgggtcgggaaaaaggagttgcaaacacagccttaactgtcatttatcctagtgtccttaaagttatatgttgtcattgtctttcttgatgaatccgaaaatataagttcgaaaacaagccgattattatactgattgaatttcgctaacattaccactactaaaactacaacgaaatataataacgaagagtaaccgagctgtatatcatggttcattattagagtgagtagtttacacattcctcgcgagtccaagttcagttgcaacgtcaacttcagagacacatcgctcggttgaaaactatcatttcttactaggactcacatcagctagctacacgctactggccgcccctgatctcagagctaaaaccggtgtgcgagaccgaagcgctatccgggtgggcgatagcctgctgcatcccgcgccggcgccggcgccgtcgccgtcagcttgggttcaattctgaacacatttattgccgctttctgcttgacttttatgcttttggcgacttcgattggtgcagaactaaagaagaatctgacttgcatcgcaatatcgcatggtatggtagtagtacttgtgatctctggaaaagaaaagtagaggagttccttttgccaatgtcaaataagatattatgctaatattaacccctttatggctttgctttacttaccggcaaccgactgactctgtttagatccaaactttttcttcaaatttttaattttttcatcacatcaaaactttcctacacacataaacttttaacgtttatgtcacatcgttccaatttcaaccaaacttctaattttagcgtgaagtaaacacacactacgtcctgctaggcctcacatccttgtcaccgtcttttcgtcctgattagttccacgcattttgtggaaaaaaactggtggcactatcgactcagatatcagaataatgttcctgagaggcttcaacgacgtagtattaaaatcagtgataagttatatgataaactgataatgcgattaattgcatggactgtgtagcaaaattaacgcagcttttataagatctgacaaattaaaggttctgaagtatgcacatttgtgaattgcgatgccctggattcaggaacctctctgcaaattgttggtgaagcagacaaatgaattggacgggaaagggaacaggtgagaggatgaaaatgaaagaaagagagatcagagagagaaggaaaaccacgggattattctgatggtatttcacccggatagaaagaagatattctcctggtagtggattcgtgcccctcttttttcaatctgatgcgagacagagttcttagtttggcgagcacggttgacaaagttattcagaaattataatattctgcttgtgattcgccaactgggcattcatctatgcagacattgaactgataatctatagtatgcacagagataacgtcaacattacgaaacccaaatgagcatcttttccatcccaagctgcaagtctccatccgtttcatatcataagtcgttttatttctttaattttttaaaaaagttttatcaaatttatagaaaaaataacaatatctataataccaaagtagtttgttaactattatattgaacatattttaatgatatatgtttgttttgtgtttaaaacgttactatatgtttctataaatttgattaaacataaaaactatttaactagaaaaaaattaaagcaacttatgatataaaatggagggagtagattagccatgaatcaaagcaacttaacgagaggccatgcaacgtgagcgccacgtcagtgaagaccgagtcaaattagctatgtagacgtcacatcagccaaaatcgccgagggatctcatctgcactagttttgacaggacccattgtatctggttttcctgttaacaagttaagagaccttagatgaacttatttcaaagaaaaaaacgtaaagcatcaagacctccctagtatagatggccataaggtccaaggctcgacggcacggcccacgtcacggcattttggcatggcccaagcacggcacggctcaacgagggtcgggcccgtgccgacccgcgatggaagacgagggagagaaaatagacttattttaaaaaggcatgatgggccacccgggccttcggaccgagaatttttttcgttttaagatttttttttaatatttacagaaataatctatcgaccaaaaaaattgcagaaatagcccctgccgcccaaatggtgggcggcatagctgacgtggcagacggtgggtcgaccgcgccgtctgccgccgtcggccaaaa

SEQ ID NO: 4352 - DNA, 22645 bp, Oryza sativa
ccaagtgggacccaagtggggtgcgccccaaccaggtggagcacgaccctagagtccctttggtcgtcctcccacctctttaaatagtttggtaccccttcagggtttcttgggttttgtttagatgaaagtttagccattgctacttccttgcagtgcgtgtgtcggctagaccgtccgtctgattgtattcggaaccccaacttatcatttgtattcagttcctatttgcaatatcagattgcttttatcttgttcttgtttgtttcttcgatttgtttgcaggaatagggttgatttgcaccagcaagatcaacaacccacggagaggtgtatcgatcgctaaggcacaacacaacgtcttgtacggttgtagtcgggtcatcaacgtttctttcaaatcgtagttatctcaactcaccgaaagatcgggccaacaacagccttgagtttctgagtggaactcagggtacatcaggtggtatcagagcttttgttgctcggtgagtttttatctacctataaccagaaaatagccatacaaaaaaattgcatccatcacctagacatctttgtgccattgcttcgttctattcagtttttgctttgttgagttttgcgttgcatggttagtcgtgtttctggtcttagcgtctagagtttcaaattctggtcacatttagtaccactgtcgtcgtgtgcttgttgtcgtcgggacgtacaaaaacggaatcgtctttccgccagggtttcatttttcttagttttcagaagtttttctggtcagttttggagttgcatataggttatataggtttttgtcatgtgcatcccgtcatacgtgatggtgcgcctgtgctgctgcgcacgagtaggatggaagcaagggactagattagattggtttctctttgttcagaagaaatagaagattagattagattagattagattagattgatcggtttctatttgaaccggattcggttttccttgcatgcgagttttccttgttttattcggccgtggtggccttcacattaacaggcgagtgagtccgactccctcctccctctccaaatcaccttgtctctctcagttatgagtcctgtcaaacaatttggtgaaattctgttttatgtcggttttgagatctatttgaaaaaatggaactggcataatttgaggtttggacttttacatttgagtccctataatttctgtatttacatttgagtccctgtaatcttacattaaggtccttgagtcggtttttgttaaaaaaatcaaaaaaaagtgagaaaaggcagaaaggtgcgtacaaaagaaaaaaaaagccgcaccaaaaaaagaaaaaaagagaagaaagaaagaaaagtaaaaaaagaaagaaagagagaaggaaaaggaaaaaaatcaattgtatatttgagtttgctttcatatatcagagtgtgcttgagttgtttctagtgctatctggtggtaccgtttgtgtctaggctcgcgtctctagtacgttctagcctaggaccagcacggtactgactttaaacgattattcaacttcgcattatctgatttgagcatttgctacatatttaagcctacccagagctccacatatttgattgcatccgtacagcaagtgtttgccaagacattgatacatccaacctccattggggtgcttggttgagtcggtgtatatcaccattccgcttgcattggtaataatctgtaagagcttggtgaaaagctggagtgtgtgtgactttttcgcctccactacctagtagttaataggagcgtgcatattttgtgtgtgtttcttgtttgctactaaccatggcaaggttacgcaaggagattggagcagctcatgcaaaacgtggatattttcatcttcgacaacaaatggtaggtgatccacatggcgcatataaggtacatgataatgatcttgcaagggtagaatctaatttgccagtttttgatggtaagtatgatttcgccgcttatattaattgggaactagcagtagacaaacagtttgatgagtatgatttctctaatgcttaaatgattaaggctgctagtaataagtgtaccggttctgcatctttttggtggtatactgttggcaataagcttgaaacttgggatgaatgctaaacaatgatgaggaaaaattttgtgttttcatattataaacgaactctccttgagaaattataacatctaaaacaaggtgacaaaactgtgtgggagtattttcataacttcaaattttgtatcacttatagtggtttaaaagaaagcaatgagaacacaatgactagatttttcaaagggcttaattccgatattcaggcttggcttattaacatgacatataatcatataggccacttgttcatgcttgcttgcagtgttaagagcaatattttaaagaacccaaaggagaaacaaactatgcttgtgcctcctattactgacattttgcaggaagctcagaaaattcaccatgaggagaagagcaatatgatcgagatgccatctctatcgcttatgaaggaagaagagaagactgatgcacctacattatctaaagagggtataaaagataaattaaattgtgctgatattactcaaggtgagcgtgcttctgatgagtcacatttgtccactatccatgctaatctagagcaaattttggtggaaactacttctgatttgcctttgtcacaagttgatttacttgttgttccctgtgataaagaagagttgtgtgataatgcttcacttatatccatgccacaattagtgaatgaacatgctatttctagtgttccattgtgtgctaattttaagcatgttgttcacattgctaatgatgttgaggaacgtaaattgataacttctttaaatactttgggctatgttcagtttgatgatttttgtgagctcgataatttggaggagaaattatttgctaagtatgatttgccatgtccaactaatgctatttttaatatctttggcgaatataatgatagaggaatatatttggtgcatagagttttcattttttcggatttagagaaacatgttattgttaatcacactacttcgagtttctctagttttgattggatgaaacaggttattttgaatgaactatgtgaagagcaccatatgaaaaaactgaggacgattttccatgaagaaggggaggatgatgtgaccatggctactacggatacaaccgttgctcacatcatggatgaacaagaaaatatcaagatcaagtcctccatgtgctggaatccgattcggccacctgctacactgttgacttcaaacagccgccaaatctacatacgacctccattttcatcccgtgagtacttgatggaaagctctcggagtcctctttccaacggatctagcctcatcgccaaattccatccaagtcatccttcacctggttggggcgcaccccacatgggccttggtcccaaacgaagttacaagcccaaaggtccatgacaggtgacgcaacaccttgtttcttcatatgcggatgacttggatggaatttggcgatgaggctggatctgttggaaagaggactccgagagctatttgatagatccgacccaggtggggttgacctaggcccaataaattaaggttgcccgaaccccaacagttcttaggcacacccactcgggaaaatgcccaatctccctaaaagactagtccaataggggaagggtggcactcccttttaaggtcgtttcctgctcccaagctaagcaaggtgggattattcagatgctcacacggtcgccgcccgactacaactggaccacttggccccttgttgtgtctttgccagcggttaatagtggaggatatcctcatcatttccacccccttaaacaagggcccagctctaataccaaacgatagatccggcccaggtggggttggccaaggcccaataaattaaggttacccgaaccccaacagttcttaggcacacccacttaggaaaatgtccaatcaccctaaaagactagtccaataggggaagggtggctctcccttttaaggctttaaatagctaggtaccccttcagggtttcttgggttatttttagatgaaagtttagccattgctacttccttgcggtgcgcgtgtcggctagaccatccgtcttcttgtatttggaaccccaacttatcattcgtattcaatttctatttgcaatattagattgcttttatcttgttcttacttgtttcttcgatttgcttgcaggaatagggttgatttgcaccggcaagattaacaacccacggagaggtgaatcgatcgctaaggcgcaacgcaacgtcttgtacggttgtagtcgggtcgtcaacgtttcttccaaatcatagttatctcaactcaccgaaagatcgggccaacaacagccttgagtttcgagtggaactcaaggtacatcatagccacctcataagcaacttgggactaatctcctgtactcaagctcaataaacgcattagcccctttaaccatttagtcattaataaccaaaatccactaggggatagatgcactttcaatgttcactttgattcccttaactagtggccagatataattcgtatccttcgaccgcaatatcggatatctcaaacccccaactattaaagccagtgcattttgactttctcagtgatttcactgacatggcacatacatggcggtgttgacatggttttcgttcaacgtgacgcttatttggcattagaattaaaaaaatatgtgggacccatttgtcaaaaaatattgtggggcccacatatcatcatctccttcccttcttcctcctctctctctcctctcttaggacaatgatggcgtatgtttatgttcagttccgatccaccaccatcgccgtcgccaactgctgctctcctctgacccacgtccttctgcctcggctgatccttctcctccgccaccgtcgctagttgttgcttcttggtgaatatatctgtccacctctttgacctgcctcctccacccgacgccgcggcgaccggcggtgcccttgacgtgatggccgcacaggctcatcatcgtatgtgacgccaaggcagctggagaggtgggcgccatggtggggatggaggagggggagagggagggaggacgccgccagagaagagctcgtcggcgcaggagggggaagcagcgggatcggtgtcgaggggccagaagtgaaacttcggggaggatgaggaggaggcgctgctcagtcgcctctaggcgccggctacggccacagccattgaattggtgcatgactgtttcttggaaggaagatggggggagaggggggaatggtgaggctttgtacgggggtgatgtggcttacgggagggaagaggaggaggaagaagaataggggaggtgggacccacacacgccctcccattttctgatgcagttaagagaagattaattctaatactacataagcgtcacgttggatgaaaaacatgacaacaccgtcacgtatatgccagtcagcgaaactgccctatagagagaatcaaattgcaccagttttaatactttggcgtttgagatatccggtattgtggttcaaaatatgaattacattcggtcattagttaagggagtccaagtgaatttaggctcagatctaaagtacagagttggctgggctgagctgaaatggtagcaggctgaataggttgggctgaatggcagtgcattgactccctcggtgcaacagtgctgtggatggtagcagcacattaagtaataagttcatctaaggtcccttatttttgtcaacgaatccgatttacgtccttcaaccgcaaaaccagatacaacaggtcccgcaactatcaaaaccggtgcagattaggtccctcggcggtttcgatggcggttttggctgacgtggcgcctacgtggctaatttgactcggtctcaatctgacatggcactgatgtgggcgcttacgtggcaatttgatccgaaaaaataataaaccctgtgggacccatatgtcagtttcacacacaaattaataaaagaatggcggggcccacgtgggccccacacgtcagtctaactcacccctcctcttctgcttcctctctccccatctcccctctttttatctctcttgcaacgacggcggcagcagaaatggagaagagtggccgccggccaactcgctcttgcacgcgctcggcggtagaccagggagctcgcctagctccttcccaccggtcgtcgcccttgtccccgatggccgccgtccgccgcccttctccccaatgaccgtcggcgagagaggagggaacggcgcgcggcggcgtcagccggagaggagggagcggggccaccactttcaccagcgccccacaacgacggcttgccggcgccgctcgccgcggtgacgacgatgaccgtggatgtggcggcgccagcgctggccgccggcgtcgtcaacaacgactcgttggaggacgaggtgccgtcaacgtacattccgatggcggccttcctaaccttgagcacgaatagcagcagcgtgaaccagacgatggcctggaagacggagagctggacaactgttagcattatttttgtgtggcagttagcttcgtgcatgcggctagctagtggctgccgaattaattggatcgcgtgctgcgtgcgcgtacaatgcggccgaagtttgtttgcttagtggtgtgtctgctgggctataaaagtcatgtaatctcctgagttaagtgtcaagtgaatgagaaaaactagataaggcgtttgttgtcgagaaattcttctgtgtttgtccacaaagatttttgctccagctagttgaagtgtgcgtgttgctgtaatcctgttaacgacccacttcaacaatgcaattttagaagtagtagtatcaaatccaacacaaggagctagtgaatctgttacaatagtggaaggttttggggtggaagatggagggatacaagggttagaaggttctagtaacttctagacaagtagaggaagagggaaggtagagatcgacaaggaggcaagcccgcctccaggttgttgtcgccgccgttcgccgccttggccaattgatcggtcgatcgatctcctgtaggctgctgctgctcatgtattgtttcaattggacttgtttgggctacatggccatgggctgaccagcctgtggtgcagtcagcggcccatgtgcagcccacctgagacactgacaaatccttggccagagctgacaatgacgagctgctacgcccactcgccgtacatggcgcgcgccatgggcacaccgacgacgagcgagttggtcagcgtggacagcgagaagctggtgatggaccagcgatggcgcagccgcctttgctcatgaaccgtgcccagacgccgatgacggcgacgggttcgtcctgactagatccagatccctcgggatccaccaagagaggcttgagctcggcagcggcggcgagggggtcgggtgaggcgcgggcagcacgaagtcgagcggcgaggtcggctacgaggaggcagcggcgaggtgctcctgcctgtcacgcccggaatttctatccaaaattccaaacgcttacatgtgtgtgaaccctcgtccaggaatcagtcgaggcacacaataacaaattgataatagagtacaattattactctaattaataagcgaataaaatgtcattacagaggtagatagttcctctcaatcaataaagatctaagcagcggaaaataaaaaactagcgaagctccggctccactccacaggcaacttgaccaaggctacacctaatcctccactccatcagcttcactgtagaactcttcctctgatgaatgattgcaaggtgagtatatgacatactcagcaagccacgcagcaaatatgcaagtgcacaggataacaaaggatggcataatagggtttcatttgcaaaagcagcatttagcaaatatttcagaatttaataaaacagttaagtattaatcaatattaatccaacgctatacaacataccctgttgtataggcccaaccattctgaacaaccatcccggctgcacagttctatctccaaaccaggaatataccattccaaaccaggagctaatcaaattattaccaattatagcatcatttactaaggtgagaagggtgagactaatcacgaaagacattgttagacccgcccataaccgcgggcacggctattcgaatagttttactttgatcagaggtgtaccactgtacccacaagacacaaccccacatcatgtcaccatgtgcctcaataccaccacggtatctcggaaaggagtcgtgacaatacccctcgcataacacaatccactgcaatgcaccctcccggatcatagtcacccccttataaacaaggtatggactccccagcgaacccccgtgggcttatctccgccacttctcagtctggtgctccgcaatgaaccatgctatacaaaagataaagccgttgcccatgctggcttgtggttggcacgataaatgtttcacaaccgaaactcgtgaaccggtccttaattgtcatgagcacgaccatcaaaaccatgtgctcacaacccaccattaccaggttttagttggcacattaattaattatctaatcacgattaaccatcgtgaactatcaataaactatcatgaaataatagtgtggcattagttatcccatgaatgtgctaatgtttctaagcagggctaagcaattatatctaatatctagttgaaccagtataaataaataaagctcaactagtcaaattataacccaaggtatcaaggaataaggtaatcaagaacaaaagggctatatcaaacaataggttaaatccacccaatgacattcgaaaataaatgcaatagttgaaaagaaacaatagctttaaataggatcaacatgctcaaagggttgtttgggatctgtgtgacttgccttgctggccttggaactcttcaaactcttctccggcgaaaacggactctccggaaacgacggaatctaagcagaaaagagcaaaatcaccaaaacagcacaaaaacaagcttgaacagtacatgtggatatttttaatgtgtagatctcaattttagaaaaatttagagacttgaaccaactaaatcggagctaagatgaattagttatgaatttttaaagattaaatcggattaaaacacttaaatcggttaaaattgaattatgatgcaataatgaattatttttgaaaaggaaaagagggtttattgcgtcagcgggctagggtttggtggaccgggcgcacgggcgacggttcacgcaaacggacggccaagattgatcccacccaaaacggacggctgagatcgatcgggtccacagcggctcacgggagacgattccgatgacgtcagcggtgacgtcaccgacagcggcggcggctcggcggaggagacggctcgggcggcgcacgttcgccggcgaacggcggcacctcggcacaaacggagggcaccagcacgtagaggacaacgcggcgaacacaccggtgaccaaaacggcggcggaggaggaacggacgacgacggcgacgaggaggaagcggcggctaccttcgggttgtcgacggcgacgatgctccggcgggttccgacggctgcgaaggggcggacgaggacggcgacgacttgacgagcacaacggcggtcttcccgagcgacggcgacggctgaaacgacggcggagcacggctgagattgcggcggcgacggcgaagctagggcacacggcgctagaacgattccggcgacgagaggcgaaggcgagggtggcggcgggtagaagagacaccgggggtccttttaaaggggctcggaggcggcggcgaaagcccacggcgacggcaacggcgaaggaaagctcggcttggagagagggaaaccgatccgaaacgaactcgactccgacgctttccaaagcgatttagccaaagattccaaaggagaaaaggtagaggagatcccgaggatcatttcccctctatcaattcggccggagaaggaaaggaacggccggatttggaaaggaaacggcggcggcgacgctagggtttgcgggcggcggcggccgaaggaggacgatggatccgacaagcgggacccacctgtcagcgacagcgagggcgcgcgcgcggctgcggactgggccggctgggccgaggagagagaagagagcggttttgggccgactttcggcccaaagccaaaagagactttttaaaacctttttcaatttaaattatttcttaaatgcaattccatttattaaaaatactttcttagctcaaataaatcccagaaaaatctaggaattatagaattaagcaaagtatttaatgaaattttatctggcccaattttatattggaatttattaattaaaattagattttcttttcaagacttttaaaataaattctaaaaattccatttaaacaacaatttatatattttgaatctttagggtgtgacactgccgctcgtggagctcgtggcgggcggcgaggaggcggtcggaagggcctggagacgaggagagcagggcgagcgccgaagcgagagaggaaaggggagagagatgaagagatgggagatggggagagagaggaggaagaagaggggtgaaatgacatgtggggctcacgtgggccccgccattttttattaatttgtgtgtgaaactgacatgtgggtcccacggggtttattatttttccgaattgaattgccacgtaagcgccatgtcagtgccacgtcaaattaagaccgagtcaaattagccacgtaggcgccacgtcagccaaaactgctattgaaaccgccgagggataattcacaccggttttgatagttgagggacctgttgtatctggttttgtgattgaaggatgaaaatcggattcgttgacaagttaggaaccttagatgaacttattccgcacttttgaacggggccttattccattcatgggccgatcaggcaaggcccaggaagcggcggggaagcggcggctagcattgaagcgcgggaaatccaaaatctcatcggccgcctccttccccaatccaaaaaccctagcggagaaatctctcccctcaccgtcccgcgcgctgctcggccgccatgagcgcccccatggaggtctccttctccgcgccgcctcctccggatgcggcatctgctgccgccgcggccccatcgctggtgcccgccgtgtcggcggcggcggtggcggcgaccaccgtttcctgctcgccgcagccaccgacggggtcgccctcggccgacgacaggatcctcgtttcaggtaggttgcctcggttacctcccgttctctagctatgcacggttgttgtggctagcgaatgctgaatcatggtggctgtgtttttttaaaccctgtgattgcagttgaagtgcttctgcacgccactagcacagctcgagccgaggacgtctgcgctgcggtggagaggttggtgtttatctcattttctgttaatttttcgggttgttgatgttgtgagcaacgtcaggcgggttggtttagaaaatggtggttttctagaaatggggagcgattgagtttgagcattgatggaaaacggtgaagctgaacactgaagcaacatggatttgggatatagtatattttctgggtatctaatgcataaaaaacctgggtcttctgtatgttctgaagttacagaaacttgtggtactgtaactagtgaaccaatgcaagtattaagagtgagttgtaaaatgcatcaaccgcagctttgtggaagccttggtggtgccatggcagccttgggcagaggcatcaatggttgctgcaagggacttaacatagtttccggaagagagtttctggattttatttattcgctcacataatttgcgtgaatactagcatcttattcatgagccattagcagctgttatttctcgaacttaatatctactacttgctttatcaatcaggatgttagaagctcgaagcttaagctatgttgatggtcctgtcccgattcctaatgatgatccttttcttcttgcaaatgttaaaaggatccaaatctgcgacactggtatggatctacttagcctggcaattgtgctttctttcttgacctcattgcttatgcatctcttggtacttgccttttatgtagatgagtggactgagaatcacaaagttctgttattttggcaagtcaggcctgttgttcatgtgttccaggtatgcactataaataatgttagctgccaactgcctaaacctcttccacctctttcaagaactgtggttatgaattttgtgttgacatgttggctatcgcgctttattgataaattgcatgtggaatttcttaatactgtacttaattttctcatttgttttctctagagtagagacttccaaaggtacattctacaggtgcatttaactatttgccacccatatctcaatgacatgtgggtccacatgtgtctatgacatgtgggtccagttaattgccacatttaaaagtggcaaatagttaaatatctcacattctacatcctaatgtcttaatactgatccataggaatatgttctttccaatagatggattgctttatgttgtttattggattgaagagacattgatctaattcaaatgtatttacctcaatctggtttgcttatgctgcagttgagcgaagatggtccaggtgaggagccgggtgaggacgatacactctctagcttcaatgagtgggctctgcctgccaaagaatttgatgggttgtgggaaaggtttggtttacattcaatttaaccttaactagtacaattccttgaagaagtacactatccttttctgttgtgttggtaacatcataagtctttgcagcttactctatgaagttggtctcaagcagaggttgctgagatatgctgctagtgctttgctgtttactgaaaagggtgtagacccatgtcttgtttcctggaacaggtaagcgtcttaagaaacacctagggtggaaatgcctgagctctttacgagaaaataggtcatcttaagttacctgtagttgcatatgttaaattgtacactgatttttcattcttttggttgttttgattttctttgtcaacacattgcaggattgtacttttgcatggtccacctggaacaggaaagacttccttgtgtaaagcacttgctcaaaaactttccattcgcttcaagtcaaggtttgtgctgaatgagatacaatactgtataattttggttaatgaatgtgcgttattcatttctataattcttttaggtattccatgtgtcaattgattgaagtcaatgcccattcactgttcagcaagtggttttctgaaagcggaaaactggtatgccttttttgtgctaaccgaaagactgttatatgcatgtgatgattcatatgctgaatgctattatctaatgacacttggcttgctcatgattttgcatgtggtggcttttattcttatgattcatttcgacctttttatactggactttacctggtataattagccaatggatatgcatctttattcgcatcttaaattccgtgtactctgtgcaatccttcattttaggtggccaaacttttccagaagatccaggagatggtggaagaagaaagcaacctggtatttgtattgataggtacgtcagtacgtccttgagcagtgacaagttaacactatatattgacaactaggcaactagcccaaagtgatgaaatgactatacgagtcttcactgtatggtctgtgaagtgattagatgagtccaccaggttcattttgtatatgaatagtttaggaaggttaattttcatgtcaaattgtcaatttggctgagttcaatttaagcttccattatctaaaaatgttgaattgtcaatcacgtttctccttaaagatacacccctatactaatgattatgtatcaaccttggccacctgtttgacatatgactatatgagcgaaggatccttacaatctatattatactctttcacatggagtttgatttgctcgatgttgtatatattgaatcttaaccttatgtgtgttattattgatttttcaatttctagatgaagttgaaagcctagctgctgccagacaggctgccatatctggatctgaaccttcagattccataagggtaaagtttttatttttccatgtaccaatttatcgtgaaatgctcatacctattccttcatcgtgcaacctgcaggttgtaaatgcattacttacacaaatggacaaactcaagtcttggccaaatgttatcattttgacaacatcaaatatcaccacagctattggtattaagttctgcctttttatacctttatgaagttagtaaatcgtccatctcctgatgatctaatttatcatttttgtgagcgaaagacacttctctagtctatagtgatatttgctctacagggagtaaatcctaactcttctctagtttgcagatattgcatttgttgatagagcagacatcaaggcatacgttggacccccaacccttcaagcacgatacgaaattttgaggtcatgcttacaggaacttttgcgagttggaattcttacacatactcaggtatttgttctgtgcttgccaacttggttgatgcctatggtgcccaccttttcattattattatccaagcaccagagttgctctggattactctgtccatggggcacttgattagagcaaacaattcttttggatcttagttgatgaatcgatcaaaacttctccacaagactttcaactttcttgtaacccctgaatgctaaataaactattgtcgcaaattgtagggtggcaattctctttgccttttgagttattttagcctgatggagaaccagcactgtcctgaggtcgcagatcctcatggttcggttcatctctctggcctactccataaagctgcagaaatatgtgaggtaaataacataactgatacatgcatcatcaacagtaatcaagacattcccatcaggctgacagcagcatttcttttctgctacagggattaagcggtcgaacattgaggaaacttcctttcctggcacatgcttctgttgctaacccttcatgctgcgatgcctctgctttcctgcacgctttgatacagactgctcaaagagagctctccgagtcgcgtggttgattgattccatgccggtcacttcgaagagcaaattgctaacagtttcaattccagagatagtttttaagggacctcaaagatagctggaagctaattcagagcctggtgctaaataccggcagacccctgcaatctttaggtttagaacagcagaagtccagaatagatctgattgttgctttgatacttttgtgttttgtagattattatatatatagtatattgtgcctcgaaggatgtcactgagttaaaccagaaacaagacttgattcgagttgctgaatgtttaaaagcatatgttatcacatcttgcgctctatgcttgtggaggtagtgtagtaaccaggacctgcttcacgtgctgcatatacaggaagcacactcaagtgactcaacatggtcatgtctcaagagcactggagctaaagcattcagaaaattgccgggtgtcgttcttaaccgggaattacagagattcaagttgaccgtgatctattcggtatacaactaattaaattcaagtatcgaaccaagagcagcaattcgatatacaactaattttcattgaccgctaaaatgtatagggaaggaatctacaagaaaaacgaactagagccatgctgttgttggcctctccaaggatcttactacagctacaccacaaaatgggtttagcaaatagtgatttgggtctgagactgaaactacgatttcacctctggcctgctctggttgggtcgtatgcgacaggataagtagctggtgcttgtcctgcattggcagctccactgcttgactgaacaactccagcaggatatccagcactactgatcgcgccatacatgcttgcaacatctgtagctacaccactgcttattggttgctgcggtgcagcatacgcactaggataaccgggcaaagcggcctgtgtgtaccctgcaactggataaccaggatagcccgcgtatgcatttgcttgcgcagcatgcatctggtaagcagtagcggcatcataagttgggtaagcatatgccccagcttgggtagatccttgctgatatgccccagcttgggtggtcccttgctgataaaccccagcttgggtggctccttggtgatatgcagagggatgaccggtaaatgcacttgaatatgggtttgaggcagctggcactgccacagcttgtgctgcccctggttgtgaagcagtcacatgtgccacccccgcctgtgctgctactgcttgagccgctgccactgattgttgcaagaatcagatggaattgaaacattagagtgctttacaaagcacaaaaggcataaaatatgtacacattgatagatagattatgtgtatgcatggaaataagccaatcataagcaataaataagcagacactacagcgagtacaaaatgggacatacataagctatatatatgttgagtggcatgaatatggacatgacaaaaccggagtaccagactaacgcgtgtgttgcatattacaaaagcaccgacatatatctatcacaattcaaaatgcatatgcaaatcacatataaaacaaaatgcatatgtaattaaatacatcagaggttcgcaagggaacataactgccgatctatgagtacaggacagtccggttcttaccatgaaccaaacactgagaagttatggtcaaacaataagggaatgaggataccttgagctcgtttttcagcatttgccacatcagcacgcaacttgtcagcctctttggtcatagtcattaaattcatctccatcgtccgcatctgctcaacttgcttgatgtttgtgtttttctcatattcaaaagcagatctatgcatggttacgggaaaacatcatattatcagaggcctgttcgccaccaaagctcaggagtgtatggaaaatgtaaaaaaggaataatatcacaaaccttagactctgatgctcttttcggagcccatctagctcagtcagtaattcaggaagtttcttactgtcaccagagaacttatgtagctctttagttactttatccatctcaacagtgagcatctgcctctcagcaataagtctctttgcctccatatgcacttgatgaagttccttcttcactgcatcaccagcttgtatatctgcttccatcaatctcattctctccatcaaatctctcatatgcatatcagtctctgtctgaacatcacctaggtgagcacggatcatttgcatttctttctcagtatcaacaatatcctgcctcaagacgacatggctagatgccaatcgctgattctctctgataagcttttctgcctcggcggtctgctcagcaagtttcttttccaagatctccagagcggtggcagcgcgatccaaaggttggcggccagaaaggctggctgcagggaaggcgccatcacgcatcaaacctgaagcttggcgtccatccagctgtccatggtatgccattatactgaaatagcaagtaacaccaaaaggagtttaaatcgggaaatcgggagcttcaaccaaaagtgaaaaatgttattaagtagtcatgctaagccatgcatgcataacgacaattaacatggcactcaacattaaataccaggcacgttgcggtctcatcataggtgatggtaatttgaaatattgtactagatactatagttacatccatgaagttgttcaaaaaacatgtggtgccaagaggttaacttacaataaaagatacaaagactccctattaatcaacaaaacaaatagaggagattacattggagttaaaatacagaaacgcaaacggctcacacgtaatgcaggttcgaaatgcaagcacaaaaataatccccaaatccacacaaggctgaactcccgcgaagctgacatcaaatctctaagctaaaacctacatcaacaatccatggccctacactgacagattaacagaggcaaacctaaggccacctccaatgcaaaatacttcaatgggtgcttaggaaaatagaaaaagctaccacaccactaagctgagaacgtcctaacttagggcatggggtgaattcagctcaaccccaattttttttccttaaacaatactgcaccacgcacgtatcaatggacagattaatcgcgaagaaactagatggcttaatcgtagtgaaaagaaaaaaaaacaatccaggtccggatagatttccccaggtcacggagtgacgcggaagaggaggggagactgggagagggggctacgagaggagaggtgatggataccttcaattcgactcaaccgagacagaggccgatggaacgagggctcgtcgcgtcgagtcccccaccccccctggttccgagcctgctcgccggcggcgggggccgtgcgcgccgaggagggctcacaagggagagagagggggtaggatgcggtcgggggaggagataagaggagcccgtccgcaccgcgggtaagtatacggcggccgttcgccggcggcgcgcgcgcgaggaggaggaggaggagaggcggcgggggagcaggtcggccttgccgccgccggaacacagaagagagagagaagggtagcggcggcgacggaggaagggaaagagatggagggagggcagagggaggaagaatgtgggacccggtaaaggcagaggaggccagatgtctcacccctcgcccctcggagtcacgactcgagtcacgaccttgctgcgttggcctactagaccatggccctagccctagggcgaaggccggaattttgacgcgaatattaaggaataaccacgattttgaatccatatcgtctaagtctaaccaccgttttatagagctagccggaatacctgagcgtttctttagtaggctggaattttggctatttatttttagtcttttatttattttaaataactatactaaatgttaggggtatacaattgtatttattttataataaaaatattagtttgaggtagtttaattattcttttgtattgaatattaaaatatgttacgtctcattaagttatcttattttggaacgagtgagtacttatttgctggagggttggctagcgtaacagagttacttcttgatccgatgaccctatttgtgttcataaaagatcagccgagagccacaacccaaccaggaaaggccatctaagtttttcataatcataccgtgtgttagtccgatcgctcagagcgtgcccagtacaagccaggacttgctcaaagactaaatgtaaagatgcaaactaaatgtacgactgcagatagcattgcaaagaatcagatgataattggaaacaacggtcttgaggtccatggagacacagccgcggctgaggaccgataatcaactctcataatcatttcagttaaaggaattaaggctgccagcatttccctttgcaacaaaaggtgttctctttaccttgttacacagcatcgtgtgaagaatactcctcgtgggttcctgaattatttgtggaacagaactaagaaacagatattgcctcacgattccttcctgggaagcgtcgtacaaattgacgatctaaactctatacgaaacaaaaataatcgggagtcgggacaaatgagctagtcccccaaaagaattaatctctcaggcgtgcaccggctggtatctaatccagattggcgattactgcatcagtgacttcctgggtggtgctggtgccgcctagatcctttgttctgtacttgccttccgcaatgacacgcttcaccgccgtctccagccggtcggcgaatgacgggaactgcaaatgcctcaacatcatggcggatgatagaagcagcgcaatagggtttgctttcttctgctctaagatgttctcgtttccgacgtttcctgcagaagcaccttgctcaaagacagcatggtcctgacccacattacctgcaacaggatggcgaatataaggattagtaaaccacgttgaattaattatggtatacaaaaatgaaccaactgggtggtccaaacatataaaatgggtggcaagtgatgactgatgacaagaagtaataacgtaattgttccaaaagaactgatgaaaggtacaaccatgcgtgatgcacagacaacaaactgtctcccagtaagaaaaatattgtcggtgacagaaaaatattgtctcccagccgattgtttagtgtgctgttgcttatacgaattaaaggaacaaggtaaaagttaagatcctacctccaggcataacacctgtccctccagcaatacctgcagccgtgttagcaaccaaattgccataaaggtttggtgtaacctacaaaacgtaccaaagagtagaaagttagaaattctgcaggaattacacggggatacttaacaggaatcatttgggaaaaccagtattcaggaaagtgtcctgcggaacagaaagaaaaagtaaacaaaaaaagggggaattcgacagttgtcgttagctaacatactttatagtacatcatatcaagctaactaaaactgcctgtagctgcatgattgcaacgcttacatactgtcagctggttagaagtgctatagattgtcaaaagattgttttctcaatccttataacaacaaaatttcatttggtttctcttcattttcacattattgagtgtttgcacttttctctcctcccataaagatgatgcaaatctaagcattcccaatttctctgatgttgttcaggacattaaatttctcataatgcttttgaaattctacatgataaataggtcaaatttatagataaggaagcggagcaaaataaatcgtacgatgacactacttttatttcctaatgcaaatgacagaaggaattttaacctggagactatatatagcaaatgtgtatcattagattcattatttatcttgcatcacaagcaaaatttcaatatcctagttgctaaagcatttacaggaatgtatgcttcccaagtacaacaaaatatgttctacaatgctaaaaccacagcatctacaataacttctgataagcttcctcattcagaactgtactttctgagaaagtattacattcattcttcggacataaaacaaacagattaataaaaacagatgtttgaattgcatcataaaatgcaaagcacacgcaaagaaactcagtgcagttcaaacaaggcagctccaaagtactgaacagacagtgatgctccagatagaatgtatgaagtaaagagcataccatgacatcaaattgctcaggctttgcaacaagttgcatacagcagttgtcgacaatgatctcattatactgaataccaggatactttgaggcaacctcacggcaagattccaagaacaaaccatcagcaagcttcatgatgtttgctttatgcactgctgtgactttctttcggttgttaaggtaagcatactcaaaagcatatttggcaatcctctcagagcaaaactttgttatcacctgacaaaagttagtcagtgagactaagatggaaaagaagctcagagaactggaaaaaaaaaagggtgcatttcattccattggcaatcatgtaacacaaaactaatcaatggttcaattgaaagaaaagaaataagcacatatctgatgagtccatgtgccccaaatcaataaatttaaccatcagtctacctattccctctattccattccctacatcccaaatccatgaagctgacctgattacacgtcatataacagtctggccaaataatcacgtcattaaattcttaaagaggccagtgtttgatgcagaataaacaaatcaggaactaaactagcacgttttacaatttaatcaacacgcaaataatgtaaattcatagattgtaccaaacgctttaccaggcaaacagcaaacaacaaaccgtgagttcgattaagctggtctgtactgataaaacgcctgctaatccacatctcaagattggacaaccaaagcagatgccaaacatcaggtcaacaagacaacaatatatattaaaacattcacaccatcccatccttaataagacaacaattctgcagattagatatatgcaacttcactagaaattgcatatataactctaaccgtggacttatcttgtattcagtataccacatattgaga

SEQ ID NO: 4353 - DNA, 25831 bp, Oryza sativa
cgccccaccagagggcgacaagggttttcctgcaaaaaaccctccctccgtcaccgcccgttcctcccccgtttgccacgtcagcttgccgccccagaggtgggcagcagggtctatttttgtaatttttttggccgatagattatttctgtaaatattaaaaaaaaatctaaaaccgaaaaaaattcttcggaccgatacggcacgacccgactgctggtgggccatgcctggacagaagtgcagcccatgggctggcacggcccatgcagagcgagccttatggccatctatactccctagtccctactcccctcttcccaattttccatacctaatacgtagcgtttggttatagctttagctccgcccgccgccgccgccgcctgcgcgaagttgagttcaaaaccgaaccacaaacagactgggattgcatttgcaataggcaggagaggagaggagtagagatctgaaggggggggggaaacggaagtgattttctcggccagatccgtgggaggaagggtatcttcgtgtactcgtctatggggatgttggcgctgaacgggctcatgtccctgcggcgcgaccgccggcggcggcggcggcatcaccggccgcaaatccgagcgcgctgtaagcctctttcctcgctgaacagctcacccgcccatctttatgttaagtttggctcggtggatgtgttcgttattgtcagctcataaaaagatagtatttctttttaatacctatctaactcgtctggattgatgtgggcctgttaccgatttttcacttgtttgacttcaaatttttcactttggtgaatacggaatagcaaagattattgattctccaccactttctccgtttgagctccttttaagttttaatttatttttttttcgcacaactaagcaacggggtatttcagatgggtgataccctgcataggttcctcaggaaaaaaaagatcaaattaattttgggagatatcaagggattgagtgcctttttctgcttttcttccgttcatgtctctgcaaccataacaatcctttttgtgtcgcagcaggtgggcttattgcctcaacgggtaaaagaaagacatcaccctgtcaacaagatgactatgatggtgattctcaagctggcaaaataatgagaaattcaatcccagaccttcctgaggtacgaggcattgaattccgatgatccagaaattttctttagcctgggcatgcttaggctgcgtttgagatgacatctatgatgagattatggtccacatgcaaaacgagacaagtgattagggtatggttaattaggtattaattatccatagattaaaaaaaaggatataacaaaacagaagagagagatagtgacctctgacaataatctatcagcatcaagagtccaataacatgttctgcttgtttgccattttttgctacctgtcttaaactagtgcacaattaaaaggctgctttggtgctcaaatagtcgtgcaggacaccatactaaactacagactgcaccatatagaagcatgacgcctggcgccgcttgttgcccaggagcgaatgccattggctagcagaggaacagcatcagagtccacagcggcaaaagactgggagcccgggcagctgcccatgctggccgggccctgaatccgccgctgcttagatttcaagcataatatcaccacgactcacccatcggactgattatcttgctgactgtgctaggctggctgtatattactccattttttttatatgaccatatggatttgcaatataaatgttgatctttacgtcctccattttttcttcacgcattctgatgtttgtgtatgcaggacatattgtttcgtatacagtcctttatgtcaatgcgtgaagctgctcgtgctgcttgcgtatctcgtgcttttctacattcctggaggtgtcatcccaatcttatctttaataaagatacgattgtcttgaagagaaatgcgtttggagagaatttccacggaaaaattgggcgcattctcaggaaccactcaggcattagcttgaaaacgttccagcttgactacagtggtatgtgtgggttcgatggcactagttatcttgacagttggcttcagattgctcttaaaccagagattgaagaactcaccctttttttgcctgaaacaaacaaacaatacagcttcccatgctcacttttatctgatggggtccgagactcacttcggtacattaaacttcgatgttgtgccctccatcccacacctgaacttggccccttgagaaacctatcaaatctgcatctgttgtatgtgagcattacatgggctgagttagagtgccttctttccaactctcttgctctggagcatttagagctcaatcattgcaaggggataatttgcctgaagataccttgcaccctgcagcagctcagcagccttaatgtcgttgaatgctcaggcttgaaagtgatagagagcaaagctccaaatctctctagtctatttgttagaggatccagggtaaacttctcccttgtagaaacattgcaaataaataagctagacatgggacatgcaatctgtgatgctcgggccaagctgccatccattatgccaaatcttgaaactcttgtcattgaatcggggcatgaggtatgtattctctaaaagatgaggtgctgtagtatggcgatatatacggattactttagtacaatgatatatacggattacattagtataatgatatatatggattacgttagtgagtgttatatatcgattacattagtgatacctgttgtgtaataaatctgatgcatgccatatttgttgtgcaggtggttgatgcaccaatgctgcctaccaaattcctctaccttaagcacctgaccattcatgtgataacaggatcgaccatttcccagccatatgactatttctctctggtttcttttattgatgcgtctccgtccttggagactttgatattaaatgtatgacattggcactgttcattcattcatttcatcctccaaagctttttgatcactctgggtctaattcaagcatatcatccttttcatggtcaggtgactcaggtacgtatggtgcatgaatcgattttcacggattcacaactgagacacatccctggacaccgccatggccacctcaagagtgtgaagatcactggtttcagctctgcgaagagcttggtggaactgacatgttatatcctcaataatgcggtgtcacttgagtgtcttacattggataccatttatggtcctaggtgtgatcaagataagtataggcggtgttttcccatgatagatggtgttctcacggatgctccaagagggcttgcagctatcagaacatacattgaggataaagttccatctacagttaatttgactgttctggaaccttgcagccggtgccatgttagaagaagagggtgaacatcatctcaatcgtgcaatgccgattccattcaattttagatgaaccaatatttgtttcctgaactatttatggctgtggcccaatgtgcaatagtttaattatcttagatggacaatggaccaagctttatctctgtattatcagacctgtttaatgtttattttttgctgtacatgtataagctgaagatttatatgtttttgtccaaaggttgaaattttcaggtgcaggatgtgttgtgatttgtttgttactagcagttacaaagttagtgttcaatctgctgtaaccagggtttgcacttttaatttcagcgaaaatttcggtagcatcggtatttacaaattttttgcactttttgaccgaaattatttgaaattttaaccatacttgaataaactttaaccaaaatcaacaaaaaaattgaggaaatccaaaattttcggttgatataagacttgctggagatgtccaaaaatttcggttgatataatgacttgctgcagacaggaatctcttctcctgggccgaaagcccgaaaccgattgcaagcaaacttgcattccacacgctcattcatttttctatcattgtatccaacacttgatagagtacataagaatgaacatgcaaaacagagaaaaggaaactttgcattccacacgctcattcatttttctatcattgtatcgaacacctagtagagtacataagaatcaacaagcaaaagagtcatcagattcaacatgcaaatgagaaacgaaaggggagtgtaacagacaacattcgcactcttaaagttttctcattagatcgcagtcttaggtactctaaagttttctcattagatcgcagtcttaggtggagtgctttgtattatgtttggtgtacatgaaacaatgaaacaactaagtggcaatgagaaactattattgcaaaatactctatcgaagatgaatggctacagaaggtcttgttatgagtgtgtgtactgaattcttggccaggattaaccaagagattttgtaatcccctataactcttggttttggtttctggtaaggctgcagcctgatcctctttgaagcaaacaggtctgccagaattaaaacatgcactgagagtcctagagacactaaaatagtcatcagatcacaattcacaaacttcaagttggcatagcaaacctgttggtatgatataccaaagggcatttggagttggagacacttttccttgatggatggcactagaaaactcagtttccatcaggggcttacaaacctaactcttgaaagggaacctgaatttcagccattaaaaataaaataaccagcatttctctgcattttaaactgtagaagaaacccatagaaatatttgccaagactaaatcatgaatcaataacaaaccattagagacaacacgacccaaacaatgacatcaaactaggagaacgaacccaataagaaaagcaaaacttaactgggctggctggggcttcctcaaagaagaaaatgcatttggaaaaatatgttcagtcctccatctgaagtagcctcaaatacacccccccccccccccctaatgtctctttcctgacactgaaacacaaagagaagcataccaactttgatcttctttatggaagctacagcgtggccaggaagcccaaaatgtttttttcactaccatacggcatacactccaggttttgattaaatctattcagcaggtactgttgcagattcctttaaaatgaaagaggagataatgggacaatgcaaagtataaccaatgcaggttttgttcatcgaacacttgcggttgctattctccagaagattaggcactagtaacaacaagcaagtcactcacatttagccttcgcatttcaaaacaaatcaaatcaacaacgatcatgaccagtatacctgaagaacaatgtcaggaccccaacacaacagtagccaaaataacaaaacaaaagcttctatggtttcaataaatacctcaaatcatacaagatcaaatatcaatcaggtacaggtactactgtactagtgcttcagtctccaaaattagatgatgcaagaacggtaaaaaaaaaaggcatacaaactgaaaagagaactacgaaaatgaaggtcaaatgtattttccattgcaaatggagaggaagaacaaagagttatcccacagtttatcagctcaaatgcagatggtttgttttggaccatatggtgaaacttgatgccccgatccgccggtagtcagaagaccaacgcagtcggtgcagaatgaaatagcccgtacgccatgagagaaatactagcacgggaggaaatccagccgacgggggaagctcgctgcagcaggatctacaggcgttggtgtcgtcgaaattcatcacataaatcggctaagctcattgccttccctttcaggtgaatttgggaaaaataaatggcacggtaaccaaggaattcgagagaaaaaaaatctgaaccctgtggatccacagtttccgctgcaagaatttccacgaacgatctgatggcaacaaaaaacgaacgacaattgaagaacacgcaacagaaatgcagcaaaattcagaaaggggatttcacgacagatggaagaaatcattcaacgacgtcacaagcaaagtaaaattctgatggacaacacttagatcgggtggacatttccatttcatggtataattgcttggattcaatttacagtgctcgaagcgatctgcatctgctactagaataagcacatggattcatgtactactgttgacgagattctaagaatgttactcatatactactaaggtttcaggatcgacagtcgcaaaagcaagagaaaacgagagtagtctactggaagaaaatgtagcaaacaaccctcaccacacgctcggcgctcgtactcttcacaaacacgccccatggtcatgcatcgtcagcttcctcgttgtcaccttgcgggctgccgaactccgggccgtcctcgccgtcgtcggatccatcatcgccaccgaactccgggtcgtcctcgccgccgtccggtccatcgtcgaggccgagctcggggatgaagaccaccatggtgttgaggtcggcgaccttgtcgcgaactctctcgacattcgcgacaagctagtcccgatcgcgcgtaccattgatcatgtggtcgacgtggtggcggaggaaattgcctgccgtgaccgcgaccgcgtggaacggcccctccggcccatcgacatggcgagcgatgtgggggagtgaccagccttactgaaggaggaggcggccggcgtcgtggtggagggcgttctcccggagcatcggcaccagaacgtcgacgatgacgacgatctcgttcgccaggcgcgcgagctgacgaagcttgtggtcacggaccagatcccacccgcgcgggagccgactggccttcgtcagcaactccagcaaggcgggcgcctggcggagctctacgtccgtgacgatgaccttgatggggtcgtcgcggctggcgtacagcatcgccgcctcgcgaagccccgagattgtgaagagaggcgccgccatgctctcctcctcctcctcttcctcttccgccgcctctctctcctccggacggataatgatttgtggcggtcacggcgacccatctcgtgtggactttatacagacgaggtgagggaggggatttcttccggaagtttcgatctgacaaagcggagatggcgcgggaatatttggccgaaaatttgaaggcgggcgcgcttgcgaaaaaacgaaaaaggaaaagggaaatgagcgcgctcgagcaacgaaaatcgaaaaatgaaaggaataagtccactctgagtcatttaaaaataggtcgaatctaatccatgacaaaaactataaaaccggatatctcgaccctcgaactatttaaactggtgtaatttaactgtcttgtggttttggaagacagttttgttgatttggcactgacgtggcaaggttgaggggttgatgtggcgcttagttggtatttgaattaaaaacgtatacgtggaacccgtttgtcattcacacataaaaaattcagtaccactgagttcgacacacttcaacaatatgccactgactttgtcgatatccataatatactatcgccttttacttaacctctacgatttaccatcaccgtctatagcctgttagtttgcattggagaaaagacaagtgtgcccttactgaagattggcagcactgagaccatgtcgtgcaaggtaccgagagttataataactgtttatttatgcaatatgattataaataattacgagcacatattttaagtattttaattatgagcaaatatctccaaggctacaggagggggcggagttttgttttgccgaggactgttgaggagcggttgaggattgcactaatcacagatgcagctctccagcagggccagggccaccgtgtccccttgcatgcgatggcagcgctgacgacggcggtggcacccgccaccagcaacagctctccaacaggggcgtcgtgtccctttgtttgcaacggcagcaccagcagcagccctccaataggggcgccgtctcccatcagatgtgaccacggcgttgacgacagtggtcggaccgccgctgtggatggcacgcggttgggccagcgctacggatggtgatgctggtgacgaaggtcgtgccggcgctggggacgaaggtcgtacgtgctggcgctagggatggcggtgctggggacagcgagcgggccgacgctagagatggcaacgctggcgaggacatgtgagcggcggtgggcagagatgcggcgtggcgccatgacggcactgggaagggtggcaatccggcgttgggagatgcgatgctaggaagaaaggggccctgggccatgcgaattagatgattcaaagggtatttcggtcattactaaaaaaattaacagtgcaaacagcatgtagcttgacggcgatggtaaatcgtaaaggttaaggaaaaggcgatggcatattatggatatcgacaaagtcagtggcatattgttgaagtgtgtcgaactcagtggtactgagcagattctctcaaaaaattatggggcttactaacatgtggcaccacatgtcattctctctctttcttcttcctcccctcttcctcccttccctctttctctccccttttctccctttcgaccggtcgccgccgcacgggctggagcgatgacgggcgggggccagagcggcggcggccggcgggagctgagatcagcaatggaaacgatggcgtgggcggcaccggggagcatggggaaggtgaggacgctgaggaggaaccagttgaggctgagcggcgcgacggcgtcggaggaggaggaggaggccggcctaccgccctggagcgcggcggcggactcgcggaggaagaagcgcgcgacgctacacatggacatatccactgtggcgaacatctccgccagcaacggcaagcacaacgcgtccgccgcccacaccaccgcccccactgccgtcgccatgcccaggctgaccatgctccaccgccttgccccgacgcatatgcacggacgtctcgaaatcctcctccttcgtggtcacctccgtcgtgccgccgccaccgccctcctcctcctgagcggcggcagcttcgtctgcttcgtctctcagtccttcctcttcctcatgttcgatgggcgcgtggacgccgccgagcgccgtcgccggcggcttcttgtcccacatggacttgcccctgtgctccagcccgtgcggcggtggctggtcgaaggggagagaatgggtgagaaagataggagggtggaagaggggaggaagaagaagagaaagaggatgatatgtggggcacatatgtcagtgggccctataattttttatgtgtgtgaatgacaaacgggtcccacatatacgtttttaatttaaataccaactaaacaccacgtcaatcccacaaagtaggtcaaccctgccacatcagcaaaattgccatctaaaaccatcaagggagtcaaattgcaccgatttcaatagttcgggagtcgagatatccggttttgcggtttaaggtcatggattagattcgggttagtaagtcaaagtggacttattccaaaaaaaaaaaaagaaagaaagaaggtaaagggcgtgctcgagcagaccatgccgggctggccagcccgttgctggtgcggcccaaaaacagcacggcctactgcagtactgctaaccggattgtgtcttgtctcggtcgtctacaaagtgaataagtctacttcacattcttcatctcgtacctgatcgaatcgactggcttaccacaaaaccgtataacacatccttctctttccccgcccattcattctctcaccatctctctcatccggatgggtaatgatcttgagagtgacatgctaaagaagattaattaagaagataccattgaagattttatttcgaaatacactataataatgttttagtgcgatgctttccaggtgaagattagaaaaatattcttcttccgttctattttatgttgctatgagtataaaaatataccatgagtaaaaaatacaattgttttattttatgatttactttctccatccatcctaaaataagttcacctaatatatgatgtgacattccctaaatctacaagtttaaacagataaatttttcagattcataatactataatatgttacattctatactagatacatttatatattaggacgaatggagtaagtttcatacttgtttttttcatatgacctccaaaattcacgggatgtcgcttctcctatctaccactccctccatcctaaaatactctctctgtcccagaatataagaacctagaatcgaatgagacatttcctatactataaacctaagatcggatgtgtatatgtcactttaaaatcttatatattataggacggatggagtaggaactatagcctttttcgtgtgtgcggtactcgtggtttagaaaaccatacggttaccatggttatcacgtgcggtacccttctcatttttaaaactatagtatatctcgtgataatcacacggtttttataataaccaggtaaccttttgggttttggggaaccctggcggtagtgcgtgtgcctcgcacgatggaaatgaaagaaagggagagagatggaaaactacgcatttcatggcttcattagaattacacactcacacaggctttgcaagtcaagtttaactgcaacgtcaacttccgagacccatcggccatcgctcggtagaagcctaatcatttcttcatctctcattttctcacatcagctactcaaagcataaaacagcgtgcgagacccaagcactatccgggtgatatcagtagctggctactactagctgctgtatgcatatgccaccgtcgctgtcagctggttcaattctgaacacatttgttgccgcttttctgcttgactttcaggacttcgattggtgcagaactaaagaagaatctgacttgcatcgcaatatcgcacggtatgacgctacttctgatctctgaaaaagaaaaggaagaggagttcgttttgccaatgtcaaatactccctccatcctataatataagagattttgattttttttttcaacgcttgattactcgtcttattcaaattttttgaaattattatttattttatttgtgacttactttattatacacagtactttaagcacaactttttgtttttatatttgaaagaaaaattaaataagacgagtggtcacatatttaagataaaaactcaaaatcctttgtattatgggactgaggtagtaaaagatatattaagctagtattaacccctttacggctttgctttacctaccggtaaccgactacgtcctggtaggcttcacatccttgtcaccgtctttttgtcctgattagtcccacgcattttgtggaaaaagctggtggtacgatcgactcagatatcagaatgctcatgagaggcttcaacgacgtagtattaaaatcagtgataagctatgtgataaactgataatgtgattaactgcacggactgtgtagcaaatttaacgcagctttttataagatctgacaaattaagagtcattttacggtacctcccacttaaggtggtagtagtgtagtaggaataaatctcaccgttgattttgttggtcattctaataatttgtttaagtgaggtggaagggtaatcttgtaattgtgctcccgtgatagatcaaacgggccaggtttgcagacccaattttatttcatcgtgagttgacgaagcagaagagaacaggagggacagccgccgccaaaatcttgcgctcctagccgccgtccgccttcaatctctcctcgtcgcgcaagcatggtcaccgcggaaccatgcataactgtaatcaatcccaaattcatgctttactgtaattaaacccacaacatgcatgcgtgaatgtttagttgtttttaatcaatttagttatcccgattggcaattgcatgtatcaatgtaattaatccagatgcatgtgatctgttgtacgctagtttttcgtttatttgatcacgtcggtcatgccggttaccgagcagattcccctcccgtcagtggccggccgtcacgatctcgcggacgccgtgtccatgaggaggaggtggcccttcagggagaagcgaacgcggccggaggaagacggccgcagcggcgaagccgccctgctgaaaagcttttatccctttattactctgttcgtcggacggatctacggaatagcgatgaactacgaaacccttcaacaactacgtatttacatcagtgccatgttttttttttctaaaatacccttctactacactactactcaatctaataggtgcaatctaataggtgcagtagaaacaaatatgatctgttggatcttatacaataaacggctcgcattcactcagaggtactctaaaaaaatccattaagatgccctggatgcaggaacctctctgcaaattgctggtggagcagacaaatgaattggacgggaaagggaacaggtgagaggatgaaaatgaaagatagagagagagaaggaaaaccacgggattattctggtggtatttcacccggattttttttagatgatggtatttcacccggatagaaagaagatattctcctggtagtggattcgtgcccctcttttctaaatctgctgcaagacagagttcttagtttggcgagcacggttgacaaagttattcagaaattatactattctgcttgtgattcgccaactgggcattcatctatgcagatattgaactgataatctatactatgcacagagataacgtcaaaattatgaaacccaaacgagcattttttccatcccaagctgcaagttcctccatccatcttatattataatacactttattttttcaaacttttaagtttaatcaaatttatagaaaaatttagcaacatccacaataccaaattagtttatattgaacatatttcaatgatatatgcttattttgtgttaaaaactttactacatgtttttataaatttgattaaacctaaaattatttaactagaaaaaaatcaaagcaacttatagtatagtaaaatggagggagtagtataatatggtttaaatcttagtgctcatgcgtagatagacttttaatatgatcttagtgagaatggggatgggccattggtttccatttgttagggtcttagcttagggaacatattaatgggatgtgagtgtgttgctgcagctaatgaatggtaatgcacaagaacatattccgtgtaataaaaaaactaaaagcgaagtgagcgtagtttaatttgttaggtcagctcgcttggtttaaattctgaattagatacacgtgctcgcatttacgactaattcagctcaatggcggagccaagaatttttttaagcccggacaagtctaatgaatggtaatgcacaagaatctttcacatatgtaagattgtgcaaataatatttttcactaaagtatcatcatggttccttgtatcaactaaacgccgtgacattaagtttgagctagagctagatatagataaacacagaggatcctaatccagtacaaatctgattgattaatcaaatatagatcacaataaagtaatgactaatagaaaaacaattcttattagcacttcagtgctcctgctgatcggccaaacgctgtgcttgctactgctcttgctgccaaaaaaaagtgcagattttcatgcagcttcgccagcaaaacagagcaaccgatgtactgatgcagaccgaggagcccgagcagctgcccagcctggccgggccctaaatccgcccctgattcagctgatgtccgtgctgaattcgtaaattttaagatgtaccgaacccgtaattttagatgagctcatagaaataagatatgtgtatgtttttaccggggttagtgcgtgcattgtgagcgccacatttgtcccgtgtttttataaaaaaaaaatacgcaatagcttcacgccaaggttctctggttgtgatcgatcggagcatcagacagccaggtcggcgcgccagctgccgccgcgagagcagcccgcgcgcgacacgagaggccgcgcgcgccgccacaagtcgctcgccaaagctgcgcgtgcagcacagcagccagccaagccaagccagccagcacgcaacgcaacgcaacggcgcgcgcgcgggcgcgcggcgatcccacccagtcacccacagctcacgccgccgcgggcccaccccccggcccgcacaccattttgccgttccgcccctggaacccgcgcgatttagcgcgcgcccctcgcatttcttttcccacccaacccacccacacggccacaccactccaccaccagaagcgcaagcgactcctctctctctcacctccgctcgcctccgcgcctccgagcaccaaaccctagatctcgcggcggcggcggcgaccggggatggcgaagccctggggaggcgtcggcgcgtgggcgctggacgcggagcgcgccgaggaggaggagcgggagcaggcggcggcgttcccggcgcccgagccgcccgcggccgccggtggcgccgccagcttcccgagcctccgcgaggccgccgcggcggcgggcgggggcaagcagaagaagaagaacaagggcaccaccctgtcgctgtccgagttcagcgggtacggcgcgcaggggcagcgtcggggcggcggtggcgccgcccccgtggatccgagggggctcacccccgaggagatgatgatgctgcccaccggccccagggagcgctccgccgaggagctcgaccgctcccgagggttccgctcctacggcggagggtttggcgccggcggcggggaccgccgcggcgggttcgacgacgaccgccgcgggcccggtaggtcctcggatctcgacatgccctcccgcgccgacgaggcggacaactgggggacgaataagaggttcacgccggctctcggcgactctggccgccgtgataggttcggcggcccctccccagccggccgctccgatgacatcgatgactggtcgcgcgacaagaagccgatgccatcgcgctacccaagcctcggttctggtggtggtggtggtggcggcttccgtgaatcacctggtttccgcgactcaccaggcccctccgactctgaccgttggtctcgtggtggtagctttgcgccgatgccgcacaacggcgagcgtgagaggccgcggctcaaccttgatccaccgaagcgggatcccttggctactgctacgccaccagctgaggtggcacgcaaccggccaagcccatttggggctgcaaggccccgggaggaggtgctggctgagaaagggttggattggaggaagatggagaccgagattgaacagaaaactagccgccctaccagctcacagtccagccggccgaatagcgcacattcctcccgccctgggagccctggatcacaggtctcagcagttgggagtgaaggggcaccgaggtcacggccaaaggtaaatccgtttggtaatgccaagccacgggaagtggtgctgcaagagaaagggaaagactggaggaagatagaccttgagctggaacatcgtgccgttaataggtatgtatatgaagtcacctcttgattgcacttggcatttctcatgaatctcatgatactgcaaacatgcaatgcaagtgtactgatatagcttagcgaaggtgtatttcttgtggtaatggaaacatgcaatactggaggactgatataggttagtaaaaggagtgcttcttgtgataatgtaaaacatgcgtattgcaatactggagtattggtataggttagtaaaggtgcaggcgtgcagccttgcataaagaattgtgcaagttctgcttagttcttttctaatatataaaaaacctagcaatttacgtagcatgtcctaacaataattgccctgctgtttttgttatgtaatattttggaagaattgcttttgtgataacttcataattgaaatccaaaaaatgagcaactagaagtgaaggtttacctttatagtatacttcagtgaattaagcatttaatgttaatgtcgaaccatttattgttatgaagttatctgcattaatcctttgaacggtgcagtggagtcaacaatcaacatttacagcaattgttcagttaaattcaatcttctcttgtgggtgctgaatgtagtgatgcatatgcagttatatgttgtcacttccattcaaacttgattgttcaccgttacgcttagttttgtgggaagtgaaattaactggggtcgctagcaaaatgtagcatgctattgtgttgataaagacataatttgcttttataagtcatcactcatggatggcaaggacatggatacttggattggttccttctgaaattctgttcttttagccagtgcaggtttgttttctattaattcaatatatctgtacctcatttttcaggccagagacgaatgaagaaaggatcttgaaagaagaaataaacctcctcaaggagaaactgaaagaaagtgaggccaataaaactgatggtccggaccaagcttcccctgaggatccagaggatttgtcggagaagataactcagatggaaaagcagcttgagttgcttactattgagttggatgacaaggttcgatttgggcaaagacctggttctggagctggcagggtttcagcagttccaccagctattgcagaggaaccacagattgtggtatccatcgtggataggccacgctctcgtggtggtatggagccatttccgaaaccagctgaggaaagatggggattccaaggtagcagagagaggggctcttttggtggaagcagaagttcagacaggttcgtgcaattcttgctcaatttctttccaggttaatgtttcctattgacagttgcatgtaatttgctggttagctgaaatgcctccttaatccttctatatagtttaattctttttgtaaatgtatgatgcatcacactttcatattgacgttaatttttcatgcctgccttgttgtgtttgtcatgtttagttgaatacggaaccttttatatagttattcttcttgtatggtgatataccatgttttgattataagccaagtagcacttcaactttggacaggtttgagattgaacgtatagtatactgttcgattgaagatgagagttggaatgggatatttgtctaggtaggacactagagattcatagagaggatacaaagctcagaattggggtttcttttttatttgaagataattgtctgcaactttgtataaccttttctttgtattttttttcctctgctttgtatttatctgtaattattctctatttatattatttaataaagtacatgaggagcctctcctgctgtttcttgtaaaaaaaaaaagaaaaggaaccatgatcaccaacagcttaaactttgtgaaccagtggtgaagtgttcttgtatgatggttgcttttttaatgggtagaaataggagcgtagaacctttatatctatcttgttcatcttatttgctttagttcttgatgtgatacaatctggtctatttaaaaatatgatggaagtcaaatcagtttctaaccaattgatgttgatattatcggttcatgtgcagctcttaatcggttttgttttgtttctgttcaggccaatgacaaggcagaggtggtgagatacggcgtttgagcatttgttaaggaaactctgggtcctcgttttttgtttcgaaagaatggggaagaataagtcattttcttctgtgttttgactcccattttgtctgatctagaaagattggagagaagcttgtcaatggaggttactctgcgtgaagctatttattatcgcctcttaagttgtagggtattttggttccctttttgtcatctcccatgccaaaacaagacctggcaaactttgatactaactattgttcctgatcggttcatgtcgcatgtggtctcttaagcattcatggatggagaccttttgtatggatattttgatattttgtacagttgcatgtgttagccatctgttctgttatttgttgctcctactattttgccaatgcttcttaacttctctttactgtgcccgttgtactggtgccttgcaatgacatgcctgaagttctctctcacaccagttccattgcaatagaatgtaggataatccctgcgcgcttgttacttatactctttttttttttacggagggacggtaggtgtttagtacctggaaatatgcaagtgattctcttcgctgttagttgcgtcttgccagcttgtggattactgctgtctttggtcttggtgatttctgccgtactgccgttgcgcgctctgttactggcttagttggtcatatggtttctgttttttatgtcaatcgctacttccaaatcagctgcagcctcacctgtgctattggagaagcaattcgccggagcggggggagtgagggacccagcgctgtggtgaatcaggatcatttacattagaggttctaatgttctcccttcggctaaaaaaaactcaatcttcaggtttaaatctagacacacaccgattgagtgtttttttacgaagggagtagagaataaatagcagagtgtattaggtgagttgtatccacccaatcaagtatgtaaggctcagatgttgcgctacaatattttagaaacatttttattgtgtgttttgcttgtatcacgtgacctgaacaccgaactggaatggtgattactaggagacaaccggccttgttgtggctaccacttcgatctccagttccattttcagcggctagcgttacaccaaactcgtgcagaaagcgtctagccgccagggcacctaaatcgcggctcaactcgaggaggcgcgactacggcgacttgttcgcataaaacggcctcggagactaacgatagggcagtttctggtaagttatgagaaggatgcagtgaatgggctgatttgaggctcgccggaaaggcaacctccgagaaggggaagaaggttggtgatcgttatagtaacattttgaatgtacctttatctcaattcagccgtgtatccgtcatccaatggctactaaaagcgatggaatgccattttgcaatttatcatataattttgagttgctgtcattcatagagaacttagtattagccagtttacgtacggcgttgaccgaaagtaatcggtttttaccggttttccacggtttttggtaaccgatgaggagggtttttatttcaaaaaccaaaaacgtcagcacatcgctgggtgtcctgtgtttctttcatgcaagggtcttctcactcttctgcgcctctttgtggtttggagtacacttgtacttatgctgttgaattttgtgccataataaaagagagaaactgagttgaattttgtgccatcataaagagagaaaccgagtcaggaagtggaggatcatatgagcaggttatttgcattgcacttgcgcctgagtttttcaaagatccatctattattccgttggttttgtaggttgaacatacggaggtgtgtgtgctgggcgctgtagacacactccgtgctgtcgtacacagtcacacattacaattgtacagactactaacacaagcaaaccacaatcacttgttcttcttcttgttctcgaggacgaggaagacggcgagcgcggcgacggagaacgcggagagcacgccggcggcgacctcgatggacgcggtgacgccggtgatgcccgcgacggcgaagctggccgagggcgccgtctcgccataggccacccgcgcccccgacgcgtcgagcgcgtaggcgcgcacgtagtacgacgccgtcgggacgtcgcgtgccaccgtgtactcgaacttgccggcgccgtcgtacggctgctgggcgatcttgaactgacacgccttgtccttgctcaggtcgtcgtgggccttgcgccacccgcggcccacctggctcgccggcgcgtagcacagggtcaccttcaccgccttgtagccggcatccgccccggccgccgccgccgccgccgtcgcgttcagcgaccatgtcacggtgatggcgtcctcgccggcgtgcaggactggtcatcaatttgacagcgtgacaacgttacattgacatgcaacatgttgccaacttggagtcactattccacttgagattgtaagaactagacgaattagaaatttgtgagccaaaacgcttttgcaaagtcaataatatcaggctctagagccaaccaagtgaagaaaaccacggatttattcaagtatttgtcctgaactatatttcgcgtgcagattatgctaggatcgtccccattgaaagatcaaatcaaggtgcaaagtcacaatcctcttgatcagttttcaccaaatcaaagtacaccaaacacaaaacagcacagcaagggagaataatatatatgcatatggatgcacgcaccttggccggcacggggcgacgcctcgacgacgagcgccttcgcgagcgcggagaggcgcgcccccgccgccgccgccgccggcgtgacatggcaagcaccgagaactacaaggagcagcaacagcggtagaaacacgcggtgaattaccgccccaaaccgagccatgatcgttctctgctagaggtggaggccatttgagcggagcggtagcttatatataggcgtggtagcgtcgagtaagttgactcgtggagagggagggagatcgggggagttcaactttgtggggtcgaggagggtagcgatgggtggttccgaaagtcggagcttgatggttcacgcgggtctgactgtcggagcacgtacgtttggctgtctcgtcggctcgatggggcacctcggtcgaccttttgagggccatggcgatgtgaagcggcgaatgcaggctaatgcagctgtgtggtatctgtagtacactgcacagtagtagtagtagactagtagcagtaccacgttaacggtagtagtcagacagtctgttggtggtggtcagaacacggtacactgtttgccggagaaaaatcacgagccctccaatccaagaaataccattaacgaacacagcttcctaaaaatattattgtacaagcgcttttattctaaaaatatcatcgtcgttagattttcgtttgtagccattcgttgagtgctataaaaaaccattttacccctacaaattattaaatgattaaaacttttactctttcagtcaattttcaatattttagtgtaaagagcaaactaattgagtgtaaactaacgaaaagagcaaaatttttaatcaacctttaataatttatagggtaaaatgatctttttatagcacttaacagatggatgcaaccgaaaacttaacaacgatggtaactctagaacaaaagcacttgtacgatgacatttctaaagagattagatttatcgatgatattttttgaattggggagagtctacacatctgtcgacagatttttcatcataaatttgtcaaaatttgtacctttggattaaacccataaacgatagatggatgacacgtgtacagcactgctgaggtcccgcatctactaatcgatagtatggatgggcttccgacgttaattcacactctcgtttcttaatcaaaattagttggttatttatccatattaattattaatccttgagagctcatctgctcatgtatagtgtgatatctactagatattttttagtgcatacaaagatattaccaatccatctactaaagttacattgttgttacactataattacaccatagttacaaatgtaattatggtatagttacactgtaattttaattacattgttgttacactataattacaccatagttacatatgtaattatggtataattgcactgtaattttaattacattgttgttacattataattacaccatagttacatatgtaattatagtataattgcactgtaattttaattatattattgttacactataattgcaccatatttacatacatgtaactatagtataattacattgtaattttagttttctaacactgtaacttcaatataaactttattttgtcttgaaccaacttggcttaattgctctgtggtgtacgtttaacagggaaaactagtgctcttggaatcgatcccccgctacgcacagacttgtctcttttatccatcgtattagttagcacaaatctccacgcaaatcatatggcccaaaaatcgacaaatctttaaacgaaaatctgtcgacagatggatagcgaattcgtttgaattgggatatttatcgatgacattttatgaattttctctttttactatggcagttcgcctgttggcaatgcaattttgcccaagtagcccataaaacctccggaccaacacaagcacaagcaacaacagaagaaaaagcccaaaaacaggtaaggcccaaaccgcgagacaggaagccgcaccaaaaacccacacggccccccacgagagatccatcatccaccgtaatcctcctcgacgtcctcacacgcctcacctcacctcacctcaccgccgtctccttcctcgtctcgtctcgtggcgtcgcccaaaaatcccgagtccaaagccacgcacgcagctcaaaaccccaccgccaccacaccctctgatccgacggcccagatcgctccccccctaattcccgccttgccccctcctccccatgtcgccgccggtggccggcgccgcctcctccggcgacgggccgccggggcgcccgccgcgcgagctctacaccatccctgcctcctcgggtaagcctccgcccccccaccccgaatcgaggtttcctcctcctcctcttgctccccctcgctctcctagggttaggagaggggaggattgggaggaggaggaggaggaggttgcggcacgagaaataattccgtgtgtgcgtgtgtgtgtgcgcgctctcgcaggttggttccagtgggatgagatccacgagacggagcggcgggcgctgccggagttcttcggcggcgccggggggagcgggttcgggacggcgtcgcggaacccgcggatctacagggagtaccgcgactacatcatcagcaggtaccgcgaggacacctcccgccgcctcaccttcaccgaggtccgcaaggcgctcgtcggcgacgtcacgctcctccggaagctcttcgccttcctcgactcctcgggcctcatcaacttctccgcctccccctcccgccccgaggcgcagcagcagcagcggcagacggaggcggaggccgtcgtggaggcgcccgtggggctgcaggtgacgccacggccgccgccgtcgtacttcgcggaggagaagggaggagggggcaacgagaacggattccgtttgccgccgctgacctcgtatagtgatgtatttggagagtgggcgcctgggatggcgcctatatgtgggctctgtggcatggagtgcagagacgggaatgcccaaatattgaaggtactatcgagttataaagttcctttttgcattagctgggataaatgtgggatatcaaggaggaatgcggtatcaattattaagaaaatggaggtgatgagtggctacgtcatcgaacgcaggctggcgcaaagctcttggcagctatctggcaactgagctgtgcgccattctctctccgtttgcattaggttgtcttctttagcaaattttgggttagtaatcatgtcttgctagatttaggatgctaatggttacagcgctactgtgtggcaatcaaatgattggtttgaactttgtatcatgcatgcaaaaaatgtccaaaggtttaaattctaggctttaggaatgcaagtatttaacattttacaacctacagttttgaataaattacttgtcgtcttgtggagaaatagattcgtgaatatgttatgaaataacagttcttacaaaatattaaaggatatttggctctgaaataggtaaagcgtttagattatagattggatcgccatgtatgtgtctagcatgatgtccttctgcactaatggttttcatggaatacatactccgagatgccattattattattttttattatagtatttcttgcagcatcattactctatttatggcattctgtgagatgtatctattattgttttattataggatttcttgcagcatcgctactttatttatggcatcctgtttatgttgtcgtactccttgacatgatttttgttgcttatgcttcatagcacaccaagcttcgacgggaataatctgagaaaagtacatgttatatgtttgttaacatttggtatgcttgcttttcaggatggttttaaagtatgctcaaaatgttatgccaataatgataataagggtgaagcaaatatacatccaggtgacaaaaaggagcggatcgacaatcattcttctagtgcatggacagatgcagaaactctccttctcttggaaggtgtactaaaacatggagatgactgggatctcatcgcccagcatgtccgcacaaagaataaatcagaatgcattgcaaggctaattcagttgccttttggtgaacatatgctgggcacagtaaatggtaaattggataacagactccataaaatccaaacaaccgatggaaaagtgaacaagtccactgtgaaggagtcttcaagtcaaccaactgaaacagttgatgacatgcagattgatggaaatgaagatggcgctgataaatctgttgaagaacatcctacaaaacatagacggttgttttcttcaatagatatcactgtctcattaatggagcaggtaataaataaataacaaacagataacaaaaaactcgtgtgtgaggacacatagattttaaatggaacgaactgatgattgctattggtacctcagttagcgcatcttaccacatcgacaagcccagatgttgttgctgcagctgctgatgccgcaattaaagcactgggtaatgaaaacccccaagcaaggagagcttttcaactcagtgagaaagagtaccaaaccagggcattctcttctaaccatgcccggcagaggtaaagatatggtatatattgttcttatttgccagtatcagtgcagtttgtttgtattaactgttagggattattgcagtgatgatgttggtggtggtgatcgggatgtagaaatgcacgggcacccaggtaggccaaatatttggatcattggatggctaactattacagaattctttctatatctgttggtgcagttgatccaaccggatctgttattatgttgtctagacttgatctgaatcaccacgaccaactattaagaattacaatcagcgtgaaatttgtcatctcttgttattaacgatgagtagatgacaaatctgaacataaattattactaccagttcggaatcttggttttgagcctcctggcttgagttaatgttattatctactccctccgtttcatattataagactttctagcatt

SEQ ID NO: 4354 - DNA, 104618 bp, Oryza sativa
agcagcagcagcaagagcccgcccccggcgccggcgctggcgcggacttctccgcgctcccgccggagctcgtgcacagggcgctggcggccgcgggggcgtcggacgtcgcggcggcaagccgggcgtgccgcgcgtggcgggacgcgctgcggccgctccgggaggccgcggcgctgcacgcgcgggggcgacgcgtcaagcacgcggcaggcgcggccgcggccgcgggcgccgaggggcggaaggcggagaggcagcgcgcgctggggctgttccagcgcgcggcgaggctggggtccgcggcggcgatggtggacgccgggctgatgtgctgggaggaagggcggcgtgacgaggcggtggggtgctaccagaaggcggcggagctagggcaccccgtcgggatgtgcaatctcggcgtctcctacctagaaggtacccccggattttggcctacgggatcaatagctttcttggatactcgatcgagactgtagccgaaagctttgacgaatcttaggacgaattgggtttgctcacagcatgattagaaccattcgtgtttagggcaaagttttgaccttgctctgtcgctggcgtttgtctttttgtgattcttttagtaacctttaactcaagtctgattctaaactagcaggggagaaacctactgggttgttgttgttgctgcaatcatattcttcatctcaacgaattgcaactgattgttgctgccaaatcattttttagctgatccacccaaggctgaggaagctgttagatggttttatccagctgcggctgctggcaatgctcgtgctcaatacaacctgggcctttgcttgcagaatgggaaaggaatcaagcgtaaccagcgggaagctgtaagatgcctcctcttgttacatttacatctgcatatcgcaaattttccccgaaacagaaatacgcagttactatagatgtatccaattgttgaaccagcatcatttattctttgttgtggtatcttgtttctactcctacaagctatggactgtatgaactaaattatagtcaggcaatttagagctgtacgatttagggataatttaccaatttatcagctccgttgtggttttttagcgagttttattttgatctcacattccattgtttacaatgtgatctatcaaaactgagataaccagagtttttgacagaaaggagctttttgatctggttgggtttccctaccgatgtactcataattgcaccatcatgatcagtctgaatttgctaaattggcggtctcaagattaccaccactgtagcgcacaaagttgactgtgtgctttattgccttgaatctgcttgtttaaaataaggaactttgcaaatgcaggcaaaatggtacctgcgagctgcagagggaggaaatgtgcgagccatgtacaacatttccttgtgctacaactatggtgaaggattttcacaggatcaagtgcgttcaaagaggtggctgcaattagctgctgattgcggtcacaagaaagctctttatgaatgtggtattaaactttgtgcggtatgtcattccatttcacctaatgaatgaatcatctaactgtgtggaaacaacgtattaattatatattccttttctgttagccaccatgcagttcttccaattgcacattttagtgcataagtttaggccatgtaataaggtaagatatgtaaatacttgtcataacggtttggttaagggcgtttcaagaaacagaatacggtgtgtgtgctattttaaattttaaaaagccaatatctttaataacagaattagtttgaaattgccaaaaacttgtatgtttgtactgaagtagtatcagctgtataacttatgtcatcgtcgttcgtactattcctactgcttcatcaatgttggcgtgttatgcatttacttatgccttttttttatgatgattcttctcttatttaggcaggagacaaggtgaggtctcttatgtatctagagttggcgacgcgccgtggagaagctgctgcctcacatatgagggatgtaatacttgaatcactttcccttgtgaatgcgcaacgtgccctgtcagatgcggataaatggagaccaagagcactgtataccagaagatgagcaaatgggcccatcacacgtataccaagttaataaccccttgatgccaaaagtaaaatggaaattcaccacctgaaggcccaagtgagcaatatgcatctgtggcatactctagtgtatgtggaactgtgtatatgttaactttcaagcccctctctccttttcttttgtacagaaattatgacagcagaaatactgttacagaaggtcaagtggcaataatatccctgatgcagcataggatagaactttatagttgaattgtttcagattgtaataaataggaacaactggtgtttttttttcgctgaaaaagtgtggatgtaggtccaatgcagtgaaaagtaattctgtgatcagctgttctaaattgatggttggtggaatttgcctttgtgaaatttgaagggttaagggaatctctgtgcgactgtggcccatacattgttgacggcaatgtactagtgaacaaattctaggtgattttatcgtgctatatagtcatctccagatggatgttggttatgatcgcatcaaattcatcctttggtttctattttgaacatcagtcttccctacggtgcatcagttccaatttagctcaaccgttttatgcacatggctgcttttgatctgcagatgttattgatgtcacaataattgtactactaaacggtaccgtatgtctagttgagtctgcagttcccatcgcaatcgctgtatacatcagcaaccccacagaatctgcaaactgcatctagtttcttcacagagaaaatgataagcacatgacaaggctgtctaacacgcgcttttattaatacaggcattaacgtcagccatcccaaatttcaccagacgtggctcaagttcacaaatcaaatggcgcaacaggacacatttcacaaatcaaacagcgcagcaggaaagtcataacagtacagaacacaggaataacaccatgggagtagcttttatttggggcaatatagtgacgagaagcatacgtagcagtgacatgccacagttgcatttcttcgaaacgaagagcagcggaaagctcttcagagcttcgagatgaggccgttctggatggctttgggcgactcggcttccttgatgtcagcgtcggaggagccgggaggcacgtcgaccgccggcgagcagttgaagaacccatgtggctgaaaagaattaaacaagacacaaacaggctttgagctgatactgtaaaaaccagaacggtggaaactagagaagtcgtctgccaaagaggagatatgaaaggctacaagagaaggtctttgttctaaaaaaaaaaaaaggtctttaccatgagcatgaagccgatgcgttccactggcatgacaggccagtcctccagccttgggatatgggtgagcccaaacacatacctgcagatgcagtgtatagttaacaacaatattcccagtcgtgaaccgaagaaagttacacagatgcatcgtagtagcaagtataccagagaacaatgtcagtttcctccaggggcctatccttcttgacccaggtagctaagccctcgtggatacgtggattctgattggggaactcccctccagggaacacctcgtcgctcttgtactgcgtgacccagagattgtgcttcaggaaacccgctctcctcagaaactttgcctcgggtagagccagcggcaaacagtttgaaccaggcacgagcctgtagccggttggctgcccagtacgattaacagcccttgtgttccttacctgatcagatgtcaacaatgttaggtaggaaagaaagatcggtatgtatgatcagctgccacaacacaaaataatgttctttactctgagagttagagttgtggcctaagctatctgttattaggtcaagagtaatgcagctaataagtgcaaaataatagcactgctataaagcagcaagtcaatgcgtcatttctgaagaaagaaaacaatgaccaggtactggaaacgttatcatggtacatcaacaccggcacaatataaaagggatgatactgaaagatgatgctcttacgatccaatgccgtgcagatgaagggtcacaatctcgcattgcttgcagctcagatttcagtagtttttcctcggcatagaaagcgttgttgtgcacattatgtgtgcctgcattttcaactttcacatttacctcaaccacctgtgatagaaagcaacatatcagactatcaatacatgccaagttcaagcaaaaggccctactactactagaactaaacttcacccactgtagacaagttacttgtacaaacagcaggtctaaatcaaagtaacattatgataggccttattgtggaactaggtggaaaacttctattcagtatatccagcaaaactttaattgaaatgcataaaaagcaacccacctgattatgagcctcgttaggtttacaatcaacagccatgtccatacgggcaacaaaaaagtgttggtgaacaggtgcatacagaccaggagcaatggttgtaccatattttcttgattccccaggcatcagagctcccaaactaagaattccagtaagttttacttctgcttctatcttgccatcctatatccaacagaatgaacaaataaattatattgcaaaaatatgtggtagcagaaaattaaagcatcaaaaaattcattaaggaactaaattcagatatgtattcactatctcatgatgtttgcaacagccaaatcggaaataattcatgcataaccgtaccaaaagctacagaaggaatatcagcctttataggttacagcttaatcgctgagggcattataaggaatagtcagttgaaacaattacctgataaaagtgccagtaaaaaccatattcatagttggcaactgtgcagataaatgaaacagtaagcctccttgacctcctaacttctgctaaaccagttctccaatcctggtgtttccaaaggattccgtggtcttcctcatgcaaacatacacaattctcaattgtttccacaccacccgtaaaattcgtgaagtgtgcatcaaaatactttatgaaacctaaacagtcacatccctacaaaaaaaaaggcatataatagtcagatgaaagttaaaactctctggaggtaaaaaatcattaagaactgagcaagcaccctcttaagagaatgagcattcttcccaagtccatcttctccagcatcaaaagcattcttgcgataatgtggttcattgggatctccataaggaacaaccatctcaacaaagctgagcctatgagctatcggccgacgtccacggctgccatcaacatatgcaacagaatagatgaccaaaccctctttaggggtgaagccaatacggaagttccactgctcaacatcattaaaagtgttattaattccagggggaaatatttttttgtttatctcatcataatagagaaaagctttacacaacaatgcaccttctgccattccacaaaatatccgttaatgcggaagctcgggccctcaggttgattgataataagaggtttcaaatcacttcgatcaacaccacctctcgtttccccaggagtgtagtttctcagatgatctggtggggggagaggaaccaacttcctatcttcaaattctatgacaacgttattctgcatatcaacaataacatggatcccttccacaggacgtgcataaccattctccatgggactatcactgtcagttctgcaaaagattagaggcttgccaagtctgcggctgggagcatcagcatcactgtagtagccagcacacctgatgatttagaacaatgttcacattatcattttccatatgatgattctaagacaacaaagccagctatgagatataaaacaaaagaagtttcctaaagcttagcttaccaggcatctaccatgacaagttccatgtcatctacacctcttctcttcatagcttcaataaatggaggatagcttttgacagtagcttcacattcagcatactccatagcatcctgtgaaatatagaaatttgaactgagcgctccaaaaggttctaaaaaacttcaaaagaaaaaacagttcaagctgtaatacaagcataaatatcggaaaactaataaattgtgtcctaaaagcaatgacagcaaacaattcaagctgtaatgcaagcataaatactggaaaactaagaaatcatgttctacaagcaatatttgcagagtaaatttaaatgttgtcttgaagaaatttcacagactaaatgattggaaaattgggacaaaacaatcaaaggaaggaaaaaaaaaactaaacaaatttattttaggcaataccattgcaggctgaacttctggaacaacttcagatgatatcactttccctctgtgatgtccacccctagtagccgcatgcacctcagagagttctactatccaaatgctagtctcatttgattgtctattgtagactgtgagcttggccctcctagggggcaacctgcttggaatgacagcagagcctttggttctaggaagcagtgatggttggaatggtgggaaaaagtaggcatcagctaatgccacgacattcttttctggctccaatagcaccacttcaacaaaacgcatgccatcacgttcctgcaaattcagaaacctctatgtcagctccttttttttaaggttgtagacaaaagtacatggaatattattttgacgaacctcaggcgattttccagcagctcttacagttgctatagccactgcaatttcagcagcagataatggatctaaagggtggcttctctgggctctggtcattataggtatccctgccattttgttccatccagcagaacattagaaacgggtaataataatgaatataattcaattaagacatgtatgctgaacaggtcactcaaacaacttccaagaaattacaaaaatatacatgcatagaccaacaacaaataaccaaactcctgcatgaacatacagacctcttcaataacataggtcaacaatcgataatagataatttggcaggtcaagtagaccatgctagatgtgcttatcaggaaggctaaagaagcaatacataattttttttgaacgaatagaagcaatacataatagttaataaaaaagcagttgttgacctatctgaagatacagataaacaaagcagcggtgacatgaatcttagtacattacagtgcagatatattcattattgttctatcaacttatgtcccccatcttagatctagttgttaacaggaaataaagtcccttatttatacaccacatagacatgattggagaattgtttgatctaattagacgaacacgtaggggtatcaactgcattactgtaaatcatcccttcatgtaacacagttaaaattaggaaggcacgatctattttgaagttaaatttgacgaggtagagtcttaagagactaataattcttctcagtaacccctgccaacatcaggtgaagtattacaccagtgttcaaccgttttcagaaagtatatctgttcaaaaaactgaaaatgactgtctgtctgtctttttagcttataaactatgaagcagaatttgtctaatgcgtaacgatattttggatgagatgagaatcaaagattatgctcagaatcttaataacatttggatggccttttctacggccatcccggcaaagaatagaagatcgtgcccagtgagtttcaaaggaaagcctatttggggtttgctacacaaaaattaagcgttcaacttacgtacactgcacttcttcagcatcccgcaagcattactactttgtgatggccccgtggaccagcctgcatgatcagcttacgaccagtgcctagtggcgcatacagataaagtgcagattccatattgctgatggccccatgattcacatagtcaacaagcctattggtccatcgctgtacgggcatcgttatccatttcagacattttactcgtttccctatatcaaagaatttattggcccatcactaaacagacatcattatccatattcagacattttccttgtttcccatatcaaaactcaccatcaaccaaaaactatggaagaagaaagatagaagcgatcgctgctactagtgatcaaagaaaaagttgaaggttgcaacgcacgacgacaaagcagaaagccagaacagtaaacaacaagcccggactaccggaagatatgtgacagcaagtcccacaagtaggtgtcgcaacatcacgtcatgcccccatgatccattcaccaatgatgttgacatggagtggggacaacctcttcttaattttttctttgcgggggacaacctctttttaattgataatttgtttaaggcagattaatgatttagtgcacctatagatctaaacaaatacatatgaacagttcgcaagctataatctgcatactctgcctgcatgcatcgatcgagaactacgattgagcaaacgtacgtaacgagaactgtccgatcgtacgcgcaaataaataaatctgcatcctctacttgcatgagcacgagaagtccagaactatgcactttgcacaaaactaactgactacatttcccgaactcacacctgagctcgcgaggaaatcatgatctcgagttctccacgaataccactgtcacgtaatcacgtccttatcctactgtcttttacgacccatgcacggcacggcacggcacttccgcaacatttcccatgacccaatcgccaaccactcacacaaatccaccacgcatcaccagcaaaatagcgcaaaatgcccaatccaactcaatcgagagagagagaagggtggagatccccgaatacctttcgaggagaccttcgcggtggtgggctggaccgcggcggcgatctcctccatcacggcgccgccgccacccccggccgccgcggcgacgcggggatcatcgcccgagaccatggagaccttcccagcagcagcagcagccgcgggcgccgcgacgatcgccccgcgtgacgacgacccggggccgccgtcgacgcgccgagcagccgcagcgccgccaccgccgcagcagacgacgaccggcgccttttcctgagttgcggccattggagcggattcgcgagctgaccgtgtccgtattctccgcctccgcctccgcctcgccggctcacacgatctgacatacagcacaggcctccgccctcccgcgcgccttcgtcctcccctcccctcccctccccccacctcccgcttcctcctcctccggcttctggggtttctacgggcttagggctaccgcgaaccctaggacgaaggggaaggaccaggccggcctcgtgcgtttcctcctcctccgcgagagaagccgacgaggaatggggaagagagagagagagagagagagagagaagccggtggcgagtttggaatggtggtggtggcggtggaggaggaggaggaggaggagacgggggctttgggttgttttggagggcgaacgcctcggggctcacgtgcttttataaaggcgaacgggggaaaggtggctgggcgaggccgcgaggggaggggaagtgggtgggctggattcttctgggctccctttcccgcaaatgctacatgcacgggtaaagctgtaccccacattgtgttgatcccggtatgtaagtttttcttctttttcatttatttccttttgagacgatccctccatgaaaagttggcattttcgccaaaacgccaataagaatgccttttctgtggtggtggtagttgatttttgttaaaaatgtctagcgacagctggaaattgatttttgtttttttttcctgggggtggtttttttttatcatgtctcgaaggaaattgaggttgatggcttatcaatgtcattgcaattgccgtgatggtatcctagtggtaatttttgtggtatcttttgtattctaaagaattatggggtgctttgatatgtccctatactcgccggtagctatcaagggaaataatgcagaattgtgataactttttttcataatcaccaagtgctacttatggatttgtgttattttataaacatgtcagctttggatactttagtgatgtgattgaaattattcctttatgagatactagaagagatcattcgatcattccggatcctatgcaattgctagatagtgtgagaagtgatgagcctgaggtcgcatgaaacgctctatcaacatcgtacaataaaatcgggtagtacaaatggtggaatcatttgaaactattggatagaaaataaatggtcataactatatggaattgctattatatactccctacaccggatctccatttcaaaaaagattaccgtgtactttgacaatatttactatggttgttgaagtgtatattgtggctgcgcatccacaagttagaggatatgaggatcatcaaacttttctatagcccttaatcatttgtcatcttcattgccattgccgtgatagcatgttaatgttgtgtatcacataagttattgaaaaaactatttcgacgataataccataaagacgactcgattgtttttttagaataaagtactcctattaagcgaaagtatttctatgaactacttccgctcaataagtactcctacagagtactccttacaactattttagcgacatggcataaagtactcctacaaagtatcatttcaaaatgtattaaaggactatctcaattttaggttataagactttctagcattgcacacatttatatagatgttaatgcatttagtcacacatatatgtctagattcattaacatatatatatgaatgtggacgatgttagaaagtcttataatatgaaacggaggaagtaggatttatcacctttaggaagatatttggggatttgccgcctatatatctgtggtatattaatatgtgatctcaaaacattgcagatcttgaataaataatagaaccttacctttttgaaacagctcataaaaatcacaagagagcgtgacaataaataatgagtgaaaatacttaattggtctctcaaattaattaaaaaaaccggcaactaggtagaactggtcatattcatgcgccagaaagcacttttgtctgcgctgcttgtcatgtatcccaagaggaatattgcagcatggcgaacgcagacaccgcaacctaatcctaacccgttaaagtgctgagtgcttttgcttcacgagattactgcatcgatcgatcccgttaattacatactccttgtatactaaattaaaaaggttaattgggtgtgcacctgacagggtacgtgtgagtacgtgagccgtgaggcgcgagagcacaagcatgcgcaccgagctccgatgacaaggacgggagatgaaggcgttcttatcatctgagccggaagcaaaacgaatcaggatgctcgagcccttctcacgttggcatgcattactcagcgtagtactccagctaggtgccgagcggatattttgtaatgcgggctgattaggatcgactagcaaaaattactacgtcgacattacttcacgacgaaaatttttgtgattaatttatcaggtgccagcaccgtatcaatcaaagactgaatcccaggggagaagtatgctgtggtacgggtgagaattaccaagtatccacatgccaaccagcggcggatctaaaaattttcttgagcctcggcaaacctatcaacgggtgaagcatgcacataaaaccttgaccattaatcacaaacacaagtagatttggcatgtaaaatcttgctttgtgctggttgatcatgcgtgttgggctctattagattgaacgaagcaaggtaatagccaattaggtatgtacttaacgagcaatatgttgtaggccatggagtaatacgctgtcgcaggtctaggagcctgggcacccgcccatgctggccgggccctggctccaccactgatgccaactactatagttgatacggagtatgataatttagtgggactatcaatatggtatttgacagaacacacatccattaaatgtaaattatggatcgttgaattgcttttagatttatgcagcaatgcctaaccctaatactttattctcattccctcagtcccaactcacaccattgtcgcttctccttttcctcgtgtgcacactccactcgccaccgcaccaagccactgccttgcctagttgactgggcggaaggcttcaatggtgtcggtgaggcccctcctttccccctccctcttctttctggcgtgagctgttcgcatgtcatcgtcttccatgtctctggcagctccccaccaataccattggatccaccaccaccggtcatcaccacttaaccaatctttctgctttgtccccaccgtcaacaccaggtccccactctgcttctaacctcgcggcttcggtagcaccattaccatctcatcgctcgcccaatccaccgcccaccgtggggctatcacctcccattgccatctccctagagctaacgaactccttcatcttttctcgttccccttcctccacccctgatcccaacatgggacctaaaagtgtaggtcccctactgaagtttggagtaccaccgatgccgaaaaagatcaggagattgtcggacccgaaggagaagggcaagagcatgaatcacgaagatggactttatgacgaatgatatattagcaattttgtgatttaatttagcaatttatttttcttataacaatcttgtttgtataggtggaccaaagcccgagcatcatggagccacatgtaatggctcactgttgcgggtaagaggacactagcatgtctaatgcacctttcagtcgattgatgctgacagctagtagttgtagcgaggtttgtttgtactcctattcataaatatattccaaacgtactagatacattttgttaccaaacgttgaaaatggtttataagaaggcaatatcattttgtattgtacttcctccatttcacaatttaagattttctagcattgcccatattcatataggtgcttacattatgaaacggaggaagtagcatatgtgatgtgaatagatgcttgcacattggaatatatgaaaagaaaaaaagagaccgcccaccaaccgattacactatcccaacttaaaatgagtgtgctaacttaactcgtagcgcaattgaaagagtttatttcaaaatgtttactagatatttttttgaaaatataaaattatattttgtccgcttaaattcctgcagtaattatgcgggagggatggcgaggtttgatggctacgcgtctatgaattttgaaaccatatggtgtattgtcaacaggggtgagatgaacaccatgggttggaattttggataacgataagagagctgtctgataggagtgggtgtgtatgataggagcacgcactactcgatcacctgctacaacctctcaacagctcagtgttactggagcactcagcttgaggagactgccacctccatcgtttgtttattttttattatcagccataaccataaaattaattcaaaagttaaattctggttaagtagtatagtagataacaatacatatataaaaattttacttataaactattatttttctcaacttacaatcagctatagacaaaatgatgtgctcacccacaacaactatttttcacagctgccgtaaatattttggtgactggatggctccacgtcaccatgggcccacatgtctgctgccttttccgctcacgggccacatcaccagggtccaccagggcttttgagaaaagcgtgggctccagcctccatgtcggtcgcttttagcagcagcagcgcgccagcgcactccggtggctttggcttcgcgcgagcgaggagaggtgcagcggtgtacactgtacagtgcgctacaggttaacgcagcagaagtgcaggcgaggcagggcaggtgcggccgccgtggtggtggtatccagcggtggagcaaccggcggcggcggccgattattggttcctcggttcacgggagtggtgaagcgcagcgtggccaccggccacgtactcgcgtacgtactcacgcccgcacgcacgcacgcctgcgtgcgcttgtgccactttggcgacgagttgacaactgtgagtccgcgacagcgatcacccttcgagtgtgttgggtggtgcaccgacgttgctgtccattatatcggccaccatttgccaatttgctgattgccgattgctacggatacggcactggcttttcggctggttaatcgagatgctctcctttaatttgtgattcgctaaaaaagatgaagaaaaagatatgcttattctgatccatgattaggatgcacgaacgcttaacaaatgctactgatcacttgtgtgtagtgcggtacagcggtaacacccttgccgtgatgaggaggagttcagggaggatctacggctcatacgtacggtcgtggtacatcgtgaggtgaagtcatccgctcaggccaaatctgcgtgcccgggcagctgcaactgcaatatatgatcactcaaaaaactttcaacaatgtcagctcgtggaagctgacgtgtccaggcgtcaaattgatggaattccatttccggagagaccaaagcgagatccccataaaaaacgtctcatcatgcgtccacgcttgcatcgacgtacagtactacgatcgtaaaatattatgcttctttttcgaaagggcccggctaatgtcaccagttcaagtatcctatccaactccaagtcatccaaccttgctaggatgagaacgacacggattagtgcactcagcatggcatgattatgtaggaatccaatgctaactatactcgtctgttttatgatgccatcgagcctagcttgcttgattgatttcgatcaggatgatatgccccttcaaccactctatcctgcatgcttagtttgcccacactccaccctccacagtggcaaagaaagctgcgtgagcgtgacggcctgaatattcctttttaatttggccaaatgaaagctcagattcgcgatatacgtagacacgtagtgcgcctcatcatgcacgattaagaaaaggaaaacgccgagggctggtggtctcaaacaaaacggtgtgcgtgatggaacacgcatacgtacgtactactacattatactcgcttgctccagctttagggcctctttaaatcacagaataaacaaacagagaaatagaaaaaacataggattttgacaggaataaaagtgtaaaatagaggattgcaaaacacaggaaaaacataggaatgaccgtttgattgaaccatagaaaaaacacaggaatttagggagagataaagactcaaaagatttcttccatgaggttctagctcttgttaaaattcctccaaaacttatatgggaagaggcattccataggaattttatgggattccatagggttcattcctttgagtcaaaaggctttataggaaaaattcctatagaaataaaatcctctaaaatttctataaatttccattgaatcaaattgccttaatttagtcccatcgatatccaaaaccatgcgtacgtgtgcatcctgccatcagcccattctgatgcacggcgcaccgtcgtccgtcgtcgcgacaagccaatatgcacatataaacgaatccaccgagcaagccggagcacgacgtcgtgctgcatagctggatgcatcatgcctgagtgcgtttgatacgtacgtacgctcatccaccaacgggcccacgacaaaacgactcgatcgatcggtgaacattgctcgcgttgccgtacgtgcttcgtcggtagtcgtgggtggggtcttggtcaccccgcatgggtaggagctgacgcgtcacgcgtaccgccgtacgtgtcgtatcgtgtagacgagaattttttttaatgttttgaacttttaaaaacattaaaccattccaaaacttattattagaatttgaaccttttttatcacgtcaacctgctagatacaacgagcgtgataattttgttatgccacgcaggatggcgtggccagataatgctgtcacgccaaacagaccgacatgacagtgttccaaaaggtttagagtttttgaaaatgtttatttttaaaatttaaaatttgaaaagtttaaaaataaaaaaaaattgtgtagacgataacgacggtcgcgcaggcttggccgatcccgacccgaccaaccgggggcgctgtcgcatgtgaagtgggctgcgcgcgtgggattctcagtggccttttctggagtagcttctttcggcccgctttgctgccatgggccgatatgtttatttccgtcttactcagagcccaattcgggatatgtggtttcgtttccgcgggcggaagcggagagaaacggcgcgggccccggggagagaaccggcatttcccgctgcgcgcattgccggcgaggcgccaaaaccctaccgcgcgataatcctcttcctctccgctgcgctcccttcccagccggcggcgccaactttagtagccgcaggccgcagccgcccacgaaccgccggcgacgagatccgagaggaggctggccggggctgtcgatggcgtcgtggtgcggcgacctggctgcgccgccccgcctcctcgtcgcccctcgtgagtgcccctcctccgcccccggccatcgttgtgctgtctggtctgtttaggctcgcatgtttcagggcggtagtgcgattagtgattctaattccaaatccccaattggaagcatctggtagcagtagtttgttttcgtcttcaattttcaagattcctttgagctcggtggatttatgtggcttggtcgaaatgccagcggacttaaaaattgtgcgaactgaagattaccgcctgagttttttggttgggccttgggggtcttttaaacactggattacggagcaataagtgtatcacatggaggagcatcacatgcataaatgtataatcagttaatcacatcccattttgtgttttccttgcaggtccttgtgatggcaattgtcaagggaatgttttgtctctccgccacccgagatcaggtgctcttattcctccttgcttctgttttctttgtcggttattaaatctgcactagtaatgtagactaatttggtagcctgttagcatctgaagaatagccatgcagaagtagattatcagcattcaacagttttgcattaactcttgcctcatcatcaaacagatgaagaaacagggtatctgttcatcgacggtcaacttcacgagttcaattggtttaaggagcgatttggatcttggttcttgggtgattatgtttgtgaaggtatggcagacacatagctatgcagttgtcatttctaagaaaaactttgtattttgcctttatggtaaggtttgtctattattatcttgtgtgggctataggaagacattttgataggaattattgccctgcctctgaaatcacccatttagattttgttagcaagtaattaaaatatggaatcagacagacatgttgttaaaggagtggtgctattcttgttctaacacagcaacataaataacttccaaatggcacaatctattccagataaagtttttgaaaaatatcgtactgcggagaaattcaatacctgagtttattgacctgctgtccttcctgacttcttgtagatggcagcctctactactgcacagttgttgatcccatttttattcttctaccaattttgaaagctgcacgtatgtcggtatgccaaatcaaatcagaaatatttctaatatgaggttcacattcaacatatttgcctgttgaaaatttgaaaagctagtccctcaacagctttactgtgctgcagaatggtaaagatccaggaaaatttaggcaactggatgaaatattgtatgttgaaggatatcctggatatcaacacctcatgggtatagcaggaaaccatattgatctggtctgtgaagttaaaggtagatgtttgacttgtatgtttgttctgaagttaaatgttatatgtagttaaatattatagcaaactgctgtcagaatgctgcctacttgtatttgtagtccggtgattgtgcggtgcatttttaccgcttcattaccttgctgaactgaaacacttattggatatggatgtttatgtttcatccgtgctttcctgtgtgttttcatggaagagaagttttacttaaccatctcgcatggatgttttctttcctgcagaagttgctaatgtgaagttctttaggctggacgattccaaggtcttatcttggttgtgctgtaaggttagcttgtgtcagtaattacatctactaactcgatttgcactatgctattccgctgatacttattcttatcagaagctaacccaccttttatctttacttgtccttttcatattacaaaagcaaggatctaacatgaagttagggtggaatgttgcttatgtgggttaggaaaagaggcatcttattgtttttagactgtttgccttgaataaggatgcaacaatccaacaaactgagcacaacattgagaatgttgatgggctaaaacttaattcttccacaccatgttttaatttatatttgtatataaactatgtgcaccaaacattagtctttaagttcactttggttttgaagatgataaataaagcatgaattgggaccctagtgaatttcctatatatttaagaacatgaatgcacatggtcattcttgtaaacgtccctaaataggtgtcagagggtagtggctgctattccttgactgctgtttgtagcattctgcctaccttatgttacaaccttctacaaccattataatgtacggtgtgttccagtactgtttatttgttgcatatttcctgccattttccagttgaacaattttacttcataaatttcatttaactatgttcttgcaaaaatatagctagcatgtgttgtgcccactataacaccactgctatctgctgtaccaacactttgccacatgctacatgcaactcaaaacatcatacaatatttttgcatgattaacctagtaatggctattgttatctgcaagaaacaaatgccactttgggatatcacttagattttttaaaaaattatgctgccttgcaaattcaaaataacagtttgtcttggtagcatcatgagaacataccagttcatgtgccctcataatttatgttttgatacgtcctttagctgtacttaatattcatgcctgtgaatttcgaatcatattgatctcacttcacttgttactctgtagtttcgaaaatactcttatgaatctcatatacaggttcacaatctaaaagaggttttccccaagctaggcaaaaattatgctgcccaaggagaaaaagaattatgtatgttgctgcaactctttttgttaagtctaatacaactgtattagtctattataagaaggatatagctccttgtaaacttatgtttctgtttatttttatgagtgttttatcaaccgatatccaaatgtacataaacattttaccattgctaactttcacaattatatggtaataaaaactgtttgaaaatggatcgtcagtgtgatttacatcctattggatcacttttgtcccaaccttaattagtgaatccactttgcattacaaaattgtctgagtaaacttaaaggagattttgcttgtggaggtggatctcctctaaagaaaaggatatatcaaattatttttaaacattttaactaaagttatgtaacttcaattcaagatattgcacagggattaaattcctgagttacttttgaagcacaactcaagaattttatgaaaatgtaaatcattgttctaatggagcggtttccattgttttggttacagtgaaggatgccgtccaaataattcgcgaatacctgaacgacgaaccatggttaacgttactctgcaagaagttgcagtaagacttctccttgcattatgttgaagattttagttcagtacagacttttaattgactatgcattttttttctgagcgaaatccgatagactatgctcacattggtacaatgcattctccacaggttggatatcaaggagatcattgaagcgaacaaaactagcgaagcttccttctgtgcagagaattctcctgtacctttccaccctgctgaggtaaactccttgaagatgatcagggtgttctacaccggatagctcatgtgctataagcttattaatcgtgttaacgcaggagaagcttggaagtagtagcactaggtcaagcaaagggaggccagcaaagaaacaaaaggctgaggtagaatcgaagaacatcaaagacatgttccggagggtcacaaggaaaggaacgtgatcccatattatttatagtatgacttggttctgatttcgccatcgagacctcgcaaggcgcttcatattattgagggaaagctgaggttttcagattaaagcattgtttatgcttcagaagcattcgtgcagctaatggaattaactgtttaacaaatttactccaagtctcaactttgttaggtttgaaatgtagcattgcaggcgtgtatttaagtatttgagcaaagagtcttgtactatcctactgatttgtatcgtaccaaccaatttccttgaacatcttggccttgggtcactagagtaatctgaaatggttgttaatgttatttgtgagcttcaacacttcctatttgagaacatttctaagttgttccggaggcccggtgtctgttattatctccaaatagtctgtgttactacagatagtctacatgtatgtacgtgcggataggtgctactccaaatagtctatactctaggtattttagacaggtaattctgtacccggtatttagaaagtactcgtatgacgtatcacgctagatggcgaaaggcaagtcactacgtctgaaaacaaaaaggtaaaatgacctagcttttttgtcaatcaactgattatgtgctaaatagagtataatcactttggatgcttagattgctctacattagtttgcccgttgcaccctccagaggaataattaacttatttgccactattatgagtggtgataaaagattaccattgaactcacgtgtcatagatacatgagaactcacatgtcatagacaatgagtgataaatctcggaaatacttctctccggacggccgattctatgcgagaaatcggatgccctttatatccttatgtctctcccacgcgctcttgtgctgccacgtgtccccaccacatatttcgttgcaacaaatcactaacatattttggaaaccctctgttaagggaatccgttttattttttgttccactaaaaatgtttcacctagtgtactcacaatgtttcactatgtatggatctcatgttgtagtgaattgaaacattcttttgcaacaaatcacccacatattatggaaactctctattaagggaatttgttttattttttttctacaaaaaatgtttcacctagtatacttataatgtttcactttgtatggatcaaatgttgcagtgacttgaaacattctttcgctatttgctgaaacattgtttttatataaggtgaaataacgccctatttaaatgaatgaaacatttttatctacccagtgaaacaattctgatatacttggtggaacagcgtgcaacatttaaaaataattcaataataaactatttttttcattggaatatatccatgtgtggtcttgttttaaaaatttaattgtaacgaatttaatagtgcaatcgaattatgatttggacaaataatttaagataaaaaatagtttaaaatagttttgcatacatacatacttgatgacatcatactgacatgggcgtccgattcctagtcgtctctaataaattcttaattgccacctcttaaaagtggaaaaaaaaaagaaaagaaagttaaatgtcccaccaaaggctccgcgcgccgcggccgcacccttccgacgcgggctgaggcgagcggactccagtggaggcagagacgtgggctgctgctccggcccatgggcttccacctcgagcctgggccgtcgctgacgtcatcaactcccccccgtctccccacacacgcactcccctgtcccctccccccgctgctgctaggcccgatccactgctctccccaccggtggtgagtcaccacgctgcgtggcaaaccctagttaaccggcgcggcgtccggcgaccgtacactcggcggaggccgcagagcggcagcggcaggcggcggtgccgccgagggcagtcggctcggctcccgcggcaaagcgggaacgggagagagagcagggcggcacacgcgcgcgctgaggctgcgcgcggtgggcgcggcgtccggcgatgcccgggcaagagctataggaaggcgaagtcgtgggctacagccccagtccccagtgctaaggcagtaagctgctgctcactcctaaccatctccccctttttcccttgcttgatttgttgggggtactgacccttactagtagttttagaaatgagaagattgctgaaacgattgcggttctcaaccttgctcgcgtagtctcatgctgcttgagggcttgcccaggctccaaaatttcctggctccgcactttttagagggatgaatccgatgaaacccaacctggcattgtctcgtcgattctctagtggtaaataggagtttaccataatgaccgagcttgtttgatgattataacttagtgatatataggagtttcccataatacctagttgatttgctgattacaaattaattttatggattggctgaacatgggaatgaaaattggtggcaaattcttgcaaattccttactttctgatccgctccatggttcgtgcttcagtgacccttcccctccatctcggacaagctcatggaccaggcagcggcgaggatgataagttaggatttggggttggggcgggggcagtttcctgggtttggagggaggtctgggcagtactggcacaaccagagtcactgagtcaggagagggcagtgggagggctcagcagcagggacgaaggggaacgagaagttccgaggtggatgacagcactagccgccgggtatggggaaggaggtggcgtaggggcagcggatgcaaggaagatggatcggtgcagtgggatatggaggaaggcaaagtggaggggagggggtggggtgcatcgtctgtagaggtggcagcagttggggatggatttgctgtcggcgacctgacgcctctaaggtagagggtatgcagtggtggagattggttagcaggggtggcgttgagtgatggctgggggatggtgtttacattattggaggagaagatatgggcctttggatctcaatcaaacagtcaaaaagcgtaccatttagtgtaaaaaaaaaacttaccaattatatatagtcagccccataattttaggcacatatattggtcatatattcaagatgctgataccaattatttgcatttccccatgtcatatttagtaattacaagttacgtttatggtctatcaataacagttgtatcagcaaaattacatgtttatgatctgttgtcaattttgtttcgtgtactgtattccaagatgcttacactctcgagggtgttcaatttctgtctcgatataggtttctgattacccaagtgtagatgtgatggacacccatcacagcgatcaatatgcaaagagcagcctgcagctgcaattcagggacacctctgtttcctttgaaaacaacaattctgttttggataagcatgatattacaagccctcaagttggcatgacttttgagacagccgatttggcatatcggttctacttagaatatggctaccgtgcagggttcggggtctcaaagaggacttcccatagtgttgatggggtgaaataccgtgcaacatttgtttgttacaaaggcggcattgctaggatcaagcctggtctcaaagctcgaaggaggcttgttgcaaagactggttgcaaagcaatgatggtagtcaagtataacacaactgaaaaccagtgggaggtagtttttgttgagctggagcataaccatccatgtaatcctgaaatggttagattcatgatgtgctttaaagatctccctgactggcagagggagcaccgcccattcaatgccaagactagattgaatccaaagattcactctggcagaggcaggccacccaaccaaaacaaagacttcatggtgaaaaaaaccttctcacaatcaaattattccattgaagcagcaggcaaggctggaaagctgagatttgcagagggtgatgttgaggcactcttggtcttctttgataagatgcaagctcaaaattcaaactttttctacaactgggacatggatgatgaaggtcggctcaagaatgtttgctgggtcgatgctagatcgagagctgcataccagcacttctgtgatgttgtttgctttgatactgtttatttgacataccaatttgtcattccattggttgcttttcttggaatcaaccatcatgggcaatttgtgttgttgggatgcggtttacttggggacgaatctccagagactttttcttggttattcaagaaatggctaaaatgtatgaatgataaatcacctgaagcaattattaccacccactcaagaccagtggtcaaagctgttgctgaggtatttccaaatactcgtcacagatacaatctttggcatatcatgaaagagcttcctgaaatgtctggaagagttgaggataaggaggcaattagcctaagaatgaaaaaggtagtcttcgacactattacatcaactgattttgagagggaatgggttgagatggtcaatcagtataaccttcatgataatcattggcttacaaccttatttgaagagagggcaaaatgggtaccagcatatgtcaaggatactttctgggctggtatatccactgttcgccgcagtgagcggttggaggccttttttgatggatacattacaccagagaccacaattaagacatttattgaacaatttgatactgctatgaagcttaggtctgaccgagaagcgtatgatgattttcgctcatttcagcaaaggcctcaagtcttgtctggtctactctttgaggagcaatttgcaaatgtttatacaataaatatgtttcagaagttccaagatcacttgaagcagctgatgaacgtgacttgcactgaagtcagtaggaatggatcaatagtgacttacactgtgaccgtcattggtaaggagaggaagtatgactacaaagtgatgtataacagtgctgagaaagaggtgtggtgtatctgcaggtccttccagtttaaaggtattttgtgtagccatgctcttgctgtcttgagacaggaacttgtgatgctgataccttataaatatattctcgatcgctggaggaaggactacaaatgccccgaggaatccaaggaaactcccatctcaccaaaagcgatcaaagctacagggaagggcacaaaaccggaaaatgcccgtgaagataaagtggacaatctgtacaagcatggtcaccagtactttgctgacattgtggaaatgggagcaacggaccctgatgcaatggagtatgttttgtcggtcatgaaagaagccaaagagaaggtacggaagttcgaggaatctcgaaaagatagaaggcctggagacagtccagtttctactggtaagagaaatggcaagtcttcaagaccatccaatgaggatgggggcaatggcatatcagattcaacacctgcgactacaacagtggcgacagtcgcggtggccacatctacaacaatgcaggcaacgcctacaatggtggctatagcgcctacttcggcaactgtgcccgccggaatgtttttggtaccaatgcacccacatccgatggttttcccacctttcacccctgcagtaccaccagtggtagcacctgcagtgccacctccagcaccagcagccaatgtgggtgatgtggcttccaactccacaaggaagagaaagaaaagaaaggggaacaaatgatgttcctaatactgattatgtaagcgcttcactttgccgcttctccttttgtgctgtactttgctttgtggtgttgatttattcagataatctcatcgtgcccttaccccgtattttttgttccaggcctaactcaaatttagtcctacaagctgcaccaggccctcctgtccatgtgtaataatggtttatcatcgtctcctgctgcaggatgatctgcccctctgaatgctttctgtgaattatcccccttgacttggaactgtccgtgcagctttggactgtctactgtaaattgatatggaaagtaatgtattatgtatgtagtgcagcttaggaatgttagtctctgtttctgctcatgtggattgcgacctggagcagcgcagtaccaagactaccagtagcgtagcagtaccccttgctggttggtagagtaccattttctttcctttctggagtttgtcactttatgtaatgatgtaatcacactgaactttattgccaaccactaatgcttagtttcatcttatgccgttggctgttgcactgagccctgagcattattttcatcgtatgcaagctcaccatttcttgtcatactgaaaatcgatcgtgcatatggtatgagaatggtttttcagttttctgaaaattgatcgttcacatgttatgagaatggtttttcagcaagcatatgtagaattgtagattaccgatacaaggagttgacccaggaaggcaggaatagtatttcagcatccgtggtgcgtaggatacttcacttcaccctaaggagttggcccaggtgactcaattatcaagccatgttttgacttgcccgattatactcgtaacagccacagatacgacacttgacgcggctccaagaactcctgtgtatattattctcctgcatcaatcctccagatgaagaaaccaacagtcacatactccatccgttttaaaatattgcaatttagtaccgtatttgacataacctaacctattaatctagacatctctattacaatcttgatcagagtcgtagtagattatatcaaataagataccacattgctatattatagaaaagatgatgtgcttattgtctttaatccttgttagactgtctacgcagacgtagatttccttttaaatacgagggtagttttttaaacaataaactacctttcatagagttctcataaaattctaagccaaaatataaatattgaaccttaattttagattaatctaaagcttcttttaatcattttctttttcaagccttcaccttgaaaccgctagagtaaaaatataaaagtttcattctaaatttattgttacctttatttgaattattttattttctatggcatatcagtcacgaaataatatttctaacctctgatgcattatttacgtagaaaaactgcaaatgtaccatactcactccgtctaaaatataagagattttggatggatgaaacacaacataatattacaaatttggacagagagcatgtccaaattcgtagtattaggatgtgtgtcccatccacccaaaatcttttatatttttagggtggagggagtataatccatgtctcgatgacttcatatgctacccctggacaggatgtaccctcatttttttttgcatgtcactcaaataattatgaaaaactttgagaagatgtattaatatgtgatatatccacaaacattttcaaattcaacttctacatttcgcaacgaaaaaaaaacaaatttgactatgaatatatgttaattagctgtagtttaatttgtttttttcgagatgtaaaagtttaatctgaacttgcatgtatatggagtgatatacattcatattcgtatctttttcataattatttgagtaatatacaaccaacaagagagaacatcctctcgagggattaaaatagtttccatcctaccagcttgttaacgggccaaacgtcaccattatgagtcatgacatgggggaggaagaagggcctattcacttagatgctaaaaaaacattaccaaattttggcattgccgaaattttggcaactgtgtttgccaaaatttttgcaggatttcttatataactaccaaaacttggcagcaaactaaatataaccactttttagcaattttattaaaatttgataaggttaaaaattgacattgcagtgatcaggcccgaaaactttcgacgacgaagccgcacaacctgcctcgccctcgcgccctgccatgccatgccatgccatgaacgagcgggaagctctagaagggccggaattcaaagccgcgactcctcccctaaacctggccaaatgggccgtgccaagccgggccggcccgagcacggcagtactgtagccggcccaggcccggcacggcacgccagcctgtgggccgtgccggcacggcccgttatcccgtgccgtgtttgggccgatgcctcagcccgtgggctggcacggcacggcacgtttactgtagcgtaccggcacggcacggcccaggcatggcacggcccaccggcccatttatttttcctacgattttctaatttttcccatatatttctcatattttttatttttttccacattttatcctatttgtaccatatattttatgatatatttcctaaattttcctcacatttatcctatatttatcattttttcctttatattatgttttttctgcctttttctttttttcccctcaaatttcaatttttatgggccacatgtactagtgggccggctaccagcccacgtgccactacagtagccgtgccggcccggtacggcccagcaccttcttgggctgtgcttgggccgtggccttggcacgtgggccggcacggcacggcccgctataggagccgtgcctaacggcccgtgtcctagtgggccgtgccgtcggcgtgccgtgtcgtgctgggccgggccgcccgtttggcctgctatatcctccccccacccccacccctacccgcacccgtaactcccccgccgcgtcgtcggctctcactgacaccctctggcccacgcgatttccctcgcccgccgcgcccctatccgccacgtgccgcgtgtcgcgcctcccccctcccgccgcgtgccccctccccccgcccacgtcatcacgcccacacagagttaaaactccaccaccaccctcgccaccaacctttcccactgccccactgcaccgcgctcgctcgcttgatatcgatcgatctcaccatgcggctctacctgtacgtgatcgaggcgcggggcctcccggagcacggcggcgatgggggcggagggccgtactacgcgagggcgaaggtggggaagcagagggcgcggacgcgggaggtggaggcgcgcggcggcggggcgtcgggggcggcggcggagtggaacgaggagctggtgctcgaggtggacgggggcgaggcggtggaggtcggggtggcgcggcggcgggagggcggcgggcgcggcgggagggaggtggtgggcagggtgaagctgccggtgcccgccgccgccgtccccgcggggaggaggagaaggacgaccgtgccgccgacgtggttcacgctgcagcccaagcaccaccgccgctggaagaagggcgcggcggaggcggcggattgcggtgcgtacacgcattctctagctttgattatcgaagtaaattacgtgtgattccgtccgtactttgggttaatccgctcccttctcgaatcggtcggcgcgcggcgcggcggccgactttttggtgaagctaccagtatctttgttagctttgccaaatgcagcacgcaagctcgtagtaagagggattagcatgctgttatacggaatgaaaacttagggtgcgttcgtttcatggacaatgagtggagatagcacatcgttttccgcgcgcacgcttcccaaactactaaacggtgtgttttttgcaaaaattttctataggaaaattgctttaaaaaaccatattaatccatttttgcaatttaaaatagttaatactcaattaatcacatactaatggctcatctcgttttgcgtatcttcccaatcttctcgatcccctatccctcaaactcaccctagtagctttcgaagtcattcgtaattgttttttttcattccagcgtagttcgacgacgtctctttcacggctgttcttttactgagactcgtgctgaccagcaacgacatgctcttttaatttgcactgtttgcacaattaatcatgtagccagcttaggccttgtttggttacacaagaattcaatccgggtcaggaataataagtatagtaagaaatttatgatagatataacgagagaccgggatttattctgagtcgggaaccaatttaatcatgatagagacaataagagaccgggaatcaatccactagtcaagaggtgtggaactaatccggatattttgttgtacctaatatgagtaaattggtttccgaccgggaataaatcacggtctcttgttgtacctattataaatttcttgttatacctaccgttcccggcctggaacgaatgcttgtgtaactgaacaagggcttaaggtcttcgcagcatctgtcctaaactagggtggtgtttggattcagggactaaattttagtgtcattagtctacgtttaatacttctaattagtgtccaaacatccaatatgacagggattaaaatttagtccttggatccaaacagagcctagatttggatacatactagtgatctatgatcagcaagggacttgagcaggctactgcgcacataattctcgagagttatttgaacaaatagtcttaatacgatgcaggaaaccaggatcaaattcagtgtttgccagacaattaaccattgtgtctcagtttatagtagtgcagtgtgaggtgtgatccactgattccctttcagctgggaacggcctagtttcggttgtatacacacacatccccgtttggtgtacacattaactcctctgcttttttaatatatgacactgatgactatttgtcttaataaaaaaattatgcaaaaaaaatgtgcttaaagtatgataaaacaagtcgcaataaaataaatgttaattacgtatttttttaataagatgaattggcaaacgtatgtccaaaagttaatgacatcatatattgaaaacggagagggtgttcttctccttcaggtgaatgttctgctgatatgttgttttttgtatggttgtgaaccagggaaaattcttctcaccttttcactgcatggagaaaacagcgacaatactgttatccactcatcaccttgttcgagctctaggagcgacactgacattgaatttgagagatcaacttattgggaacattcaagttccaacagtgggacggttgattctcccaggagttttgcaatagaacgatcttctttagaaaattctgaccgttcagcccaagcaaattccaattccaactctgaagatgatgatctaacagagcctagtgcagcaacagcaaagggcacaagtgacatcgaaccaatggttccagatgcaagctttgaagaagctatggaaatcatgaagtctaaaagcatccctgacatgccagaagatcttaatggtggtgtcatgttcgatcacacttaccttgtggactcgaagaatttgaactctcttatctttgggcctgattctcagttctccaaagagttgcgcgagttgcaaggaactatggactatgaggaacagccatggacatggaacaataataatcctcctagcttaaccaggacatgtcaatacaccaaaggtgcaacaaaatttatgaaagccgtcaaaactattgaagagcaaacatatcttaaagcagatggcaagagttatgtaattatgactcgtgttcgtactcccgaggttccatttggaaattgttttgaggttgttatgctgtacaaaataattcactaccctgagttgtcgtcaagtgaaggaatgtcacatctgactgtatcatacaatgtagagttccttcagagtaccatgatgaaaagtatgattgagggaagtgttcgggatggactgaaagaaaattttgaaagttacgcagaaattttgtctcggcatgtaaaaattgctgattctgctgggatggataaagagcgattattggcaccgctccagactgatcatcagtcagatatcagacttgcttacaagtatttttgcaatttcacagtcatctctacagtgataatggcactgtatgttcttgtacacatctttctgtcaagaccaggccctcttatgggtcttgagttcaaaggtcttgatttacctgacacgtttggagagctgatcatatctggcatactagttcttcagctagaacgtttactgagtatgatatctcgttttgtagaggtaagggtacagcgaggtatgtttgttttctttgttgtgcatttactgtatttctcgtgcactagacatgcaaattaacataaagtcataactatgctaactatgtatcttcttttgtcacaggaagtgatcacgggattaaagcaaatggagatggttggttgttaactgtagctctgctagaggccacaagcttgccgcctgtctctagcggttccgtagatccttatgttgtgttcagctgtaacggcataacacgaacaagctctgtgcaacttcagactcatgaccctcaatggaacggttagtagatttcacacgttaactcactaatctcctatcttaatttaattcatcatctattacaaactgacagaacatttcagagataatggagtttgatgccatggaagaaccacctgctacgttggatgttgaggttttcaattttgatggaccatttgatctggcagtttctctgggacatgctgaaattaacttccttaaacacacgtcagcagaactagcagatatatgggtgccactggaaggtaaattagctcagacttgtcagagtaggttacatttgagaatatttctggagaacacaaaaggacctgagacatcaatgagagagtacttaagtaagatggagaaggaagttggtaagaaggtaacttccgactaacttgttcctgggtactgactcttaactaataattaaacctcttgatgatgcagtatttgtatttatattgcagttacatgttcagtcacctcacagaaatgcaacgttccagaagctttttggtttaccacacgaagaattccttatagcagtttatgcgtgctccttgaaacggaagttgccgttgcaggtatgattgttcccttctctgtgttgaggattcagtttgagcacattgcggttgacatgatatgaaatcaatcctagaattttactttgaaaacattgttttacttaataatccaatatcaccttatactactcttatgtcttcttttggaccattacaatatgaaaacatcaggtcattcacatattatatctgtggatattaatattagtagtaacttgcagttgcttctgatgcagggaagactgtttctgtcagccagaatagttggtttctatgccaatctgtttggacataaaacgaaattcttctttctgtgggaagatgtcgaggaaatcgaagagttaactccatctttcacaacagtaggtactccatctttgttgtttgtcttgaagagcggccggggactcgatgccaagaatggtgcaaagtcccaagataaggaaggcaggttgaagtttcagttccattcgtttgcttcatttagcaaggctagcaggttgttttatctcttcctagctttattaccagtattttttttttgataaaggaagcttttattaatctcagacgattacatcaagttgatagaaccatactaagaaaaataagataaggagaatctatttgacgagaaaactatctgttcttcattgttaggacaataattggactatggaaaaccaaatcatcagctattgaacagagggctaaactagaagaagatcaagaagatgaaaactatgtcgatcttaatgatgttcaatctgtattgagcattggagatgtgccactgtcaaaggagtatactttggaactgcctatcgatgtgagttttctgcttcattagttcttctgctgatagaattgcgtttgtttctccccctttttagtggaagaggctagataagttatacagtacttgtgtaaacatggatgtgaattttcatccctcgagggtatgtcctttcattgcttgcatgtcatataaatagttataaaaaattgaaaaaaaaaaaacaagatagattaactagtggcgttcttgcatttaacgatcacttgtcagtgtacttcactcctgggattcgtttttctgtacagctgcactgcttgaatattttcgtttatactcgaatttctccaactttggttgaattacattcaaatcagttcaaaattcaaacacatgtcggtgggattttgtccgacctcccaaaatcttgtacttccacagataagatcctaacccatgcttgtcaaccaacacgctgttgtgccaccaccatctgcagtctgcagaaacccccgttttccatcgtccctttgtactttgtagtactacatggttgtcacttgtcagcacgctgttgtgcgccaccgttccttcgatcgctttctgtactgtactcacaattgtgtgtgcatcgcaggcggatctgctgatgggggtgttcgacgggggccccctggaggcgaaggcgatgagcagggcgggttgcctcgactacgccgccaccccgtggcaggacgcccggcccggcgtcctggagcggcacgccagctacaagttcaaccgctacatgtccatcttcggcggcgaggtcgtcagcacccagctcaggctcccctccgacgacggcgacggctggaccgtctacgacgtcatcacgctgcgcaacgtccccttcggcgacttcttccgggtacgcacccaacaaatcacaaccacaaccacacctatgaactctcacgtacttactacgagtcctcacgttggatgctagtgcttgctgtagctaagatgtcgtcatgccactgttttttcctctcctttttattttggtgtggtttgaggagagtggttagctaggcaagtggccgtgagtgaaagggtggttatgctgatagtggttaatattaagatatttgcatctatccagtaaaaagtacctcgagatacaaatcgtttatggttagatctaataatcggaaacgatttattaccgtactagtatctagatttactttttattggaccggagaaaatctctaatattaatgtattgtgtgcgcgattaatttgattataatgcagttgcatttgaggcacaacatatggagcgtggaggccgcgtcgtcggaggcggcggcgagcagcgggagccggtgcgagatactggtggggatcgagtgggtgaagaggagcaagttccagaagaggatcgcgaggaacatctgcgagaagctggcgcacagggcgaaggaggtgctcgaggcggccgccagggagatcgccccggccttgtcgggctagcgagaagctggaggagacggctgttttttctttttcttccagcaaggccgcaacggagaagatctctgcagaggagcagagtgcacgactgaactgtgtcggcttttgccttggctgtagcgtagtagtatctccaaaacagaacgaaacaaataggaatacggagatgtataccaactacagtatatacgatatcttcaagaagtacacatgatcccaaaaaagtgtacaagtgtcgagcccgaaccgagctgtgcgtgcgcgcgcgtgaccagccggccgaattccggtggtttttcctcgtgtcgagccggcacgatgtggtgggaggtggccaactgttggtagatcgggcgatgccgtattgaacatgggcgtgacttctcgttggatagacaagatcatcatctgcggaacgtgggtgcatgcgacttcctggtgctgttgatctggccaccgcagtaccgcaccgctcatggggagagtcatggtggtggcgctcggtttgtatggatttccaagtgtacattcctgaggtgtgcatccctcggtttcatcttaggtgtacaggcttgaatgctaatcgagttactcatcataaaaatgtctaattctatataaaatgttatatttataggtttttatcattgttaatcacataaccagtttctcggcaaaatctatatgattaaggcacgcttgaatagaagttttatctgagataagaaaacgagccttataacactttctcgatcactttaaaagaataaataaatgtatcggatctctaacaccgtgaagaccgtatggatcagtctgcaattgcaaatgaattacaactagaagtgaacttgctaacgaaacgagaaaattggcttacgacattataaagcttcaaactgtactacaagtctacaacaacattgaattgtgctaaaaaatcggatgatataaatttgaactctgatttttttttcttttggtacgaacagagaccaatttcccctcgagctcagcctcagagccggcgctaggcaaaggggagggcacccaactactacagtacccaagtcgtcgccgccgccgcctccccccaaaatcgcccaaaataccaccgagccagacgccactacgccataaaagcagccttcactctcgtctcctcctccggcgccgatcccctcccgaattccgccatggatccggcgccgcaggcccaccccatcctctcctacgtgctctcccgcctccccaccctcgccaaggcccgcccggccggcggcggcggcgacttcgacatcgagcagccgcccgtgcacacgccgtcgccgcggacgccctccaccgcgggggagttcgagctcgtggagcgtatgccggggctgcgccacccgtccgtgctccgcgccatgacccgcgccgtcgccgacgtgtcggccgcgcgctccgcgctccaggtcctcggcccgcggcccgaccacgagctcgtcgactcctcccgcgcgatcgtcgccgcgaccgacgccgaggccgggggctcgcggcgggtccccgagggggacctcgaggcctgccgcgccgtggtgcggctcgaggagacgcacgacgcctacgaggcgctgctgcaggaggccgaggggaggctcgaggcggtgtaccggtcggcgatggaggggaaggacctggaggagcccgacgggagggacgaatcggcggcggcagccgccggggatgatgctgcggtgcaggaggaggtgatcgcggtgctgaggcaggccgaggagggcaagccggtggagagcgtccgcctcgtggaccggcagctgcgccacctgccggaggcgttcgggaggatccaggggctccgcgtgctcgatgtctcgcgcaatcagctcgaggtgagaaatctgttatctccgcatgctttagatctgcttgtttagaaccctgtaacccaaacaatgcttgtactgggttttgtacgcatttagacatctgaacggatgggatttttctcttctgtactgtgaaattgtgaattgatggattgaatcttatgttgaagatgatcagaaatatagggccatatgcaaaatgtgtacgtgagcgataaaatgcctgttttgtggtgttgcacacattctaccatttgaactgtatgctgaaaatagtttgggcactgaattttcggtaggattgtgttttttgtgtgtgtgtgttatggtatggtcagttcctattatttttagagtcctcaagactgcgcatgtactattttctttatagatttactagtacaacttatttattggtgatgaaacagttactatcttaggccttaggatgtaaatagtgaaacactgtatgttagtatttctttttgctgtttttatttgattactaaattaggctatgggtggatgagtgctgaaagttatggatatagtgacccactagtcttgttttagagtactgagagttagctgttgaccatctacagtctgaaactcagaataactggatactagtatgtagtaagtattgacagaacaaatgtagaactggtaggagcttggcgtgtatgtaaattcctgattagattgtggattcactttctaatatcatcctgtatttaatggttggcttggatcattggaaaatcataggtaagagtagggaaggctggctttgttttgaattttggccacttcctctatatccgtgtttacattgatgtttagaaatttcttagtttatttttgggatattaggttgtgctcatttgagtttaaaaatagacaaacaattaagcacatactaactataattattttctttgataaacctttatactcagttatttaaagatagacataaacagttaagcgcgtactaaatataattattttctttcataacccttttatcctcagtggcttgcctggtcatatttccatagcgacatactgtacacattttgttaagtatgttgttgttgtgtcccttgcttcattggtgaatcaatgtgattgtaggttattccagatgctataggaggacttgatcatcttgaagagcttcgtcttgcttccaatgccttgatttctcttcctgattccattggactgctattgaatttgaggattctgaatgtgggaagcaacaggctaaggtcattgccagatagcatctcaaagtgcaggtagataactttctttagcttaactcttgggttcagcaaatgttactgttcaagtgactgattggtgcaactccaggtcattaattgagcttgatgcgagctacaacgggctcgcttatctgccaaccaacattgggtatgagctggtaaatctgcggaaactctgggtccatatgaacaagttgcggtcacttccatcatctatctgcgagatgagatcattgtacctcctggatgcacatttcaatgaactatgtggtctgccatctgccatagggaaactttcaagtcttgaaattctgaacctgagcagcaactttagtgacctgaaggatctccctgcttctttcggtgacctgctgaatctgcgcgagcttgacctcagcaacaaccagatccatgctcttcccgacaattttggtcggctggataagctagagaagctcaacctggagcaaaatcccctttctatgccgccaatggagatcgtgaacaaaggcgtggacgcggtgaaagaatacatgttgcagaggtggcttgacatcttgctcgaggaagaacggaagagcatcgcagcagcggagagccctcaagcaccgaccactccttcggcctggctggcacgcagcgtctcctgggtctccgacgtttccggaagccttgtggggtacctcagtggcgagaacaagacggagaaagatgcctacctggatcagcagtactgaaagcgctcacctgtgtggtgtttgtgcaccgtgtacatactataagcgttccatgcttaccatctcatctgggaaaatcgttttgtgttcctggtgagtcgagccatacactcgtgctaggcttgcatcccccaaagcaggctttggggtttattttgcccgttttaacttccggacgtccttttcatagcttcacttgttacagtattatattactttgtcgaataataatgtggagacaaatatgaccggagagtgcgctcaagaatatcaatgctttagagctttaggcctcaatgtttcgacctgtgcgttgtgctggaatggaagcggcggccgtgttagtacaggttgccgtcgccggcaattgtgattcacgttttgctcatccgtttcttggcaattgcgattcatattttgctcatcgtttctcgatctcctttctgtgtatcacgtgttttcaaaattttgcaaatactgtgttacacgtcgctatcgcgtacgagaattctcccaaaacccaatcactttcaacatactccccaccaacaaaaggggagaaaccgaaccagcagcaacgtccacgataatagcgcaaagaaccagacgagcaacacaagtttaatacatcatatagcataataaacaactagtaggtacggtacttatttcgattacacaccgatgattagaagtctttaaacaccactactggcactacaccagaccctctaaggttgctggcgagtaggggtagcacagcagcacgaacgccgcttttaactaggtaagctatttataaatatactacggtctatatcttggatactgcaaggtgctcaatagctgaacacgacgaggtcatcactggcccttctaggaggggcaaaaaagattcacggccacatgcttcctcgccgtccttggtgagcgccttgttcatctccgttctgatcagatgccctgatggggaaataagaagcaaaggttcagattaactcttacccgcaatgacaaaatatggtgcataggaatgagacatcctgaacttaccagttcgtgcagttcatcatggagtgcatcccattcgaggatgccacagagttcatcaatggactgctccaggttgtactcgttccgcctaattatttccttgttcaggtcgacttgcccgaagcccatctgccccagctctctcagcatgttgtcctccacggcactgatgtgatcagatgaaggctcggtaggcaggcaagaagcagcgcgagcagttgcagagggcattccaatggcagcagcaggtgcagtgggctcactgataggagcagcagcagctccgacaggtgcagcggtagtcgcactaacaggagcaggcgcaggtccagatgcaggaatgctaacaggttttggcaggggaacggcttgaggtgcaggtccaggcgtggcagcaggcttcgaagccttttcagctccagcagatgaagtgaggagatcagtagctggcactagcactgattcaaatgctctaggtacagaaggtacggcacttgaaacaagctcaggttccatcggtttggtggcttcatggtatagtgcatgtgcaagaggatcagttatggtgcttccagagtatttacccacaatatctgcagactgaatatttgcatcaacagaatgcttccattctgtgttgcttccttctgggggcatgttcaagtttatagcagcactctgcttgttgctactggttttgaccgggtgctccacctgcacatgaatttggaatccaaatgatcagataacaaaggaagtgccaaagccaatgaggacgaaaaagcaatctatggtggaacaaacctgaataaaaacccaaactcgctgaccaaacatctggccagtgggtgatgccaatctccagtacgacacgtacccaccaggctttgcaggtgtgacaaaatcaacaccaacatcgatctcttgatcaatagggaaaccatccaccgagatctgcacatgccgaatcagagttaacattttagtgcaatactgcctaacactcttgaccattcgttggtagttatactaaatacgaaaagggtagggtgtacccctaatttaactgagctgttgcgtgcaaatagatgtccaccaacccaggtaagacatgtcccatatggccacatggaagatccattgttatgtatgcgccaaatctttgtaaatggggttgatggtgccattactgttccatcagggacagtaacatccttaatgaagcggcaatcatgtagctgtcgaagatgtggaaagagcatctggttctgaaaaatggccagatgacagtcagttgacactgttctggaaatgttttacgagaactatatgatcatgaatttgaacaagttgctgctttcacctgattgaggtctctacatcgtctactcccaaaagatggtctgtctattctggtatattcattcacattgcccattcgagaaaaacaggtattgcataaatcataatcatctttactgcacgcaaaaaacaacaaatcatgttagaataatggctttttttccttccattccaattcaacttacgatgatgaactagaacaaccattgaactcaaaactcacatatttgacttgtagcgagaaccagcgataggagtgaccccacagccatcgcactgtatccatctatgcagtgtgtgctgcgccatgctctcgtgcttatcacttagatccctgtatgggcacctattacagctgctgccttcagaataaggtccataaagaccgactggtgagagattatctggcttggatgtgttacttttgcaggtgcatggagggaaatagtgaccaccctttaggcttctgtcagcttggagggactgaactgggtaatgggagagattctcaggcttagatgtgctacttttgcagatgcacggagggtaagagcaaccacccttgatactgcttttatcagctcggagagactgaagtgggtaacggggaaacagtggtggaggagggcatgtcgagttcaaatcaccaccaatctggccattaggcccaaaggactcagaagaaaggcctagttgtgtccagaaaagatcacttcttaacccttcaccgcaatctgaagcaggagcagaatgaacagtaggtgcaccatgaccaatgctagtaacttgtggcacagcagaggatgtaacagacttgcccttactttgggcattggtacttcccttgttatcaacttttacccagcctgaaagggtatccacataataaggatatcccgatacatgttcagcttgagctttgatgtcatcaagaagcacacccttaagaccaagtgatttagttgatccagagttatgcatatccagagggttcgaagctgaaacagccatgagctcagtgtcatttttaatattcaaacttcccaaagtttgtcccctaccactagaggagccagatgaaccatcagcagaaccactggaagactgcattttgctctttggtgccatcagtttagcaagccggtccagcaaatcagccaatgatggcgctgatgatgcagctttagaacgcaagtcatgtgatatttttgcaaggacagtgggaacttgttctggtacaaattttaaagcttcatcgatagctaatttcacctgagccaattgatcttccagagcagtggacattacagatatggaatccaatacctgctgttttgtctgatgtaccccatcactgctgctcttcaactcaacattaatcctaagagggttcagtctctgactaatggcagcatcacataaatcactatcatcatccagtatgacaacatccccatcctcatcagtataggtgagtacaaactcagtatctggattgaacttaaaagcactcgcaatctttgaccgaagagcagccagattaagatcaaagtgcggaccattcacaaaagcagtgaaccgcttaagagtgccaccgaattttacctgaaacatcaagcaaattaaaagagaaatagataagaataataatctagtaaaattgcacgaggtaaacttaaatagaacagtaagtggtttgctttgcaggcaagatgcttaagcaaatgataactcaattctgttcttatcttagcagctgatcaatgttgattcagttaacagtagcgtcaaaacacaattcacggaaccaaatctcagcacctgatgctacataagtaccaaaattacatggcattaatcagttaaggacgactgccaagttaagccgttgcatgttgagggaagtgggttgtcttctacactgaagagatttatacagccatatcatgcaaacctaaacagatttattcaaccatagcatgcaaaactggaacattcaacataccaacaaattacaaaggaacatacatcaaagtgatcaagatactctacaatcaaatccccatagcaagtactcttgtctagctaatcagaaaaacaaaaagccctgcaataatcttgatttcgaaggagtcctcacaataatcgccggcgttaaggactgatatttctacactattttacaatccctgcaataatcttgatttcgaaagagtcctcacaaaaatcgccgcgttaaggacccgatatttctacacagtttcacaatcgcaaacaatacagaaacgatctaatcctgggcgcccaaaaagatgcaaaatccatcctttcaagaacaacactaccacccggtcgcatcgctccacaacccagcacgggcaacagaacccactccccacctccctgcgacaaaacccccatgcgcgagcaaaccaagaacgcggcattcctagcacagaaacaccgcacccgcgaggagccgggaaaataaattaaaaaaagaaagaaaagaaaacctcaccttcacgacgagatccctctcgccctcgcgcgccgtcggcgcagcgtcccggcggcgagacatcccgaccaaacgaagccccgcgatggcgatggtggcgtgagacgaagacgacgaggcggaggggaggaggagaaggagacgggttgagtcaagacctcccttttaatccgtaagcaaattccgtttccttcgatgggaatggaagggattgggaggaggaaattcacgggctttcgcggggttttctgcgtaaattgtactgcgtcctcgacgctttttgggcccacctgtcagtgagaggcgggtgcctcggtggcgtgacaggatgaaaagggttggggcgttttgtaattctggaattagtttaagtgtgtgctcgtggttttgtactatagtgcttatctcattgtggggtccattggtcagtgggatcgtatggataggggatggaattataatattatacttgtgtaaataatccttgtaataacctaacggacgacctcacgagtcacgaccaaaatactcctccttgtgggctgtggcagcttgcttcacgttcaccgtcagcccgtcaccgatctttctatgacctgtgggccacagcgtgaatctttgtcttatccccgttttgcagcagcaagtcagcaaggacgagtgaatgaccattgaatgctgacgagaccctcgcagttgggaactttggggtgctgggttacctttacttgtggatgtaaaagtactacgcgtcgatgcctcgccttgacacggatgaactactgaccacgggaggcagcgagaggccgacagctcggcacccgccgcatctgcggcggccatccgacttcgccgaggcgagccgtcgcgctcgctgcgcccgtgccccggagatacgagaatttccttggctcggtcgcggtccagcagcacaagccgaaatccacgatgcgacggcgtggaaaacccgcatcagcaacacgccttttctcaggctctcgtcgtgctcgcccccgtctccgttccacggatgcccacgacaccccatccgcgcgcgtggcgcggcccactcgcgtagtcgcgtggatggcacttccaccggctctcgcctctcgcgcggccaccaccactcgcgacgcgggccgcacggtgccacagcccacgtacgttcccccgcacgcacgccacgcgagatcgagccgcgcggctcacgggccggacgcacccaccacgcgcgccaacgggcgagcagaggagaggagacgtgcgtcgtcgtgtgtgcctccgtgcgagacgatgtctgaatctgaacaccgatcctttgcaaaggttggggcaagttaacacgcccgcacgcttcggtcggagcagaaaagggcgagcacttggacactttgcacaggcatcagcttgggcgattaacggagaacaaaaaaagcttggacgattaacacactgcgtggtagcaaagcatgtccgtcgctgcgagcctttgctgcatgtatatatacacggatttttctttccagtgggactggaaaaaaggaaacagttcacagggcgtaaagtcctgtgattaaagcgaatacatgcccgtttcttttcgatatcttgagtgcacataataattgttttggttgttcttctagattagtatacacgtacaactgaacacgtagatgaagaaagcttgtgggcttgtgggctatggcatgatggtatatagtcttctccgggacctacaaaataacacaaatacacactcaactgagcataaaatgcaagaggtggaggtggttgcaacttgcatggaagcaaatgagtggacggtggcctgtggggaaccaaaagaacttcaccgcccaaagtagttcgtctaaggccgtgtttagttatttagacaaaaattttatatgtatacagatacacatttaaaatattaaacgtagaccaataataaaataaattacagacttcgcctgtaaaccgcgagacgaatctattaagtctaattaatccgtcatgatggcaaatgtttaatatagtaccgtattatcaaatcatggtataattaggcttaaaatatttatttcgcaatttacatgtaaactacatatgtgtgtgtccaaacatttaatgctctatgcatctggacaagcagctggacaagcagcatcaccgcacagagtcaatcgtcttagaattggacaagcatttttttacacgatggaaacggtttacatcctcagtaagtgacgaacgaaaaaaaaaaactagaacccaatgtatactaattacaaaattattcactgatatatttaattaatatggtataaattagacagaattgaataatctattcaggtcctgtgaccacacgaaggagtacgtagggacaccaatgtctcctacatatgctacaatgcacaaacacttcagtattttggtgtagaagtgaaagcatcttgaaggttactcatggctatcaagtctttaccttcctacacaatgaatctagagcaaaacatgcgatgaattaagataaactatctcgatttcattaagcagtcagctggtggacctgtgataaggagattaagatgctcgtatctagatccgtcctcagtgcagtacggctgaagttatgtcctcatagtatttgacatcaacatttcatctgcctagggaatatgagctctaatgctctcgagtttccttaagtggaatgccagcccaagttgttgcaacttgcaattgcaactgcacagcgcttgatccgagaaatacagaaggtccgagggcccctttgaatcgcagggtagaaaaaacggatgaataggaaaaacacaggattctgacatgaattgaagtgtaaaactgaggattgcaaacacacagtaaaaacacaggaatggtcgtttgattggagcgcaggaatcggatgagagagatagactcaaaggaaattttccaagaggttggagctcttgctaaatttcctccaaaatccacatgcaatgtgccattccataggaatttcataggatttggaaagcttcaatcctttgaatcaaagggccaaatagaaaaatttcctataggatttgaatcatatgaaattcctacataaatcatttgatttaaaggggccctgaatgtagctatgcagggcaatggtcttctgaatattgtattggctagaacttcaggtcaatacataggggaaagtttcaggcaaattttcattaccacggcccattattttgtgacaacatcagaagagaaaaggagtattctgtaggtcagtgcaaaatcgaagtactgataccatgcaaaaagaaaaaagaaaaagaaaggaaacaaaaacagagttctcgggactaattaagtagaagaacttttagattttgatgatgaatatactcccctttttttataagagaactgatgatgaatgtacctgaactggagtattcaaacttttcctccacatttttggaccacagttgatttccttattgttttgtttacaaagaagcactgcagcaaaggctccccaaatttattaaaccgcactcagtccactcaaccttggcccagctccgcaattagttggactggattgcacaactgtcaaatcaatgggctataatgaatttgttatgcacccacacacacaaaaatatgaaaagaatatcgccatttctgaacctgcacctgataaaaacatctttacatagttccagcttggtttatgtagtccatcacaagtccatttcacataaatattccggaaaaatctgtgttttctaaaagataatgagaatcccgccatttcagcctttcactcaacaggagctagaacctattattatttatcacattacatcgtatgtcgacaaaatccacaaaataacaagataaccaaacatttcaactcaaggaaagagataacataatccggaaaatctctcgttcacaagttgaatcgactaggactgaaaccccactcagtgacaggtaatatcttctaccgaatgctgcacaaaagagccaagtaaacggagtggattctaaactcgaaggagatgaaacaatattgttttaaaaaaaatctacaagataaatttatatgtgttaaatcactccataaacatgaaagctcaaatttaacttatgctcccttagattaagtttttttagaacggatgaaatacaagttaaaaaaaaatctaactgcgaaattcagcaaatttttactgaattttgctctcctcttctcacctctcacttgtcatccctaaaactctcctggtccccgcctcccgcaccacgccgtctccgatcaagattcttccctgatccccttgctgctgctgccatcaaatccttggacatttccagttgcaaatttagactcttcccccgcgattcccagcactcccaagtcccatccttcccgctgccccatcccatcccactatctccctaaccactgtgatttaaccaccgaggaggcggcaagaatcgtgtccagctccgcaccgttgttaggcgggagtggagtggactggttatcgtccacgcaagacgacgacgacgacgacgacggccggagctcgccggagcatcggtgtcagagatgagggtcatgaagctcggaaataggccggacaccttcttctcgtcaggccccgtcaggtagttttgtagttttgttcttgttcatcgactgttacttcgatcgtttggttgtcgtgtgaatcgttttttgtttgatcggtgttggtgttggttgcaggtcggtctccacggatttggccactgacatgcagattcttgtggatggttgcctgtttcgtctccacaaggtaagctgcaaagattttcttgtggtttgcgtcgatcaagaactgaattttttttctctgttttttttttggtctgttggatggaacagtttcctttgctttccaagtgcatgtggctgcaagcgctgtgcgtggagtccggcgacggcggcggcgccgtcgagctgccggctttcccgggcggcgcggaggcgttcgaggcgtgcgccaagttctgctacggcgtggccgtcacgatcgggccgcacaacgtcgtcgccgtccgctgcgccgccgcgcggctcggcatgtccgaggccgccgaccgcggcaacctcgccgcgaagctcgacgccttcctctcctcctgcctcctccgccgctggaaggacgcgctcgccgtgctccactccacgcgccgctacgccgcgctctgcgaggagctcggcgtcacgtcacgctgcgtcgacgccgtcgcggccctcgccgtcggcgatgcctccggcgccgttccggccggttcgtcttcgtcgtcgccgccgtggtgggcgcgtgacatctccgagctcggggttgacctctactggcgcgtcatggtggccgtcaaggcgaccggcaccgtgcacgcgaaggccattggcgacacgctcaaagcctacgcgcgtcggtggctgccgatcgccgccaagaaccaccacgcggcagagcgaaccgccggcggcggcggcggcggcgcggccaatgccgagcgggccaccaagaaccaccgcctcctcgtcgagaagatagtgagcttgctcccggcggagaggaacgccgtctcctgcggcttcttgctgaagcttctcaaggcggcgaacatcctaggcgcttctccggcgtcaaaggcagagctcacgaggagggtggcgtcgcagctggaagacgccaacgtgagcgacctcctgataccggcgccgccgccgtgcgcgggcggggtgctgtacgacgtggacgccgtggtgaccatactcgaggaattcgcgctgcggcaagcggcggcgtcggggagcccgaagggcagcccggcgcgcgcgggcaggcaccggcgatcgatgtcggccgagagcggtgagctcgagggggcgcgccgttcgacgtccatggcggcggtgtcgcacggcgcgatggtccgggtggggaggctggtggacgggttcttggcgatggtggccacaaaggacgcccgcacgccgctcgacaagatgatcgccgtcgccgaggccgtgccggacttcgcgcggccggagcacgacgatctataccgagccatcgacacatatctcagggtgtgcatgcgcgcgacacttgatcacgccgacattgcctcgccatgactaatcttagaattcttgatctctctctcaccgtgtgcctttgcttctgtgccacgtgtaggcgcacccggagatggacaagagctcgaggaagaagctgtgcagggtgctcaactgcaggaagctctcggagaaggcttccatgcacgcggcgcagaacgagctgctccccctccgcgtcgtcgtgcaggtgctcttcttcgagaacgcgcgcgccgccggactctcgtccgggcacggcaaccgcgtcgccgcgcgctttcccggcgacggcggcgacgtcagtgcgctgcttggcactggcaggccaagaacgacggaggagaacggcaaggacgggcagagccccgccgccgccgggagcgtggcggcggacggcgactggagcgtggaggggctgaggcgcgcggcgtcgagggtggcgacgctgaagatgaggctggaggaggaggacggcgaggacgccggcgacgaggcgttcgtgcataggacgcgcgcggggttggcacggagcgcgtcgtcgcgtgtcacggcggcggcggggaggtccaagcggatgctgagcaggctatggccgacgagcagaaccttcacctaaggggcatcaagacacttgagcaaagctgatccgtacataccgtgtacaaatatgcttgaatttgtaagtaaaatttgttccctcgagatttgattttgttccaactagttcttgaagtttggggaagttgtgtgcacagatatgactgcgtgtacactccctccatttttttaaaaaaaacattttgtaaggacgaatatgaacaagggtttatccaaattaatccctaaaaattaatttgttttggacagagcgtgtacatagttggtacagagacacatgaagctatccttcaactgttaaaaaagacttattgctcttttgttgcaacacactacacacccaactcacatccttattagctactgcagagacggaaagttatactttcatcttaaacgaaactcttaaagtttatactctcctaatgcaagatacagaacgcggctaacttaggtcctgattgactggctacagaggcagagttgcagagacaggagaggccaccagtgggaagcggattctctcccgtaactttccttgacatggtcactgacatatgggcctgcgagcgctggcgctcacatgctagtcaccacattcctctaactttacgttagagcatcccaatctcgacgagtgacttggcctgtcttgtgtacgtcaatacactaaagttagtgtatcttaagcaaattttgaaataagaaaaaactaattctattgaccccctcaaacatatatatgtattgagtttttatgactccgtcagtggctggccgcggctgaacagtcgcaacattttttctgtctttggtcttgatcgactcggatgattgcagctgcagcacagccgccacaaaattttgtctcaggtccaggtcacctggttctggttggcgggtgctgtaggcgctgcgcaggaagcacaagcgtgcagggcattagacaacgcctgtgtttgatggcaaaatttccgctatttttttaatggcaaaacatccttgccatctagggagaaaaagaaaattttcgtatcttaaagcaaaacgtagtgctaaaaccatggtttgatacggaaaacacgtagcgctagcgactgatatccaccaccaacaacatcttcttggccgcttgcacaaggtggtacgcgcgaccgacacgtgtgtcacaatctcaggctgacatatgaccatattttcaacatgcgcaacgttatcaatgatcataggccaaaggccagtcgtaatccgtcgctccaaggattggccatgttttagcacaggagcataggacaggagtgcacggtcggccagtcgctgcctcactccagtgcgagagggagatggacaagcacactgcacacagccgtggtcctcctcttgtcactttttagggtaagtttagttcacgctaaaattaaaagtttggttgaaattaaaatgatgtgatgaaaaagttaaaaatttatttgtatagaaaagttttgatgtgatggaaaagttaaaagtttaaagaaaatgtttggtactaaactcagccttaataggtttatcccgcattctcagaaaaaatcgttgttccaaacgccgaaacaatttcgatgtgagggtgaggctacgataagactacagagctgtgtggtatccactcaccagggaatcaaaaaaatctcgcggtgtcaaatcaaatgaacctgatgaaatcgaaactgctgttacaaattgttgtagctgtagcctgagcaaagaaaatactccctccgtcctggaaaaaataaatctagaactggatgtgatatattgtagtacaataaatctagacagaggtacgtccagattcatagtactagaatgtgtcacatataatactaggttagttttttatcggacgaagggagtagtatggcaaaccgggagcagcggctgtagacttaggcaatgaccaacgcatggtataaccccgtaaaaatgtgatgttaagcgggttgaaactacacttatgatatccctcacacagtgcgagccatgccctatcttattttcgcgatacagtacctgttagacagtcgcattttacatttaaaccttggattatttttatttgcatatacgtccaatatttgcagtatacctctaaaaatcacaatcatatataagggcccacccctccctcttctaccacctttctccttccccggcggcgcgacctcccctctcccgtggcctctcccctctctctcgtcggagccgccgcctctctcctcagcgcctcaagcagtggcggtagatcaagcacaatggcggcggatggaggcgcaagaggtagggatcaaggcggtgccggcaaatcgaagcaacaacggcgcagtttcccgagtatgcccttctctccagtccaccccctcgccatcttcttcccctgcgcggggtgacgcctctccccaacgcggctccttgcccgttccttgcccaaagctgatgaaactacacggccctctattgggcatcgtgacgctctgcgagggtgcggtccgggccgagctagcagacatatttggctttgggaggggtgagaccacactccagtgtggagcattggccgtggccttacagagatcctcctcaagagacgcggttacgtgagcccaccgctctcaggcccacatgcagaggcgaagctacaagtacatgtaaatgtaatatgtagagtcagctgactccataggtttttgcaaaacagctaaaaagctattgatatttatgttgaaataatataaaacttaaatatatatatatatatatatatagctttaacctcataggttttagttgctagctctgtcactacccacatgtcagtaacacattgaggatttgcttccggagcagcgggataaaatacgatggtaacagctctgctattgcggctttatcaaattggttcctatctagaaccactccataaaccggctaaatttaagaaaatcaaacaaatttttttattattttgacaaaatgtctgagaatttcagtggttttggccggtaatcgaggagacgaggaagacaaccatgtacgcgcaagacgacgttggcgaaaatttattcctgtgctcgtcgtcggttgacggggtcacgatcactggcggggccacagggagcgaacgacctcggcgtagcacgcgacgacggcggccagtgccagcacgagcagcgccaagccgacggcggccggggcgctctcggccgcccagcacgccatgctcaccggcagcgccatcgcgaacggccacagcagcagcacccgcgcccgcgcccccggcgcgccggcgatgcgccggggcttgccctcctcctccgggagcgcgcacagcgcgagcagcgacgtgaagacgccgaagctgaccacctgcgacgcgaggacggcgaggaggacgtactcgtcccgcgccgcgagctgcgcggcgaaggcggcgcccgccgcgaggacgaccagcgccagcgcccccgtcgccaagggcggcgacgcggtggtgccgcagtcgcagcccgacgacggcttctcgtctgccgccgccgcggacagcagcggctgctgcttctccacgtcggcgaccgaccccatctctgattttgcttccattttacgcacaatggatgattggatgctatgctagcttagctgcactgacaaatccgtgaaataatgcaattacatagctggctatatagtctcaatagtaaaatgaaacaaattcattttaaaaagcagataagctcagcagcgtaagaaccaagaaaatcacataaatattaagccggagctttgatcaaccagcgggctttacaatgctgcaactgcaagagcgtacatacttctgagtatcttaggcggccgctggaaattaattaaggaaataatgacgtcataattagtaagcactataaattgtggctccaaacgactaaccaatagtataaattaacaagaggaacattgttatggttttggaacagaacggtctctgctgtacagtttcaatgaccaaacactctgcactcttacaaagaaaaggacaagctagataaacctatcgctctgtggttcactgtgacagtgaatcagtgatgatatgcatcatgatacataaataattaccaacatagagtatgacaatgaaacatcaaaatcgacaatgatgaaaagcacctcaggaagtaactaagcacatgccaacaaaggccctctttactctatgcaataaaaatgatcttcagtgctacctcttcagatgatacttgcagtagtaatggaaaccaggaccacacaaagtgcagacactgtgatgctgtcaatgacaagtaagctggccagggtgattaactttatccagtctccactttgctgggcaggacagatcattaagatgcgttatgcttagccttagccgttagtgacaagtcacaagctgtctaatcttattgttatcagattaataaagatagtatgacaatgagaaaaccaaataaacagagtgagttctgatatagccaagccgaatcttgagagttctagattggaatgtttgttgtcgggaatcttcaaaacagcatgtgtttccttcttgtcaaaattacaggcatacgtccacagatgaactgagaaaagatggacgtctacaacttgggcaagaacaacggggagacaaaatgtgagtgccacctgatcctcatcgccagatacgccaggcttcaaaatgattatgttgcactccagtcagaaaatggccaggcaatttaacatgatattgcacacatggcagaggttgagcaagtcgttcaagcatttgattttcctccttttttgaaggcatgaagtatttgaactgatctgctctatctgcccaaaatgcctctctgcttaatagatggctcatactttcgcagcatctgctgcagccagtcgctcatcatcaatggcacgctcgtcttcagtggtaagaccctcaatcagtgagatgtatgtgctgtcatcaggggtgatgccattctccaccatctccttcaccatgttctcagcgtcatctccctggccattcttacagagcccctgtatcagcgcattatatgtcaaaagcgttggattgaaccccttattcatcatctcattccgaatcctcagagcatccttgacatcacccttcatgctgtagccactgatcagcgtgttataagtgacaaggtctggctggattcccctctctgtcatctcatcaatgagcttgcgcgcttcatcaacacgtcccagtagacacagccccctcattagcgtattgtaggtcacatcatctggtgcgatccttttcttctccatctcacccattatctcgaaagctcgatcgatgttgccagaagtggagtgactattgatcagagcattgtacaagacaaggtcaggcctaatgcctctccttacagcctcatcaaacagcttatctgtctcctgaacttgccccttcttagacaaggcatatatcaatgccgtataggtcactactgtcgcacggacccctctcctggacatattctcaaaaatctctagtgctttcttcacgttgccctctttgcaatgcccgtttatcaatatattgtacgtgaacacatccggcgcaagaccctttccacccatctcctcgaccaactcatatgcctctgttccacgcccatccatgaacaaggcgtgcacgagtaaattgtaggtcgcgactgtcattgcgacccctctctccaccattctatcacggtaaaggagcgcagtatccagcttaccctggtcacagtatccaccaatcaaggcgttgtacatcacagcttccggtttaacctctcccttggtcagcatttcgtcgaacaccttcactgcctcatcgacccggccaaccttacaccagccagagatcaccgtgccgtaggtgtactggttgggcgcgattcctccgcgttctcgcatctcccgcataatatccagcgccgcctggacgcggccccgggagcagaacccggcgatgacggtgttgtaggtgacggcgttcgggcggggcatctggcggaggagctcgagcgcgcgggcgggcttcccggcggagcagaggtggcggagcatgatgttgaaggtggtggtgcagagcgggaggcggaggcggaacatgtcggcgaagagggcgaaggccggggcggaggggagggcggagaggagcgggtggagcgaggcggtcgagatggggagggatagggacttcatccgcgagtagaggcggagggaggtggcgtgggggcgcacggcggcggaggcggtgagcaggaggttgggcagcgaggacggcgcgccgtcgaggtgcgggagcacggcgagcggcgagagcgccttgtccgcggacagcaccgacttgaagagcgcgagcgccgccgccgacgtcggcgaggcgcgggcggccgccgcgacggcggcggcggcggaggtgggcggcgccatgtggaattggggacttcggaggagggtttttcgtgagttttctacagagttgggcaatggtattgatttttctctcagcagatcgtctaccaaaaggcggtcccacatgcagaggtacagaaactgaacaagacttcaaaaagaaagaaaaaattgaacaagacagagagaaagaaagaagaaaataaactggaaaatgtcatgcagcggcttacatgttacaacaacgcataaacatggttcaaacgttacaacacataaacaaggttcaaaggttacaacacataaacatgttctcacagaacattttcaggttgagatgctacattttttttcttttttttttttttacggggaagagagactactatacttactgctcggctacatagagctggtgttaatacgcaaatccatatacaaaattttcggagatcagttatatgaagggttgaccactccaaatttcgtcactcttataaaaagcgctgcagctctaaaagagtgttgcagctcactagagtggcgaaccctagaccctaaaccctgaaggcgtcttcctgcagcaccgctgcttcccacaactcctcagagcatcacttacgtgtgatccccatccacccagccgaagctttcctgcgacccgaattgaaaatcctattgcaagaaattcaattcaggaaaggcaaatcagattttgttcttaaccgtaacaaaatataagtcagaaaaagaaaggagtattacgagcaaagcacacttacttcccagctgaaaaggtccgtttcgtccgtgtaaagaaaaggcagcgtgtcatcaagagttgggacggggtcctccggaaactcgcagcgctgcagcagatcttcgttgaagtccccggctgttgacgctccagcagaacaccctgcacggtttccagcttctaccatgggccggagagtggatgtgctgcattccccctcctgtgtaaaattcagcaatgcaacagcatgaagtattgtcaaaaaaaaagaaaaaaagaaagagcaattaatttgtttgccctatcctcattatcagtagcatggcttacctgatcatgtgaaatggtgccattctgctccgtgtcacacgggctgttcatcaggcagcgaggcagcggagggttcgttatgggtgtaatgggatcacttcttatggtcagtgcatcagatgcttcttcagtaacagagtccatttcaggcgtgccagtttgcttggaggataattggtagaataccttggaaacaacaagctctccgtcctccccgccttcttccacaccaagattatattgatgcataacccaattagcttgtactatcttgttctttttggagcctttgtaaagaaccagtattttcttccatccttttaagacaccgttatggtaaatctgttggattttccagttttgtgccatcttatgttctcgtcagaagcagcatggccggtgtggctgatctttctacgcttgcgctgaccagaaccatatgcgtttgatattctgtggaagaaatggctgctggtgccgtccagcttgatacctgacagaattacagaggaatgtatgacacatgagctaactaattactactagttcaaaaggcctgataacaacttaaaatatataatccagtaccggggagattttcaggatgtgtatagcagattccttccaccttttctagagttgggatgaagtgatcaataagaccctgaggccctggatttcccaggttaatttttctttctaaatgttcaagtacttcaagatcagatggatcaaatttaacaccgtcagggaattctggccactgtaaagtaacctgcaatgagattttttatttagcaccaacaagaaatgcatagaaaatgtgaaacttaccctactgatatttctgcttaaagccaacctcgtcatacccaaggcaagggagccacaagctttgtggattttatattgaaattgtgacacgtgggagccaggacaataggaataaagtgtagcacacagcacagtaatgagcaaaacaccttttttagtgaataatgaatgatcataaatcgatttagccggaaaaaaaacataaataatagttactcctaatcatagtattagtaaattactaatttacccccaatataccggtagtataatactaccagtagactgatagtataatactaccagtagagagcaccagagcatcgctctttggaagtaatgttgtctagtgttgattttctacacacgaaactttaatggcaaaacatcatcagagtatcagacaactgaactaaaaagttaaatcaagcattcataagtacaataggtagctgaacttacatcgctattatcaatgtgacatttgcagtttgggcattccctccatgcttctggaaccaattctccaagtttacaactcagaagctgagttgcatttcttatttttgtagcaattacctttccaccagctataatccatggcctgcagtaaaaggcagaagtgagacatgttcatcataacaaaaagtcccaacttatctcaaggacaatctatcgccttgtcattcaccaaaaagttcagattttaaggttaatcagcttaacatagtataattgtgctaagttacagatatggaaagacttcttctacatatacggaacttagtctgaacttctagatatagtgacacgcactaattggttcaacagaattaatagcaactaatcatgaatataacaggggttaacataattaattaacaaaccgtacttcgtacagttactaccttgtgccttgtgcatttactacaacaaaaatggtaggagtaagattaaaattaacagctatctaattcagatgtgtcctaggcctgcatgattccaaatgttgagcacatggatggtagcacactaactagtacttagtctagtactacttttggtctccacatcattcgtcatgcaatgctgttgttggaaattcaaagattgacatatctccactctgtttgactttccatgagttccattccctcattccctgctttctgctatagattgctctgtttcaagaaaccaaatgtaaatggacagagcaatctatagcagcgaatggctatatgcctcaaaattttaatggtttaactgcaatccactttggatctgcttacttccctaaactgttgccacattactctccattatgattggctaggcaagggtccaaaagaacagggtaattcaccataggctccacagctcatttactcactgatccagtgttctaggagtactacaaacgtatcgaaatctggaagctgagcccttcaccttagcagctgcaactgtaacaagcctgaccatcagcaacaataagccttcacttagcagctagaatgctgaaaaatccacccaaaccggacattcagagtttcagacagcgtaaggtttcatccaaaatcacattctgacagcgtaaaatcttctgtccatcgattctgaacgccattcctgcaccatcacccagaccggtggcaatccaatcggcaatcagatgacacgaatccgaaatcttcccctctgttagcaacgagcagctgtgaacgatcggaagacgacacatgacccagtctccatagaacagaagcagagtcttcctcctctgcttgtttcttggttgcttccagcgtaagattccccctcaaacctcagtaacctgcaaaaacccccacccccgcatgcaccatccgagaccgctatatccaccgatctcatgcattccggccacgattccatcacgccaccagtaaccagctcgatctccactcgagccacacacaagaatccaaagcgatcgatccccccaccccttccaaaaaccccaacaccagaatccacctctcaccgatcagaccaaccaccactgcattacacctcctcaggtcaacccggaaccacgagccagctggcggaggcgaaatccccaaatcgatccgctcatcagacacggaaaagagaagagagagaggattaaaaaaaaaaactagcccttgcgaacgaacagaagaaaagcgaaggaagaaaaccacccccaagaaaaaggaaccgattaaaccaaaccaggccacaccccgatcgatcggagaaacccccacccccgatgctcaccttgccatgggtgcggcgctgcgacgggagcttgggctgggaggtagagagcatccgaggggggagagaggaggagaagcgagaggagaggaggaacttcttggcaagtgaggcagaggccagaggggggagtggccaaggaagccgggggtataaataggggagcttgcgcgagccagcctcgttggtgggttcgcgtctggaaagggttggggtttctttggctttacccatcgtccgacgaaatccaaaccaaaaccatccatcctgttcgcttggcgggaaaccgggctcgggtgcggcgcggtgcggacgtgcggtgcggctagcccgctactgccttactgtcgcctctcattcagccattctcatctctaattctactgtactctctcaagctgcctaccactacctaccagtgaatgtttcttcaggatgtgttacggccgaagcagctgcagctgctactagcactcttttggtactgtagcgcggttcgatgttttgcagccacaaccattgctactactcctactaccaatcactcccattgaattttcgtgttaaaaatctctgcccacactttgtacagaatccatgtaatctttccacacagggacatgaatattactgtgccactactagtcgttcccatcagacagacacgaataacgctcatcagcactctcctacaggcgcacgtatgcggtatactagtatagtactactatgcgtctatgcggcgagtgttccacgcttccttgcaccggacaaaagcccccgcccgccttggccattggctaggatcaggcacacccgcggtcgtggcccaatggcaatggccggatgcaggagtgagtggggcccacgcgcgccttgtcctttttggttcctgggatgccgccacgtccacgacccactggtggcgcgccgcgcgctcactctcatcgccctgtttttcttcctctccaagccaaagcacgcagccccacactcccgcgagggagggacccagcagaaacggaaactcgcactcgcgcttggtggcacggcgagagctctctcacgtctcagcagccccagccccgaggccccgagcgaagggaagggaaagggaggggagtagtacgcgctgcgctgtagccgcgtgctgcagctggtcgggaaggggagtagccgcgagctgcagggaaggggagtatgcgctgcgctgtagcttggctgtcttggctcggctcgggcgttggctacttgacttgactcgcgcagtgctactacggtctacagtctactgcgggctttgtgtcgaaggcccctgcgcgcgtggacgtggtcgatccaggcgtccgttggatctcgcggtggatgggtggtgcggatcggagagatcggaccacgcaccgctcgctcgttttgggcccatgcacgaccacgtacgccatgttcagaggatgattggaatcagctgtgtaccgtactgtatgtcacaaggaggcggcgcagtgactttgtgacccaccggcaactagcgatacgtattgttgcatgtgccagaagcccagattattcagtgcatatacggagcagcgtatacgtcttaagtgcaggcctgtcgcttgtgtgggcctgcttgggccaaatggagggcccaagtcgactctctttcacgatgagataagcctatgttttctgcccatacaaaagctctgaaaaaaatgcatctttattgccgcgacataggtcatagtacatgtgtatgttttattgccgcgaccgcgcgacgagctggtaaatcctctacagaagtacgcgtacgacttctactgttgcgacttctgcgcaagttcataccactgccaagctgcaaaatctactctactttctagtgctcctattgcactttgtcgtcgtagtagtacgtttacttatctagatcgatatgccagctcatcgtcctaatgaaacatgtagggctcctttgaatcacatgattaaaaaaaagaggaatagaaaaaacacattattctgatagaaatgcaagtgtaaaacaattaattgcaaaacacagaaattaccgtttgattgggctgcacgaaaaacttaggaatcagatgagagagataaacttagaggaaattttccaagagattagagagcatgttaaatttcctatgtttttcctctaaggccccctttgattcaaaggaaattcatagaaattttagaggatttcattcctataggaatttttcctataaagccctttaaatcaaaggaataaaccctatggaatcctatgaaattcctatggaatgcctcttctcatacaagttttggaggaatgttaacaagaggtagaacctcatggaagaaatcctttgagtctttatctctactcaaatttctgtgtttttcctgtggtccaatcaaacggtcattcctatgtttttcctgtgttttgcaatcctctattttacacttatattcctgtcagaatcctatgtttttcctattcctccgtttttttattcctgtgattcaaaggggccctaaaatcgtagaaatacgaaagtttccaccgttttttcttttctcgttcctacgaatcagaggcataaatagtgtatgatttcaatttctttgttttttcttcatttttcctcaattcaaaggggcagtagtattttctatatagtttataatgaaggtaatatctcgctgcagtaaatgaacagaggaaggctcctacggccagagcaaaatccaacggcgagaagtcccacaggtgatccaacggagtagtagtacggggacatgccctgatgcactgttctgatgattggacgtccgggctctccaacgacgagcccgtacattccgccgcgtactgatacagtgtcgtctccaccgcccatggccggaaatcgcgagaccaaatgatggcgtagcctgcgatgagatctcgtcgacttgacgggttgacgagacgacgagaagatggcacgcaacgctatcgcccaccgccgatccctcgagcggtgtccgggtttccgacaggcgcaaacgactcacgacaccacggccagtcgcgagtcaggtcaagggtcaggtcaagggcctcgcatgctgatcaatcgatcggttttgattggactgattctgatatgcgagattactcaaatttgctgctcggcacatcgattcgtcgcaagctcccaacattcgcaattcatcggaggatttttcgaaggaattctatgaaaaaataaattaatttatgtgaaaaatctctgtaaagttcccgtgctcgaaggaaacctgatatgtggcctcaagccctcaactgtgtttcctggtcagtggactctcggcgggtctaccaaaaagggaaaggaagaacagcgacaaataaccattttgtggctggccaacggaaaaaacaactggctacacgagtagtagtagtatccatctcaaacctcttgttgatttgaggcaaccagagcacaatagaacaccgatttgctataccaagtacggagtaccaataatagggtagtgatcagagaatgtttcactgaccgcttcgcccaactgcccaagtcctccaagcctatctatagttctatacgcaatataccttgcccaccgataatagaagcatccacctgtcgatccagccaggccgggcctgcagacagcgagctgtttgaacctagcaattcactaccaaccagctgctaaaccacttggagaacaggtcaagagacggtagattagacgcacaagaaggaataacttagctcaacttgggcattgggttgtgtacttgtgtgtgatattgcctcggattgaccacaggacacataccagacaagcgctcaagtcaatgatggatgaagaaacagaagaagtgctcacgcaatcatgcggcaatttccaacgacggagcaacggaagccagagtttttggtcaaccagaaattggatgcagccatcaaagaaaggaacagaacaccaacgcgaaaaagaaagagagaataaaagcatgtgtggattatctgcagggtaatgctagttctacagcatataaatctgaaatctcacttgattttgcaatctacagcagttctcagtttatgtatcaatcagggaagtaatatgaatgacaggtgaacttgtggtggctaccacagggtaatgagctcctctgggaaggtaaccatgccacgaccgagcatacactatgctgtagcctgtagggtcgtccggtgttagattgcacagtgaaggatgatgaaatcatccatagccactcatcccaagcaatcatccagctaagttagccaatcatatcagatgcaaccgtcacggccagccaatctcggaggtggagaacatggcagtgacaggcctgcacatcagattgaagagtgtagatcatcaaaatctacccactttctctcctgcagtaccctgggagaaggtatctgtaccgatcaacattctgtagcagatagctaggaagatgaacagcagaaaatgtgcttggaatcggccccaacttggcaatgatctcttggaacgtgtactcttcaggaagcatgtcaaaaagatccgcccctctgcatataacatcttgaatcctttcagggttcaggaagtacttaaatctaatccgatcgacatggctgtaagcttgcattttgaaggcaaaatcactaatgtagcgaaagcaaaaactgcagtgccaccctgaatcagcaagaagctcatctgtctgccggaagtgtgcatatcttgtcttcccagacctgtacctgtgtatcgatgccctccaacttttgtcatccaggaaaaattcaaatgagtagaggtaattcctaagctgaagatgaaggatctcaggaatgtcgtcgcaccatctcaggagatcaattgtgtggccacttgggatttcatcaacatctgacatgatcaacaggtcatcatcttctatttttgcaatcttaataagctggtccagggcaaccctctgatatgactcctcaacaaatgggttttctcccttcacgaaccttcccccaatcataccatatgtcagccgtgattcagcaaatccaaatcgatgacgattttccttgaagtgcaggggctttttcaatccagtgaaggttgagttcgactcaagcagcacaaactctgagacataggggcttagttcattccaacgtatttcaagaatatcgagctcattgctgaatagtacagcatcgaagacacgtcgtggggtctcccggactttccacccatgcaacttgcagagtttcgccatggtgacattctcatggtagtaatgagggatagttttgaagggcttgggaggagactcccatattggcctgaggaagtatgtgaccttctgaccatgagcatatatcattaaaattagaattggcactcctatcaatagggccaatagtgctctgaaatcaaatccccgaagtgcacatctcagcctcgacatggtcagaactgcctttgacgcaggctggaaatgaattcacaaagaaaataagaaatcaaacgagcagtagtggacataaaagagttatgaaagaaataagaacagcaaccatctgcatgccaactgctcctccacaaaaactatttaaaatttcagtatgtgcatatattagcaatatttattcctaacgcgggagcaaagtgggcaataaggccataatcaaagcctgcttgccaaaaagatataacctcatgaagcattcgctaaacattagcttttcaaaatacaggtcttgttacagtcagcaaaggcagcatctgaaattcaccggtaactcagaattccactacaaccgcaacaaagtagcaaaggacaaatgagagacctaatgccacagctaaaagcacagatgcaaaaagccaaagacaatttcgctcgtgaagatcagcaaagccatgtaaaaaataggcaacaggaacctggaacaataggtaatcgcaatgcccagctataaccaaattaaactagcttcattaaccaataacacgcaccagccatcacagaagccggtaagatacctaacccaaattatgcagctttaatgggtaaaccaaaaggggtaggcatcccaaattccacaagcttgcaagagcccgaagctttcgccgcacaaagccacgatccaagcaagaaagaggggaagtcccaacctcatcgaaagaaagattctccacagttcgaaaatgccagcacgaaacacgcggttcggccacgtcgcgagattctaccaccaaaaagtcgttactcgttaagaatccggactccatatcgccacccacacctacctaatcccccccatcgcccgcaacggggcagatcgagcgctgcagataagcatgggaaagcaaaccgcccccaaatccgagcaacatcgcatccaaaactcggagcatatggcaatcagcttccacaaaatcggcccgcgtgcggagacggcgacagcgagagcgcgcgcgctcgccgccgcagaccgaacgcgcggcgcgcgtctaggggaatcgaaggaaccgacgcccgcgacaagcggagcatgtctggaccgacggggccatggggagggaagggggaagggagaagggggggtagtaatggctcacctcgccgcacacgccgtcgcagatgccgtcggtcttcttgtggccgtagggcccggtctccggcatggcaggcgcggcctcgcgccagcaaagccccaccaccaccaccagagcaaacgaatccgagcaggagagaaggtcctctccaatggcgaggagggcggggcgcctcccgtggcccgggggtcgccggcgatcgccggtggcggcggcggcggtggttgggtgggggccttgttccgatctcgccctcggagggagggggaggcggacgcttctgggcgttgcccgttacggtggtggcgagttgtgtaattagcgggggagtcgcggggggtcgtgggcgcaaaagcgtgggggcgcgttttggaaccgcctaattatagccgttcgcgtggtggccgtggcctctgcctgcctgcgcctccctcatatccatcgccccggtggtgggcggtgcgtgcgtggcgcggtgcggtgcgagctgggcagttttgtcctcacgcacgcttgggtatttttctagggacataaattaaggggaggccaattaagcgtattgtatatccgtgccatagtcctgaactctgtgtagactctaatgaaaatgggaggctttgcccctcttgataaaaaaaaagtatatccgtgccataatacttaactattttctccgtcccataaaaaacaaacctaatactagatgtgacacatcctaatactacgaatttagatatatatatatatgtcaggattcataatattataatatgtcacatttgttactagatttgttttttataggacggagggagtacgttctttattgcataataagttcatttatgctcattttatttattttaaaataagttaatttttgagtaattattgcattataaagtttgtgagagtgaaaaataaatatatagtagacaaaatgatgaatagttgtattaggatttgataatgtagaggtattgtattttttttattttgtattggtatgtgtgggggtgaaaaatgaactcagtttgagacatatgtagtactccctccgtcttttaatatgtgacaccgttgactttttctcacatatttgaccattcgtcttattcaaaaaaatttatacaaatgtataagatataaatcacacttaaaataatatgagtgataaaacaactcataacaaaataaattataattacgtaaattttttgaataagacgaatggtcaaacatgtgagaaaaattcaacggcgtcatctattaaaaaacggaggtagtatatatctaacccatataccaaggagaaatatagtcagagaatacttataagatatgtgtaattatacactacattttcaacacaaaataaatatttaatattatatttaagaaaattaatttgatattgtagatgttagttttttctatcaacttaatcaaacctagaaaaatttggcaaagaaaattaaagcgacttataatatgaaacggaaagataccttgcaaaatataatcaatgttatatcatgatcttttttgatcataataaatacacacatcatacttatacacatgctgaaccctcacccttattaaaaaaaactttaataaaacagtaccgcaaataagttcgtactccatttgtcctaaaaataatcaaatcatagttatgaatatggacaagtgcttattcaggtttatagcgagcatttgagtttttttagacagaggtgtaggtaataagattaaattttagtggataaagttgtatacctatggtttctcctgatcagcataccatagtactttcttaggttaatattagatattacttggccatgcaaatgacctgtattttggacagctaatcttaaatatgaggtgtgtctttgtaactataatatgccaggttacatttgtactccgtattagctaatcatgtaaggtttatatagttttgagtgtattttgagacgacgtctataaataacattcttagcaaagaaaaatctttcctcacaaagaaaaaggccttctacttttactgttatgacatgaatggttgccaaacgagctacctcaagcttcggaatccaactcacctcaaagtatttgcagtacaactcatcatctttcctgcaaaggataagataaagaaccgcaaacatcacgagaaaaggatatgatatatatatgcaattatgagaggccacccaggtgagatgccaacgtacaaaacggattgatctttccatctatattttgtttcttctcctaaccaatgcatcatctacgctacaaaaaaaaaaaaaggctcttttatcactttcatcagctagaacaaaccatcgtatacacgacgactccacctatctcggcagcatcacattcggagggcatctttcccccaaagcgcccgcgaaaacatgcgtgttcccaacacaactctccaaagatgaattgatcacctgattcccttttggcacaaaattcctctaccacagtatcggcaaatctgtctcgttcaacgcttgcttttgcttactaggccgctattgcaatcgctacgttctcatccactatgcacagtagcaccatgctcctactactgctgtcctagccactacaactgattactctctctatcccagaatatagcaatctaaaatcgaatgagacgtattctaatactacgaatttaaatatgaggtatatccagattcgtattccatctaattttagtatgctacattctgaacggaaggagtaagttttagaagtgatcttaaactaatttaggtgcttttgtagaagccataatctgctttgcttaatcgtttttttcacttctaataaaccttagccataatctgctgttgcgtcggcctcgtcatagccgccccccctccccccccacgttgcagcaaacatcctcccctacccctccccctagtgccctcttccctccacgatccaaacctggtgctctcccattgttcttgggtttgctggtgctattctcatatcaaaaccttctcatttccggcatgctcaacaattggtccaggtgtttgttccaggaactgtgctcctccagcagcttggctggtctatgtcccatgccctccggcgaggtcgcggttgattctctttcatctgcaagttcccccttggccattacccttttgtctacctcctgctcgtttccacccctttccttgagatgtcctcgaccgcaaggttcagcggcactccctcctttaaggcttccttcccttgaagggcgttggagtgcgttgatctaacaagcaatttgatcaagtttgattgaagaagactcattgcgggtggcctttggctgcatctttcagtgtccctccctcctatggggcttccttcccccaaagggcgtcggcgggcttggatccaaaaagcaaaaagaccaagttagcttcttgatggcttcatgcgggtggccttggacttccacagcttttcgttggcttttcttctattccggcatgcatgtggctgtgtgaggaaatggatgttgacaagctagggtgttagctttaggttttggtgtttggtttgggtaattttgcaggtgttgctcgtcaattgttatcttctgtgaggttttttttctttatctgttttctcctctttgtattccccgtgtattctattctcctatcctccagggcccttgcgtttgcgtaggtgaagcctgccctgtataagatcatttggctcaatatattcaggtggggactctctccccccggtgatttagtcaaaaaaaaataatactttgttgcaagcacacaaaaaatttattttaaacatagcaagatgtcgtcgtgataggatactggttgcaagacgatgtctagtgtcttcctgttttattatcaagcatgggtctgtttttttaaccctgaaaaggatggccacaccctatcagtgatcgcacccgcgaaagcgaggagcacgaggagcgcgcgcgcgcggccgttttcttccctgaaacagcgtgcgcgggtcggagcgagatgcgaggggcgtccacgcagtgcagacgcatgcaggccgcggttctctcggctaaaaaactactcgtagtactccagtactacgagttctccgccgcggcgatttgtttcgtgcgtcgcgtgcggcgtggcaagccaaaaagccgctggacttcgcgaggggcacggcggggcggggcaccggccaatcgagccaacacgtcgttgccgtatgcacgccgcggcttggaaattccggcggaaaccgatggttttgttcgacccgtttggcgtttaggcgggcgtcgcccccttcttttatttgtttttgagtagagtgcacggacggtccttaaacattatgtctgtgtgacatgccacatcagcgtcacgtaggatcctgaaggggctgtggctatttgggatttagatgacacattatgacaagttctgagacttggatatgcattttgagagtttaagaacctagatgacacaccgctacaagtttaaggaccgcccatgcactttatactttgttttttttccgttccaatgatggagccgacgagtttctccgtctcaaaataagttctattccacatatatcaatataaaaaaaattaaaataccactatgttattaaatcacaatgtaattagttttttatctacttctaatatatttattttctaatttcataaactccgatgtaataattacttaaaataaataaattttaaaacaaatggaatggaaaaattgatgtattttgagacggaggattatccaagacttatcattgcatatttgtgttaattatttaatgtgtgcgtatcactgtatcagctgagcggagggcgcagtcgatcgatcgacttgaccggttgacttgcaaagaagcacattatataagtatatactacttcttgtacagttcggttggtccatgaagcatgcaaagtaacagtggaaaaaaggccatggaaaatgcgtcgtccactgatgagagatcagtccgtgtcaagttgctagctgctggtcattttcgcgacatgaaacgagaaagaaagggcggcatcgctagtggcccatcgaaaaaatacaaatggacaggcacctctcggtgttttagtgcgtttagtggctcaggggcaaagaccgtgtgaacaagaatcgccctagacttactttgattagacggcgatctgtaccgatccaccacagcttcctctgccgcatgctgagctgaaactaatatgttgggggcgaattcgacacacaagaatttccatagaatttcagtaattactttaaattctacaaaatatattacaggaaccgtcatcatcgatatagaccttagtagctaaatgcgaaagaatatccaaatatgacaagacatatataaacatgatatttattgatgagttttcagttgaaacatatgtaatatccggacaccgattataaacgcaccctcttaatccattataatcctcgaccggctaggccactgacctagtcgtttctctcctatgttattgttactatgcggttatatagcttatgtcactttatttaagactgagagtataggataagagagcaactatatttctattctaaaacctattacaactccaagctatactttgtaaccaactttatacacgtattcaatacaaaaactaacaaatttcacttgacgaatatgccacatcaatctaaacttgttcgtgcgtgaacttccatataccttacttgagtttattcatttttgctacccacgttgagctcttccatgagcctataccaagcccgtcatcttgaagaaatcgacctggatctcctctttcgccgcctcacgccaacgaacctccgtgcacatgccttcccaaccatctccgatgtattctactctgccgcctcctctagcctagagcaagatcgtgttgagccctctgccacttgcacatcacccacactagggtcatgcaccttttacactaattcttgttgctttagatcatcaccgcacaagaaatctaaggtttggtatctcctttttcttcggtgatttgcaatcccgtggttactctggttgaattccatcaacttctaggatctagttgtggctttcgctactattgttgcttcatctcaagctcgcaacccaattaatctatccgcaagacgaagccgacaaattgccatgtcattttcattgccgccaaatgacccaagcgtcatgtctgtctatctccctattaaatacaactcattgaaaagacgtctaggcaacccatccggagtgttcaactataccgatcgatttgtcgattgctttcagccttcaatcaacccgcttgaagtgtccagcaccttgaatcaccgattgctctagtcaccaatcaacatgagaatcatatcgtcttcttgttgattgcaggtcatcgaatggtccgagctacctgtttgaagtgttcaacaccactggttaaaacattgaccgacaccatgctccaccttgcaccaatgtccctccctagtcattatgtgcagattgcacggtgtggagcaccttcatcgcacatctctcccatggatctttcatcatagctaggctctgatatcacttgttataaaaattagcatgacattggcctcgtttccaaacacgaaataacaccataacagacccaatcatgatgaccacaccaagacatgatagttattgacgaggtttagccggattctacgtcctcgaggcatcagttacatgcattcctctttgatctaacataattacaactagcatggtggcccgcgcagcttgcgcggctatcatcattatattttctcacatataatagcatatatgttttctcaatatattgttcaaatatattaaattgacaatataattttaaattttgcaataactttacgaaactactaatgggtaatattcatattgtattttatatacgtgttagttattaattattttaatatcaatttttaattatttgtaaattatatatattcctatatgcactctagactcgtcttttaatatatattttttaattccgaattttctgtaaactgtatttctatatagactctatgctcttcttccaatattatttatttttatttctgaatttttattatttttaattgtatttctatgtggactctaaacttatctttcaatattctttaatttttaatttcgaatttcagttacttctaaattgcattcctatattgactttaaactcttcttcccatgtttttcttaatatcgaattttagttatttgtaaattgtatttttatacggactctaaactctactttaattttattatgtttattccaaattttagttagttttaaattcctatatggactctatactctaattctaatattctattttttttaattccgaatttctattttttttcttaattgtatttctatatagactctatattctatttctaatattccttattttttaattccgaatttcttttttttcttaattgtatttctatatagactctatactctatttctaatattccttatttttaattccgaatttctattatttcctaattgtatttctatatggactctatactctacttctaatattctttattttaaattctgaatttcagttatttcctaattgtatttttatatggactctagtctcctcttctaatattccttattttttaattccgaatttcaactatttctaaattgtatttctatatggactctagtctcctcttctaatattcatttttttaattccgaaattcagctttttctaaattgtatttctatatgaactctgttttttatttttctccgattaatgtgagaatttctagaccataagagcgaacgtgaaggctcctttttctattcctttaataatataatagatatattgggtctgaaagtcccttaaccagctagaccatcggtcaatcattcccttccctatgctactattgtcatgcggttataccggggtaggggtgaaaacagagcggattcggacggatagtagttataccatatcttaaaccattttttaaagcgaatgtagagcgggtgtggatgatgtgcggatgcggatacgaagcggattatttcggacgttggatttggtactgagtctgtgcggactcggttcggaaacggacaaaaagttgtcggatgttaaatttgtattcaatccatacaacaagagggcatcaatacaattagccgcaatacgatggcaaaacaacatctgaacatgatctcagctctctaggaaaaccaatcaaaacacaacaataatataattttgcttaattggtaaagtacagcttgtataatataacacatccagcaaattgtcaattgcttaagggctcaaataatccaagatacatagcacgacagacgacggcaagaagcagcaatggggacacggaacgacagacgatggggatggcgttggcgacgggccgacgttggcgcctggcgacggggatggtgctggtgacggtggcgcctaggcgctggcgctggcgacgggccgaccgccgacggtggatggtggcgatggggacgacaggaggaggcgacgggccgatggaggacgcgctgacgcaggggagtggggacggcaggcgacggtgccagcaatgccagaggcggcgcgctagaaggaggagcggtggcggcgctagcagcctgcaacggcgcatgtgtggagttggagaaatcgagagacgcgtgagaagatgagagtcagaaagatttgggggatggttggattaggttatgatagatgggccactcgatggaaaatgggctaaattgagtagttgtgtggcatgaaaattgtggattatccgccaaatagtacatcggatcggataatccgattaaaatatcgaataatccgcatccgtcggatatcgttgataccacatccggctccgcatccgcatccgccggatatctaaaaacccttaccatatcctcacttcggacggactcgaagcggatcggatcggataatatccgctccattttcacccctataccggggtgtctctttaattaatttaagagaggatctagaataagagtctagctctacttttacgctaaagacctattacgactctaagtctcactctgtactgattttgctagatatctattttgggatggatgtcaactaacactgatggggactgagcttgtaagatgtgtgggtgcaggaattgttgcacgggataatgttagagataaggataatagacatatattcaacttcaacaattgctatgaaatttctccattctaaaagaggcccaagacatttttgaattatcgggaaggagttttcaaatgatacaataatacgtgataaagaatcaatttgctaacagtattcctacataagctagctaaacgagaacgatggaagagtatgggcagaactgcataagtacgtaagacggaatacagcatatatggtgccttgtggttgtggtgatgtcaatgtgatcctgtgatgcgaatatgagcatgacggcattttcgtcagccacctatgaagtatgaactctcctagttcgtcttgaaagagcataagacttacgcaatcattgcattaaggaggagaaagctaaggatgaactcaaagcaaatggaacctagttaaggtgagacaaactaaaccaagtaactaattggagtctaatttatactagtacatctgtacatgtcaagactcaagacacatcattcaggtcaggtagatatctgctggacagttggccaaaacatgacacatcaaagtatcaaacaccattgccagatcaatcatgccatggttaggtttatgctagttatccagaacacgcaatattttttgtttgtgagctgatacctgcctgagataagatgatgagaaacaagttaagccaattctaagcaggttctatctacacacccacatggacatgtacaccatgaagtccacatggaggctgtccattacaagcccttgaaattaatatttttgtcatcttttttctctcctaccaactcttgtgtcatttgtctattgccttgcctgctaatctttaatcaggtctctcccaatgacatcttaggaggctactatcggttcgcttatgcttatgcttatcagccaaaatttaaattttcatccttaaatttggagttgattttgaggttttttcatcgaagtttatttttcagcctttgcttttagatcgctaagaacgtgtatataaaagttttatccacaaattgtttttcgtttataaatatgccgtttcgcttattccaccaataagcgaaacgatggcagctcttagttggttaaaggagttgcaattaatgtgtgcaattacttgtaggttgcgattccgtgctctggttatgccgaagcgtacaagcattttggctgtaatatgctgggaacattgctgtcctggctctgagctagtagctctttcaatccacctcaagaaaagcattactttaattaaggcaattaattaatgcctaagtcattttgaacatataggacatactttatgagtaaaaaataataaaaacaaataggctactcctttatgtgtaggtaaaaaaatattattaaatctcaatttagaatacaggaatttcatttgcgatttaaatttgttctcttgcgatttcttttagccgtttagagataagtgtcacgtaggcagataactgcttttaacaaccgcaatccgtatcatttatcaaccaccaattcatcatcaaagagttgaagattgttcgcatctaaattgttgtttactccgcattattctctctatcatgtcatcagatatagtatataattattggtcaatttgcatcgaacattataaacaaatccatctcatagttctttccgatgtctattttatatccattggcgaggctacacatagttaaaaatttaatcaactctttgaagaaacgaactggccggttaattaaatttttaactaaaccggccaaacgatgaaacttggcataaatttactgggtgattcatcgcttcgttggacttgtgctgctgcctcaatgtctgaattgttgtcttctcttcggacagcgatggctagattgaaattttcgtttcgttaattttttgtttggctcgtggtagaatccaaagggcggattttcccttcagagaaattgtgtcttaacgcgatttggactttgtaagggcacttttaacaagcagagttcaaaaaagtttaaagttatggtttggattgtgtgaaatcattgtcatgattaatatttgtgacgaacaattggctttgcaaaatgatttattcggtgaattggtttggaaagatgtgtggatgttagtgtgagtgcgtgtgactaatgtgggttaggttgtgatatctgtgccaaaaatcggttgttttgtctgattgtgtgaaggtgacttgaggtcaaccttggtcaatgatgaggaccgggactatgtttagggaggaacagaggtctagtgcggtcgggatactatgtgagaaggtgactagagtcagaaatcttggaggtcaacttcggtcaacggtggggatcggcactaaactcggggaggagttgagatccagacggtcaaggataccgggtgacgaagtttgatatgagatggcatacggtggatggacattatatgggagagatcttcgcaacgggcttcacgaggtgtgcgtgcaagcgtcggtgttcgcgaagggaattgaaaagttggagtatatggtgctacagtacacgaggtactgtagtgtgcaggtatgcatgcatgtacggtgctgtatatgtacgtgtgcatgaccggttggccgagcaacagcagagcggctcggtgggcttcggtggctgttggcggcatgccaagtcggcccaggagaagcaagggcccagctggcagcgagtcggagacggtcacgcgtggacgtcagcttgggagcaaatcagttttggatttctggtgtggccggttgtttgctgcacgtttggaaattgtaaaacgtatggaaattgagagattgagtcctgttgtgaattggagttcaacacctattttgagtaggaggtttttatgtataaatagagagggagggggtggcctcccggtatcggttttagtaatccgagtttgagagattagataaggtttcgtgagaaacttttgaggggtgctgtggctgcaccttgtaaacaatatacttgagcaataaagatcatattcaatcatcaaggcatcgacgatctattccggtgtcgtaagttttatgtttatgtttggttttagcattaacttgtgattattcgttttgctgcgattttgtccaagttaatccatccaaaatctttctaatacttcatagatcagatttgaaaagtttcgttgattggttcttgttagatttgaatttgcttaagttttaggtttagttcagatttgctgaaattctgagacagctgaatttcgagggtgttttctcttaaaccgtttattagtttgcaaatccctccagtggagttgtttcttggtttgtatagtttattatgtaaagtttgcaactcgatccaacggttggtttaagagaaatcgtgtttttaccgaagctctgtcgtgctgtttttagtctgatggtcaaaccgcgagaggaacagcggtcaaaccgattagagttcggtcagatcgatcctagtaggtcggatagaccgccaaacatgtgttccattggcttttgaggttggggtgtgttttgatctattaagattcgattatttgacttccgctgacgaaatctaccattcaccccccctctggtaggcttggttacttgtgttcgatcctacagattgttcctcgaaccagcgctcgcggttagaggggttcttctttttctccctgctctagcccctagtgtgcaggataaattttcactaagtaagagtttctatataggatagatataggatgtacgtgcgcacatcacagggacggaagtagcagggggcttgaacaccccctaaggccatgttcgattgggccgagaacggccggggtcacggcccaacccccgtggatcaacctggcgaggaagcaatcccagcccatgggaaaagttgcgttcggttaagcccagacgatgattttaacccggcccaccacagggttcccctattgtccaggcccaagaaaaaatcacctagtgcggaggcttggaaaaaacacttagagaggcggcacaacgagaggaggcgctgcggcatgactcggacgcgacgacgacgacacgctctctcctcgggcagctgtctcctccggtggccacatgttaatgaccaaatttggtaaattatgcatcagctgaagcggatttggaaggaaattgacaatcacagaaacagagcaagaatcagcatcgaattgcgtcggctatggtgtgcatcggctaattccgaatcggataagggaagccgatgtagccgattccaacaaagtgatgttggaatcattgtcggattttgttggtgtgcttcatgaggattgccacctatggattaagtctgaaaaaggcaattatgtctattaattaaaaaatagtttgttagtttcttttatctttaggaaagtgtgtttagtgtccgataatgactttaagttttccatttatctttaggatagtttctttcttctcctataaggactagtatctacccatgggtataaatatgtacacccagggtcattataatatcaatctttcgatcaatgcaactctcgacgcatcaccaccctctttaccgaggtttttacttatcaaccggcggaagttggcacatgatgcggggctgcatcggttcagttcgatctccggtgaagcggtaagtcctacgttccgccggcccaggtaaatatatcggttacgtcagcgtcgtccaaggctgcatcagtacatttgacctcttggattgctctggtttggttgatatatttgcctacctgatatctcaattctatctctgattgcattgtgtttagagacgcatcggtttagttggaactgtctcggttaggtccgatcttctgtcttagccgatatatctctacaatcacaatgtcgttctaaatagatttattatatccatcacattagacagatctatcggcttatcgagtattagattatcatacaatctcgtgctgcatcggttgtgtccgacctactagattgttgttgataatataagtcttgttaagccaataggttcatgctagtgttttatcggggtgctagccgataagttatctggacgttgcatcggcttataaggatcacatatacatatgagctggatttagccgatcacaacaaagagtttactgatttatctaatcttgtggattctatgacatcggacctccagccgatgtattatttaaccttcggatcagtacgtgttctatcatatcatattgttagccgattggtttctactggataatatcattatatattttattacatcttcatcagccgattgcctccatattgttatttatataatgtcggaatctacattggatatatagccgatagctcaaaaccctatcaatatcggctggtatcggcatcggctggattactccatcagcttgtcagccgatcgactcattgatctactgtttacatatcttgtcagttgcaggatcaaactgactggcacgtccgcatctcatcaatctttggacctgcactggagctaagcagatctcccaggccagtgtttgttttttgcatcaacaccaccttctcccaagtccccttcccctctcccctcctcttctagggttagggcttctcacgtgcgcgctgctgctgcggcagcgacaacgcacggtggtggcaggtgtggcgaggacgctgctgcatcacaccccctcgccatggctccgttgaagctccgccgctgcggcaaggagaagtaggaggacacggacgtggtgaccgcttcgagtgttctttcttccactggtttctttatttgttcttctttctcccctttgatctgttacctagatttccagatttcctcctcccttagttcttggaggtccttaaatatgattgtttgattctcattatggcatacatttactattatttgtatgcaactttggcttttctgaggccgtgcaaaaagactagcaatatttgcatatttgtttccgactcttgcttccatatgccgcttcttcttcgcgatcaaagtcataagactatctatgttggggggagtagctttgaccttgcccggagaggacaaaggctcccattttctcccaccaatcttgctctcgatgagctcacaagcggaggctccgaggagccaccgcagggccctcggaagccgccccaaggggaagggggcgcttcagaggcttcgtcaggcttcggggaacgtgaccccgaagggggaccccggaggcaacagccaggataacatcgcagagagccttaatctcgcattttaggcggccaactacctttgatactgttggctcaacaccctaggtgaaggccaaggtacatcgttatcacgcctcagcctcgagcagtgcaccccgggaaacatggggtcccccgggaatgctggcttaatgggcgcagtcccatacgatgtcccttggagagttaccagaccgcccttgagcgggggccacttgtcaacctccatccttgagttaagcccagaaggtctatctctgtaatttcccttaccaatgtaagactacataaagatgtaatacgccccccccgggggggagggggagaggggggcaaatgaaataatagataaaaaccacatcccttcttcccttgtgcttgaacccctttggattttattccaacattggcgccgtccatggggatcgagcaaagagagaacaaagcagtgcaagtgaaggatgccttcaaagcatgcaacgaagcagaaggacaccacggcagccacgcgactgtgtagggcaacgcgccccctggtttggctgggtgaactagtgatcgcccctccggctgacgccgacggtagcgccaccgggagtggcaccaaacttgagcccgagaccctctgcgatgcggccgtagaacctatcccacaggtggcgccggcgggtgatctagctacggacattcgcgctccgggggcgccgacgcgcggatatccgtgaattaggtttttcggacctgtcgtggacggttttggcaatatgatgggtgaatatttctgatattgcggtttagagatataaattaaacccgacgtaaagatgaagggatagaaggtgaacttattccttctttttccttgaacgtaggctaaactttttgattttttattgcctaggcgcctagcccctgttctctccggattgggccgaaagccagcccactatccctactcccgcaggcctgtaatcctcaatttgggccgcattcttgttagcaaagacccgacccaagtatagaatctagggtttataacaagaccgaaggaaggacgaacatacagattcctatcctctctcgccatgacaacaatgtcgtcgaggctcgcatctcgcgccgcccgcttagctgcggtggcggcatctcgcgccgcccgcttagctgcggcgtccgcatctcgtaccggggccggggacccctcagcgcgggccaccgccactgccgcatctcgcgccgctcgcttagctgcggcggccgcatctcatgccggaggccccacagcgcgcgcgattgcggctgccgtatctcgcgccgcccgctcaatctcctcgaagctccttgacgacgacatcgctgcccgcctctccttccgctacagcaccgagcccccaggtaaaccttaacacccaatcccgctctcttcatggtctcccagcaaatgagaattttcagaatatgccactcaatttgcaccaccttcaggatttgccattaatccatgtttggcgaacaaaattgcataacaccgtaatctcgagagaatttgtatttaaaagataatgcagatgaattcctaatccccgtgcctgagaatttcagaatatgccactcaattcacaccaccttcagaatttgccactcaatttgcaactttttcaaaacatgccactaaggactctaattgtttcatccccaccaagcacgggaattgtttcattccgtgtcactccgtctctctgaagttacgcgtcgtcgcccgtccgtatcgtgccgtccgttgcgtcatcttgccgccgccagcgtggggaggaaggccgccggcgtgggtgaggagcttggccggtgttggggaggaagagctcgccattccggtgcagggaggaagagctcgctagcatgaacggtgtagaagcttgccgacatggggaggagagctctgccggtgcgggaggaagagctcgtgggcatgggaaggaggagctgccggcgttggaaaggaagagccaccggtgttgggaaggaataactcgcgcgggaaggaagagttcaccggcatgtacggggaagaaacttgtcggcgtggagaggaggagctctgccggcatggggaggaagagctcaccggcgttggggaggaggacccgccggcgtggggagggagaacttgccggcgtggaggaggagctcattggcggcgcccagatgactcaaacggacgtcgtgacacgggcgggcgacggcgctcggcttcggagggcggagtggcacgggatgaaacaattcgcgtccttagtggcatgttctgaaaatgttggaaattgagtggcaaattctgaaggtggtgcgaattgagtggcatattctgaaaataaacagccaaccatggatttagtaacagactaatattcgtgtcatcaaaacaatgttggcatttattgtgtttagtttttacaccattatcacgtgtgatatctctcagcttgaaagctcaacttttctaccaataaaaattttggctggaacctcttgagccaaaggctgggatctaattccattatctgaaacatcatataaattcttctttgtgcttgcgaaaaatcaaatttgttcacactactaacttttgcgaattgaattgtgatagatgatggtaagtgcgttacagccaaggacctcgagtcagatcaagccgtatgggccttatatgagcgctggtgcaagtcatacaacaagaagcgtgaccatgctgagatgattcgccggttcgacatattcaagctgaaagcatcgcttgtgcacagctggaacaattatgttcatgaagacaaagaggaattagctcgtgcaaaaaagagaagggatttaggcaaacctgtcgatccttggtacctacaagaggaattaggcccatccgccgatgggggagacactgttaaccaatactggcggggcatgttgaaggaaaatgaccaagggatggatctgcctgacatccaaggaggaaaaaaaatgagcactgaagattgaacatgttacataagagcgatttaatttgcttatggaaatcccttaccctcaaggagttgaacttagctccccatataaatcaactgtaataataagttatgatttgccgttccatgtgtagtctatgcttatgtcgtaccatcttatctaagtggtcatgaattccatatgcttccgcctgtgggaagtttgtgtattttagccttttgggtttacgggcacaagtgttcaaacagatcaagatcaagtgtgaagatggtatatatgtcagttgtttgtacattaattcgttgagcaataggacgaaagtaaaggtgagtattgtcttgtctaaaaaattcaacattttcaccattatcattcatgcattgtttgtttatatatatataaaaacggaaaagaaggaaggggaacaggaagaggtgcgctaggaaattggcaataaactaataaagaggaaatttattccatattctcaatttgtctgtctaaaaaattcaacattttcaccattatcattcatgcattgtttgtttatatgtatatagaaaagaaggaagggggaacaggaagaggtgcgctaggaaattggtatatatataaagagtactgcttccaatttcctctttattagtttatacaggaagaggtgcgctaggacctttataaactaatacatcaatcttacttgaatacatataaagaggatggaactaaagttgttatttagattagttggcttattgaacaaacagctgtttattacctgtgtaaacaattacttagatattttcgccgggtcaattacttagatattgatcatatggcttttaatttagtttatctagaaaaatatttttgcaacttacttgttaggttgtttggcaattcgttgagttcgacatgcgcagtcttgatttttttttaaaacacaacacactttgttaaaccacagcgtttaggggaattgaattccccaatacatcgcccaggataaacataagagttggaccatatttaacaagagagaggtcaactgaaaaaaagaagcaaactttataatgaaactaagcagcaatgaaggagcaaatcgatagggtactgtggcagggccgcgacaattgcatccaagggcctctattgatatgtactccgcttgacgaactggtaaaccccttcggctgcctccacggaaacgacacatatgagaggtttggtgcgaagccgtagattttggtgtgaacatcaccggactccacaaaagatttccacggggttcatcattgaatctgacaagcttggactgcaaacctgcaaaccaaagttgcaaatccaatctgggctcaacccgaacgataaatcctgcatggttattgctgccaagagataaagaggaagaatttccccaaatccagccaaccaaagacttaatccaaagatggtggcgaagaacatgctgtcttggtaactcgatggagaaggttgaagaaaaggagatcatccgagtcgcatccacgccgccattgcaggacacatccgcaccaccgacgccgtcgcggactgcaacggcgcagccgtcgccgccgcggggtgcatcggcgcagctttcgccgccgggggccacatccgcgctgccgtcgccgccgagggcagcaacggcatggccgccgccgccgcgggccgcatccgcgtggccgccgccgccgcgagccgcatccgtgaggccgccgccgcagctgaccgaaaccgagtcgccgccgccgccacagactgcatccgagcccctgtcgccgccgcaggtcgcatccgagccgccgccaccaccgcaggccagatccgcgtcgctgccgtcgtctcggatcgattctgcgtcgccatcgccgtcacgagctgcatccgcgtcgaatccgcctccatctccaacttccataccacaccaacgaggaggaaacgggaagaacccgacctaacgagactagcccggctacttagctatactaggggaggggggacgacccctctccctcccgccgccggcgacgaggccgccggaatcgaggaggaagaggggtcgagagaggggatttactgtagcaagtgaggtttcgagagagagcgctcgtgagtcgtgagaggtttccgcagccttgatttctagttacacgcgcagcctcaaggcaccatctgattcttttcagatttcagacaactcgaataacttcaaatttcagattcttgcctataattcttttgcaatgtaaagaatttcaataagtgctgtagggccaattgtacaaataccatggcttgctgaactaggagaacctatctcaatctctatgccatggtcggaattgtgtatcaacgcaggaaaaagaaggggaaggagatggcgcacagctgtgattgtgccgaaccgtgaacagtaccgcgcagatcagcgtttccgttagcgtgacaggggagttagtttcctttaaatcagtaaattgttagttacaagagtaagcctataagagggcatccattcggatattttggatccatttttactatatctcactcgaaagattttttcttatctctcactcgattttctcacttaaatttacagtccattttcttgtaagttacattgtaatttatgaaacttacactgtaacttgtaacttttgtaagttacactgtaatttttgaatcttcgcatgtaaattttaaattttgtattggatttggtctttttattgaggatatggtaatttagtgtccattatggtgtttcttaattgctttttgctttttattatatctatcggattttaatctaaagattaaaaatctgtgtgatacgatcataaaaatctttcgaaagacgtataggtactccctttttggatatgcaatagattaatcttcatctcatctcctgtttctctcttctcatcccgtgttctctccggcgatccacgacggatcgccgttcgcgcaaactacccaaacctcgtccacccacaactcacacatatcccatccgttcactattggcgcataacaacttgttatcagagactgtggttcaggacgacacatccagcgataagcagccgctgctcgagccgacggatgccgttgccaagctgcaggacaccatgtccgacgtgctcaccggcttggggttgttggcgtccaaaagcgatcttgctgaccttcgtcgttcggtggccgtcgtgacatcgcgtctcacgtccctggaacagcaaccaggggtggcctcgtcttcaacaactccgcttcaacctcgcctcggcggctcggcggcgcgggcatgttgcccaacccgtcccaacccaatctgaacgttggcgcggcagagctggcggcgggcacggggacaggcgcgggaacgggcaccggaggcggcagcgttccccgtttctacaagctcgagtttcccattcgacggcaaagaagatcctctcaactggctgcaacattgcgagcagttcttccgccacaatccgctcggagaactcaaacgtctttcccagacggggaccgtggcggcatatcaggagaaattcctggcgctcgcaagctgcgtccaagatcccctgtcggaagggcaacaggtgcaggcttgcaatggataacaccaacgcgggctgctgctcaccagtcaccagcatgtgagtccgtcgctgccaggtgccagtcaaacccatcttctctcatcgcccacgcccctatacctcctgtccaactgcagcattgttcgctgtccatctaaagtcttacagctattcaccatacggttttgctgcattacggttctttgtgttgcgttgtgcagttcggttggagctggaggacgaccaaggcacaacagagaatgcatatccgagccaaaattatatatcagaaacaccaaaaatggtggtacagtagtttttttttttctgttctccactcaaccagtttggttggacctaactgactgcaactcaaagaagaccgacagttcgacggacggacacaagatgagtctcccactgctaacttttacatggcagacctaacaagatattgttcgtattctgtatggattatatgcaaaaagaatgcttttatggatatgtactccggttttgccattcaatcaaggatgccgtttcgctttcctttttatcctgggcaaatcttctctgctaccctgctggtacctgccatccatacaacacgaccatacataaatcacaatgcaacaagtctcatctcacataaatcacaatgcagcaagtctctcacagaagattatcaggttaatatgttatttgtctgaattggaattgacgagatacaacttacagattagttgaagcttcaggggacttgcgcacctgacgctgtgaggttgttgggcgtgctcgcatcagcagcacaagtgatctcattgagaggattgctgaaaacatagaaatgggcagatcaagcaattaattgttagtggatcaacacatcaacaaatatcagttctggttgacaaattctgataaactaatcgctgacaaatgcagaaagtgcatatagaaagcactacaagatgttactatattgcaggcagcataagtgacaacaagaattctggtaactcaaggatggtaaaattacccaaataataaagcattgtccttaaggagggatagaattggacctgctttatgcaaaatgccgatcgctacatatgaaaaacaaggcccagattctgctgtggtaaataacaacaaaaatgaagcacaaaaccatacaatctacctaacccaaattctggtaactcaaaagcacaagtaccaatagctaagcagatgacatattaagaacaagctataccatataatctacctaacccaaattctggtaactcaaaagcacaagtaccaatagctaagcagatgacatattaagaacaagctatctatctctctatactcattcggtaaaggcaagatatactgaaaaaataaagtcttatccttaatgacttatgattggctgattagtctcaacagtaacatgcaaaatttgccactaaggcactgacctcataaatcttgacatggcatcagctacctgaagacagtgaattccttcctcggtcataaactctggaagttcacatatgtttttttctatattcaagtcaattttgatatcattagagttaaaaaaaaaaactggcatccatttgacaaaatatatgaacaagggcattactgaagtttgcatcagacaggttgtcgatggttgggcaagtgcagctcagatcatccctctccactgaggcgtatacagctatctcgatggtgtctaagtggggatctagatgaaaaaaacacagattagtcacatttaaggctaatgcattgctcattgaagtttttttttttttttgagcaaggaccaaggcccccatttctattaccagaaatggatacaagctacaaggttcttacagaaaagaaagggaagaaaagcagctaaaacatttgctcattgaagtatatcatataattacttacgagtccagttcattgtcctggatagacctttcatctggtctttcctaagaatacggtttgattttgatctgttcgcgccagtctgtatgatttgacagttactctgatcatttgggcctcctaaataaattaggtagatcttcagaattatggcaatatatatgttatactaaaaaacgtaaggtttaacgtataagaagaaaattactcttggagtgtggctgtatatgatcaaattcgtagccacaacaaccatgtttgccatttagcgccttcaggacaggatttccgttggcatccagccgccaacgatcaccagatcgtccaatcaccttgggagcattattccagcaagcttctcttacatctgcgctgaatgaacgaggttttgcaggtgctgatgcacgtagagcacgggaaaacttggacacaagacgggaaaacagacccatgtcctgcagttaacatagcaatagcataaataatcccttgtggatcactccatagatttatcaatttagacaggtttgtaaaactgactcataatatttgataacacatctatcggtatctgtattgaatagccatagaattcatatcacaacatctaaaatacacatcaatacacaaacgtgcatcaccactgacccattagagatatgagtcgctaagtagaagatgtaatgtcaaattagctacatctgcagaaaaataagtgcaggtctaacaagccaatttagcagttaaattatgtgaactgtccattacaaacatatcaaacaacaggacatattggtatgccagtatcgcgcaccagcaagttaaacgtgccctcagcattaacatatcatcttccacaaacaaaaaacacaatccaggttgcagtgctgcactacactcactatctggaggaacccaactccgtgaaatacagcagaatgctacactaacataacatactgtaacacttacggcagacaaccgtaatttagaaaggaaaaaaaatcggacagagttcaggatccaatccgaatgggacaatatgcaatttccgtaacaactgatgcgagaaccccaataatgataatttcccggtactaggttgcaacattggtaaagtcagaagcgatcactagggaaatgcacaaaccctgtaaatccaactcccaaaccctataaaatctcgcacgatcaagggagacaaaacgcgcggaaacgttgcagcacacgggaatcgggaggccggtagcccagcaacttaccaaagtcgaacccaaatcggtgacaaagccttggacttcctggagctccgttcgcgttcgctcgcagcagcaggcctccggcgaaccgcggagaggaacccgcgcgcggggacgaatactctctccttctccgacgccgccgtgcgccgtcggagccaagctgatcagagaacaccacggatcaattagcaggtagcaatgaggagggggaggagagaaggggaggggacttgcctgatggggagaaaagttcgcccctcctgcgcggcggacggcggtgagatcgtctccccaatttcttttccccgccctagctcgagagtcgagagcaaatggggtcgcctaaattttgaaattcaaagtggtgggggtgggggccacatacaggcatactacgaggagaggcgcgtgaagctgaaagcagcccggcccaccgaacccaggttcattttttcgagtggagtaagttcactttgagtccctcaaatctctaataccgaattctgggaggattcgcgtgtaaaaaataccgaattctgggaggattcgcgtgtaaaaagccccgccacatggcaccgcgtggttccaacttcccccccccccccctccgacagtcgtacgatcaggttttattagcaaaatgttaaactccaccaatgataccgacccagacacccagtccggcttgcgcgctggataatctatcctgtgattttttcccatagggcacatgtattctttttagagtaattactttaatactaataaaatctatgtaaatatcatatattgaaaaatatcattcaatgtgtacttggttttatgtttgtataataccttcggagaattatagcatgacagtatacgcaaacaaacggtcactggtggagaaaccatctttcgtcggtcggccgaattccataatagtcccggatgcaataaaaaccggagctaaagatgatctttagtcccggttaaaaagggtaactggcatatttgatttttaatcctggttggtaacaccaatcgggactaaagatgatatttagtcccggttcaaatgctgttagggcctgtcaggcccccccggatctttagtcccggttggtaccaaccgggactaaagatcgtaacttaccaaccgggactaaagatctcggggatctttagccccggttggaaataccaactgggactaaagtcccacccctatatatatgtctttttcctcctccagctgcccgagcaagcttcaaaatttcttcaaaaaagaagggaggtcatgccaaaatttctagtgaatttattttggtgattacatacaaataggaggtgcctaaaaggtttgcaacttcatcctccaatgtttttctttgtcatattacatttggagctatgttttgcacacttttttgtctccaaaatttagttgtaagttgatgagagagaaaatttgtgtgggggaagaaagaacatatagaaatttagttgatttggtaaagaaggttttataaaatagttgagaaggaaaatatagtgaaagttagtcttaaataatagaaaacaaactaaaatgaaaattaaaagaagcaaaacacattaaaatttgtttaaaactttagaaatagtaaataagaattatttagtgtaatattttatgatttttgtatgaataaagatatgtcattattgtatgactgttgaaagagtttgtaattatcttataattattgtatgactgtcattattgtaagaataattatttatgtacgattttttttcgactcatgtagatggatcgtcaatggatgtacgatggccggcggtccaaagagtttattgacggcgtgcattatttttttgagagtggccgaagctaacaggcaaaagggttttatttgttgtccatgcaataagtgtaaaaatcagaaggagtattctgcatccaggactattaatttccacttgtttgagttggggttcatgccaagctataactgttggacatcccacggagagcaaggggttgaaatggaagaagatgaagtggaagacgacaatattccagactttgatcagtacagtggatttgaaggaaatcaaacgggcgagaagaaaatggatgctgatggtaacgacgttgcagatgatcttggtcagatgttgcaggacgccaaggaggactgcgaaagtgaaaagggggcccataaattggacaagatgttagaggaccacagaacgtcgttgtacccaggttgcgagcaggggcacaaaaagttggataccactctggagttcttgcaatggaaggcaaaaaatagtgttagtgacaaggcatttggcgatttattgactcgtcaagaacattcttccggagggaaacaaattgcccgagacaacgtacgaggctaagaagatagtctgccctttaggactggaagttcagaagattcacgcatgtccgaatgattgtatcctatatcgtggtgaggagtacaagaacctagaagcatgccctgtttgcaaagcactatggtacaagattagacgagatgatccaggagaagttgacgggcaattaacaaagaagagaattcctgctaaggtgatgtggtatttccctataataccacggctaaggcgtttgtttaggaacaaggggaatgtgtaacactctgaaaattcgaatgacaaaatcaaaactctaaaaatacagattttcaaaaactttttaaattaattgcatcatgtcgatcttattcgtctatttcatctggatttgatctcgaagattattaatcatgagtaaagaatagttaattaggaataaaccttaaaaacaaattggtaaaataaatacaaaataaatattaggtgggatagaaataaataaaatattatcgcgactatatttggatcaattaaatttgaatacgatggaataagaattaaccctaattaaaactcaaataaattacatgaaaataaaatatgagtaatattaatctagggtgaattcattagttgagataatacacatattgagtaaacttcatttatgcaagatttagaaattatagaatcaaattcatatagaaaataatataaaattgggaaaaataggaaaaagacactattcattagcttctaggtgttcgacgaggctccctagccccttcccctcccctgccatgcgcgcctcgcgccccgagccgtcgccgtcgccgcctgccgccgtgccgctgtcgcctgccgcgccgcgcgccgctcggccgtcaccgtcgcatccctcctcgtgccgcgcgccaccgctgccgccccgtcacctcccgtcccgtcgccgcgcgcgtcccatcgtcgctccgagccgcgcgccgccgctgccgagccgtccccatcgccatcccgctgccgcgccgctcgcccgtcgcgtcgccgtcgtcgccgcgccgagccccgtgccgagccgcgccgagccccgcgccgcgccgcccgctcgtcgccatcaccggccgccgcgcgcccgtctcgttgccgcgccatccgacgcatcgccgtcaccgcgcgtcgccgtcccgcgccgcgtcgcccgcccatcccatcgccgcgtgaccgtcccgtcgccgcgccgcgcgcctatcgtgttgccgctgccgccccgcgcgccgtctccttgcgccccgcgcgccgtctcgcgccccgcgccccgcgcgctactcgccatcgcgtcgccgcctcgcgccccgtacggatacaggatagtgtcataatagcgtcgcgatatctgtcacacagagttgttccatgatacgtgcgccgcagtgagatatgccgttcttcccctcttgacaaatccccccctctttatccattctccccaccccatatcacccttccttccctctcccctttccagtgcgccgtcgttcccgtgccgccgcgccgccgttcccgtgccgctgtgccgccgttcccgcgccgctgtaccgccgcttcggtgccgccgtacgccaccgtcgccaccgccgtcgttgccgctgccgccgtcggtgagcagccctccttctcctcctctcccccccccccccccccgcgtccaccgccgccgccgctcgggtaggagggagagccgagagagagagatagagccgagagagagagccgagagggagaggaagagagaaaaagaaagagaggaaagaaaagagaaggaaaagagagaaaaagagaaaagaaaagaaaaaggaaagggagaaaaaggaaaaggaaaaataaatagaaagatttggaagaaaattagggaggttaatagtttagaaaatttaaaataattagaatttaattatagaataatcatggtcctagaattgcaaaatttaattattcttggtaatttccaaaagaaatcaattcgcagtagtagtttagatataattaacaattagatgaatctttatagactactatagatcatttttggataatcttttaagtaatcgattcacggtagaaattcggacttaatcgctaggaattttagacgtatattatatttaatcatttagtcatagactaaattaaaacgtataatattataagataattttaggattccgtccgacatttagctcgcgatagaaatttctaacctattatatggatataatgctcgggtagattaaattaaaaacttatgacaacaaaatatttatacccgcaaaatagtttaaatcaaaattgggtttgccgtagcggatagtaaagttaataaaaaggaaacgactttcgcattcgactgtcatttggatttattcggattctcatttgaattctaaccgaattcaaatcaattcttgcacgtaactatagagcccgagggagttgcggatccaagcgaaggccaagacccgcaagaccttgagcaaggcaagtcatcactattccttgaacatgttgatcccaattgcgaaattgtttggtttacaaataaaattgcatgcaatgatgaacatcctacttgtgattatgccatgccttgattattgtttacccttaaatctttgtaaccatgtttacgtatgagtccctagtcaactatgacaattgcttagaaacgctatactagaatcatgcatactcatatttatcaaatgctatatgcttgggcaattacctttgggaaggtaattgagatgcggcatgtggagacatgtgcgccacattgccatgatgttgatgacatgatttgtgaaagaagaaataaaattaaacaattgttttcgactggggcggacggaggatttgggtggtatctgggaaaggctagtaccgtccccggtcaattaaggaccgagccatgaagttaagcatgaaacgacccccgtacaaccgtacttctcgaatgggtatagacctagcggattagatagccgagcggaggcagtatccctgcatagatggttcacccctgagtgaggcaggtgcgctacggtgggacagccgttgaggtagggccgagaggcgtgccctacatcggtgtcgccattggtaggactgccatgagtgtgtgagagagagagaacttaacttgaaccataatttaatatgtgtgtgagacttctctttcccgggagcgccagaactcctctcactgctagaaacatggacgcctagagtgcatgaggatttaagttcatggagcgggtactgccaatgcgaggttatcgaaaagctttgccgtgacgcgtctcatgtgttgggacgaggctcatgtgttgggcagtcgcggagtgcgggtaaagtgtacatccactgcagtgtgagtaaaccaaatctattcgaatagccgtgctcgcggttattgagcaccgggacatgtattacacttggctagactctaaattctttaacttgtgtgggatgggatattgcatgatgatttttatgctggtggagccacttcctgagaggcgggaatgtggacgtcctcagaaaaccataacgactcaatggcgggaagctatccttgggatcacaatggatggtggacagaaccgtcattgtttaatatgaacactggtattaaaactggatcagtttatgctaggtcttaggcttgtaaaaaaaattacaaaatttgctttgcgcaaaagaaccatagccatcctctgaattcctatgtcatgtgcatcattgctgtggtggcttgctgagtacggttggtactcatccttgcaaatataaaatttatcagaagcgggagatgaagcctcagaggatccctatgcctactatcaggagggagatgaagacgatggcgtctagtaggtcttagtacggtcgttgcctgtggcaatggcatgccgctgcctgaattccgctgccttatctatttctgcttttggatgtattccggaccgctcggtccgatgatttaagactatgtctgcgggcctatgatgtaataattcgtattagatactcgtgtatgtgcacttggtattccagctatgaattcgtgtgtaccaaactacttgatccagggaaatggtactgtttacacgattgattcctgttataaaaacgggggtcgacagaatgctagaatgatgcgatggcacgctgaagagcgtcaacaggatgggatgctgagacaccccgccgatggttcgcggtggcgaaacatcgacagaaaatttaaagactttggaaaggacgcacgaaacatacagtttggttttagtacggatggcatgaatccttttggagagatgagcagcggccatagcacttggcccgttacgatgtgtatctacaacctcaccccgtggctatgcatgaagaggaagtacataataatgccgattataattcaaggccccaagcaacctggtaacgacatcgatatgtacctaagaccactggtcaaagatcttaaactgttgtggaagaaggaaggtgtccccgtgtgggatgaggacaaacaggaggagtttaacctacgagcgctgttgttcgtaaccatcaacgattggcctgcacttagcaacctatccgggcagtccaacaaggggtacaaggcttgcactcactgtatggatgaaacagaaagtacgtatcttaagcactgtaggaaggttgtatacatgggtcatcgtcgattccttgcagcaaaccacccggtacggaagaaaggcaagcacttcgaacataaggctgaacaccgtacgaagcctaaacatcgcaacgggaaaacagtgtttgctatggttaaagatcttaaagtagtgtttggaaagggtcctggaagccagccgatagagagcggagatggtcacgcggcgatgtggaaaaagaactctatattttgggagttaccctattggaaattcttggacgtccgccacgcaatcgacgtgatgcacctcactaagaacctttgcgtaaaccttcttggcttcctaggtgtatacggaaagtcgaaagatacactggaagcacgtaatgatctgaagcatatggaacaacgcagcgaccttcacccggaacctaaaggagaaaggaagccattacttgagtccagccagctacactcttagcaaggcagagaaggaaagtatgtttgattgcttggagagcataaaggtaccgtctggatactccacgaatatcaagcgaataataagcatgaaggagaagaagttcacaaacctaaagtctcatgactgtcacgtgttgatgacacaactgctactagttgtaataaggggtatccttccagacaatgtccgggcaacaataacgaagctatgtgcattcatgaacgcaatttcgcagaaggtcatcgatccggatagattagaagcccttcagaatgatgtggtgcaatgtcttgtcagttttgagttgatatttccaccttcatttttcaatataatgacgcatctgctttgtcaccttgtcaaagagatcagtattatcaggcctgtgtacctacacaacatgtttcctttcgagaggtacatgggcgttttgaagaagtatgttcgtaaccgtgctcgtccagaggcaagcatcgccaagggttatggaacagaggaggtcatcgaattttgcgtagaatttattgaagaccttcacccaatcggggtacctgaatcacgccatgaagggagactacggggaaagggaactctcggaaggaaagcaataatgacgatagacaacaatttattccgtaaagcccatttcacggttctgcaacaatcttcattggtagctccttacatcgaggagcacttggctctagttcgcgccaggaacatcgataagtccgatgcatggattacacggcatcacattgatactttccccgcgtggctacgacaacatctcatgggtaacgagtcgatcaaccaacaacttgccttcctggcgaggggaccgtctgggtcgatcgcaacattccagggatatgagatcaatgggtacacattctacacgagagcccaagacatgaagagcacgaaccaaaacagcgctgttcgtgtcgatgccatgggacacgatggaacaactagcacgtattacggtgccatcgaggccatatgggaacttgactatggtcctccgaaggtccctctgttccggtgccaatggattaggttgactggtggaggcgtaatgattgatgacagtgggatgacaacggttgaccttaagaaggttggatactcggacgaaccttttgtccttgccaatgatgtaacgcaaatcttttacgtgaaggacacgtctagcaaaggaaagaagggcagagggcctgacgagcctaagcgtcacgtggttctcccaggcaaaagaaaaatcgtcggagttgaggacaagactaacgaggattacgatcagttggatgggcaaccccctttcacggtgacgattgaccctagcatccttctatcaactgaagacaccccttactcacgtagcgatcacaaggagggaacaatagtgaggagaaagtacgtgcggtcaaccgtcagcgccgatgtattgccgtaattattgtgtacacaatgtaaactattttggatgtattgattaaatcaattgatgtatggcatatgttaattacgcacgattatttgaggttttaacaagtttaaatcatgtatatgctagttatatgcgataattacaatttttaaattttttaaatcatgcatgtggcatttatatatgttaattagagtttttaacaattaattcaatatcattcatatgctaattatatatgactattcgaatttttaaaattttcaaatcatgcatgtggcattcacatatgttaattagagttcttaacaattaatttaatatcctaattatatatgattattacaatttttattaattttaaatcatgccgtatgtatatacatatgttaattagagtttttaacaatttaatatcattcatatgctaagtatatatgattattagaatttttattaattttaaaacgtaatatttgcttattacgttttatccacttaatttattacagacagtactaattttccgtagtgattgtcattaatttttgtactttaaataaatttaatgcattattttctattttagaaacacatatgtaatggaaaataatactcagtgcgcttatcagtagtcccggttcttaaccctaaccgggtttaaaaaatttttggaaatagcgggaaaagatctttattcctggttga

SEQ ID NO: 4355 - DNA, 3633 bp, Oryza sativa
gcatacccgatataggtagggctcatcccatatatgacggtgactttcatacttcagttttcgttgattttcccctggtggtatgcacttggataccatgtagtttactatgttagcatatcacgtgttggagtcgcgaaccgtcatcagcatgtcatctctcaagagatcatttatcggttgttcctgcatgttagtgatgtgcaatctggacaaatgatctgctacataattttctactccctttttatctttaatttctatgtcaaattcttggagcaacaaaatccatcttaagaggcgtggtttagcatctttcttagtgagcaggtatttcaaagcggcatgatcagtataaattatcaccttggctcccactaagtaagatctaaacttatcgatagcaaaaacaaccgtgagcagctctttttcagtagttgcataattcaactgagctccggttagagttttgctagcgtaacagattgcatgatgctttttatccttggtttggcctaagaccgcaccaacagcaaagtcacttgcatcacacataatttcgaagggcagagtccaatcaggaggttgaatgattggagcagagactagtgcctttttgagaattttaaaagatcttaggcacgcgtcattgaactcaaagggcgcatccttggctagcaaattagtcagcggcctggctattgtagaaaagtccttgatgaaccttctataaaagccggcatgtcctaagaaactgcagattcctttgatgttcacaggaggaggaagctgatctataacatcgattttagtacgatcaacttcgattcctcgttcggacactcgatgcccaagaactatccctttacagaccatgaagtgtcacttttcccaattaagcaccaggtacttttcttggcatcgttgtaagaatttgtctaaattctgcagacaatgaccgaaagtctttccatagaccgagaagtcatccatgaagacttccatgatgtcttcgatcatgtctgagaaaatagacatcatacatctttggaaagatgtaggagcattacacagtccgaaggacatcctacggtatgcataggtgccatacggacatgtgaacgtagtcttactctggtcctccagatggataggaatttaatgatacccgtaatacccatcaaggaaacagaaaaacgaatgatttgccagctgttccaacatttcatcaatgaagggtagcgggaaatgatccttttttgtagccttgttaagttttctgtaatcgatgcacatcctccatccggttacggttcgttgcggaataagttcgttttgagcatttgcaacgactgtcattcctcccttcttcggcacaactggactaggctaacccactcactatatggtacgggataaattgatcccggcatgcaggagtttcaagacctctttctttacaacctcttgcatttcattattgagccgtcgttgaggttccctggagggagtactcttggggtcaataggaatacgatgggtgcaaagcgcgagattaatccccctaagatcttgaagtgagtagccaagtacagaacgatgcttttccaatacggtaggaagacgttgagtctcgtctttagagagcttgtcacttattataacaggggcctctctgtcattgtgtaggaaagcatatcgtaggcctagaggtagaggtttaagctcaagcggaggttgaggtggcggttccatgattggcaggtcgagagtctcaccgggatctgcttcttccttgatgaaatcggggacctcatcttccagaagggcctcgggagactcatgaggaggaactgcggtaacctcttccactaactcaatttctgggagagggtcggtcaaggtgatccttgcccgtgaaaatggaattgagaattcattctctcccagtgttattttgaggctacctaaatgaggtgtgttgataagaagttgctcaatgggtagcctgattaggatgtcaaaatcttggatttcaaagacgtggaaatccaagattgcctccctttcttcaaagtagacaagtacatcttgtacaatctcaaatccttaaatgatatttccgttcggatgtttgaagaatttgtttatcggggtcactgccttatcgcttaaataagcgaatgcaaaagactcagagacgaggttggccccgacagttggactatagagaataccgacatcgttcccttccagatggcaaggaatgattcggggagcgcatttatccgaattacttcggatgaaagctctacctcccttagccattcatcgctcattatggatgttaactcccggacagtttctcgtaggaacccgagttccataggattgggaggtgacaaaggaacgggtggtttccttttgctaaaatagttcagggtattgccgtagtctttgtcaaaaccgtccctgaacataattgtggcacaatccggaacctgaatttcttcattctcgacaaacggctgctcaggaaccttttcatcaatcgagctagcagaagtggatggttcagtgagtggctcgatcgttagaggttccactatcttggacagggatgccttcggctggggttcattgggctgcgtcatgaaggaagtattttctaggatgcgatccaaaattgttcttccttctgacggcgttttgtgcatgaacgaccctccaacggttatgtccagatagaatgcagattccttatccaaacccgtatggaaatattgcagaagcacatactcgggtaaggacagggttggtccggattgtactaaattagtgaatctggaccaagttgcaccgattgattcatttttgatctgcttgaaactaagaatttctactcgaaaggcagtaatacgagtaactggaaagaaggcaagacagaatctgtctcacaacttttcctagctaccgtttacacatccaacggtagaggtgtaccattgctttgctctctcttgaagagagaacgggaacaatttccaccgcacagtttcttgtctcatgccacgaatcttaaggcatgatcaaacttgttcaaagtctcgcagatgatggtagggattttctagatcaaagccagaaaaaggattttccctaaccgtactaattagttcaggacgaatttcatagccagttgtataaatgggcttcgatgaaggaggtggctcatagaattcgccccgaggagcagacatctcaaaacgaggttgctccatggtcgagaagagtttgacaggaatacttctctaggatagcaggggtgaaggtagactaaaaaagtaaaaaggatacaaggatgaactgggttcggaaatgatcagcaaccgttccccggcaacggcactaggaatgcttgttggtatttaatacggttacagataaaatctgccaccgcacggatataccgaggtagcacttcccctacggagtattccaagggtatcgaatccaaatgaacgtgtatggtcagatcttcctccggttcatccaaggacacaaagtaaatgataggccaggatagagaggatttactagtgagagacagtatctagggaaagcttaacttta

SEQ ID NO: 4356 - DNA, 9266 bp, Oryza sativa
gcgtcggatgtttcattatgcttgtttgatgacttgaattattcacttcatctctcaaatataatggaaggtctggagagcctatgacagcatggtatcagagcaaataccgactacaggagcccccttaagttgtcacttagaattgcttcttaaaaattattttgagtgctatgctctcagttacaaattatttgcaaaaatcatgttcaatcttatatctcatccttctttagagattattttactttatgtctcatgttttgattttaaaactcttatcttgctctataggaccgaaacattttggaaatactatttttgttgaattttatttgaaatcacttaataatcacagcaaaacagtaacatagtgttttgaaaagttttgaaatccatttgcaaactactcctatgtattagcacggatttctaaaatatcgggttaaacatagcccctagtaaatgggttttgaaaatgagtcgataaaacttaaaacttgctagacaatattggaattccatctccctatgttatctctgaaccaaaaatgaatttggtgggattttgtactttcctctcccgatatttcaaaatttcaccggtatggcctaaaatgtgtagttgggtatagaatagaatttgctgtgcttaaccctctagattgtttgcttagatggaccacccaaaattcatctagcctctggaccaccctaacataatacgactaaaaggtgataaaatttatacaacctaaaacttgattaaagtttcattttgtgccggttgttcttttttttttctggaatcttgagtcagtctgcttgttatttttgtctagactaaaccgtaggtgataaacctgagaattttttacatgcatcatgtagactaacccagtaagcatcatgaattttggcataatttttagacccgtgcatcatagtgaaacaatctagatagttagcataatcatattgtggaaatttgtagtagctgcattcattttttttcatgtagcccaaaccataattgattaaatatgcatctttttacagtagttttcatacataacctgtaggctccacgaattttggttgaatttttgagtcattgcatcatggcataaaaattcatataattctgtatagttctgtcctgaaatctgtaggttgtcagtttcacaaatttgtgtagcctaaactacaaatgataaagtcatgattccttcagggtagctcctaatctaacccatctatctctctgatttttgtcaaaatttttgtatctttagagctagacctaaaaatttgattaagacagtaaagtgatgaattccagcacctagcactcatgtcagattagctcctaccttctgaaatttgttaaaaaaaaaaaaacctagtgcaaaaaaaaattattttattttaagggggatagtaagccatatttgtatcaaaaccaaagataaaatttttaaccttgcataattcttcttagacctaaaatagaaatcccattctagtaagccctgtaccgttaatatgaccagaattaatgattagaggtctatataaccataggttgttaaaaaaatgtgtgtcgaccttaataataacagtaaggaaaacctttaatttgtaagtgttaattttagaggtttttggctaatccgtgttctaaattttattcttatagatgcctaccatgtacacaccgtactgctattgccgtgggttcacctggaactcaactcagcatgtgctatggcttatgcttcagtacgcccgattcacctatccacctgagtatcatatcctcaagaaacccattggaacatcccaaaccgcagtcatggttcgtgtaagcattcggggtagaactccactagagaaagaccttcaatatactggttatgggtgggatattaagtccgctttgcaaaactgtgcttatgttgctatcatccgccttcgctatgagctacctgagatagaagaattttactgctacgttccatccttaactgagggagctcaacacactacctacccagggttagctgaaataggtgtaggactacataccccataccttcaacttgcaaactttgtgcgctcactagatatgctttatcgctcaacctttgctgagctgcaacgcgtccgcaccagggtagccagtttagaaagaatcattatgccaaggtatcgccagggacattatacaccggagttcatgtttggtgaggatgccatgcttgcaccagcagaagatataccaccacctgttggaatgtatattgaaagaagcccaccttcgcgcgtcgatgttaggactgcttatcctccacttggaaccactggaccgtatggaccgccagagtatgttcaatggtatggtcgagtcttcaagctgaggatgagagattaatcaatagtcctatctaacctctactgccacggtagtatgacttaaggacaagcttaaggaatagtctaggtatgtggtggcccattttggaagaaaatcgtggtatgtaatatatgtaatatggctgccatgtactccatttatgtaagaacttgttggatggatgtaatagtaactaagaactcgtttgtccttaatttagaaacctctgtgcttgctgtccagaactttggaaaatctgtaaacataagttcatctaagttagaaatctggttataagctcctgttaatatgaaccaacatttatcttgttggaactaacttctctagtgtcaatttaactaactatctaagcttccataaacccacaactgagtagaacttgccactcacccgcgaaataaaagtttccaaatgttttatggtagcaagtctgtcatacaacttaaaagaaattattatctgctgtcaatgtcaatcctctggagatagtcataacttaagccaaccctacccaaatctcggggacgagatttattttaagggggatagactgtaacatacccgaaattttaggacttaaaatttcttgtcaaaatagttagaggttaacttctccaaatttcgagagccaaaaatttccgttttaatttaggtgatgatcaacttaaaccattgcatgattaaaatttgagaacaaaataaaatcttttcattcccaacattagactagaaatgtcaccaagcatacatgtacataatgcatgcctaggctcgagttctttgtgcatttggagttttggacttgtattccataatagctcccatgagcataatctaaaagaattatttcactaaacaaacctatagttaatcttgagtgataacatgtggacttaatattaaactcaaatatcatcttctcagtctaaaagaagtttaatgtaatccctataataatattagatgcaattatgaagtgggaacacatatacaaacaaaggtcatcttaattctctaaaatattttgtgcaagataaaatcatggaaaaatttatgtggacaatgattagcacaaacttatcctccgtaatttggtaacgtgttaacactcaagttgatatctcaaattaatcggtcgaagcagacaactaaaagaaatcaaattaaattttaatcggctaaaaccatatttcatccaaaagtacatttaactgcacataagtgaacatggaaaataatttattcaaatactagattagttatcatgaataaatgtaatttttctagaatttttcttctctgtttaagcctcctaaaaattcaatctagctttctaatagcccatctttgtttaatttctgtgagcagtccacccattatttttgagtgcaaccaaagaaaatggaatctaggtgtaatcatttacctccagtaaaatcaacactaattaatttggtccacacattgaattatgtagtttcaaagttagaggagaaaataattccgaaaattaatctaaaaatcaagtttacccagaatcttacccaaccctctcaccctagcctagtttgccacgacctggacccacctgacagcctcttaagcttgccttgactctgtccatcacttcctccactgttccagccgagagagggagagattgagcgagccgacgcgtggccgcaacgtgtcgtcgatctcggtttcccttttctcgctctctactcctcccagacgcgtcgccattctccacacatcactttggagctgaagaagccgagggagaggttctctgcctctccgtcatcctcaacctcgccgccggtcgtagtgacgacgaccttcgccatctccgtttgagtcaaggtcacctccatctctttcgcgttcccatctctccacacaatgccgagcatttcctcttttgacctaaacccctctcgtgcagtgcatcgccgggaacgcaagccacgtcgacaacgccctggagcacgcaccggagcgccgccgcttcaaccatcatcgtcgtccggccattctcattcacctcagagaaagctgctgcgccattgtcattgcctcaacctcctcttcaaaacgcctcaagaaccccagccggaaacatcaagaacacggagaacacatccttttcttcaccggcgccaatctaggatcgcctccgccgtcatcgtcgattaccgctgcctcggtgagccattgttcgattccttgcgcatacaccatctccttgacctcacaaccctcgtgcatgcttgcttgaagcagctcattgtcccgttcgagccgtcgtcgttcacccgaggaggagcgccgtcgccgagccgttccacaagtcaccgctgccgccaagacctcgacaaccctagctcgacccacggtgagcatcctgaagtctagaagaccacatgcatgcatccttttcgttcgtaatcgacttccatgcgcacatgcactttcaccccaaaaccaccgccgctcacactcgccatcggcgctactccgatgtcctctaaccaagaaaactagaggaatggaatcgcgagagcttgctcttcattttatcttttgacctcaacctcaagcgagccaccgtttgccgccggcgagctccagatcgagctcagccatggctagctctgctatgtctagagcagagggatgacttccgtgaattagattaagtgcagggatccgtttacaattatagaaacacactgacatatgggcctaggactgcgggttgattcctagaaaactcaagggcctttgtgcatattggtccctcacagccatgtggacccatcctttaaaatctgaagaaaaattaggaaaatgcccaaacaattatatgtttagcagaaaaatgcacaagttgtaaaatctatataaaatcaaatatagctcattttgaagtgattccagtttctgtagattcttgaagttatgaactttattccaggaatataaaacttgacactcactgtacaaataatgtctctaagatttatctaagataagtcatgcataaaacatgtacaaacttataaaatacaaagaaaattcatttcaactcattttgaaacaaactcaaaaacttcagattcatcatcagacactctctgattaggtaaaataaaagtaatgacttactttgcatcaaaagcctctaaaactattatctttaaaatgactagttttagataagctaaactttagaaattcatgtagaacccaatttagcttcaatttgaataaacttaagttatgtaggatcactaacacatgtatttccaagttatgaaataatattatatacttgctgtgtagtaaaagtctctaaatattcatataaggatttactaacatagagcagccattaatttgtaaaacttgtagaaaattcatttttagtccaaatgaaatgaacaaagtttctatagaaccagcaaatagttatcttcaacatagtaaaataaaatttggcaccttctgtagagaacattgatcaaaaccttaacttagtgaaataagaatttaaacacatagtgttgtttaagtaatacataaacatgtataagtatatatatacactttaggtctaattaaacctaaataaaaacttgattgaccagtgaagccatagttccatcctcatccactaaacttagaagaacttggctcatataacaatttctaggttaatataatatattgctagtttagattaaagcgtctctactttataaaatatgaaccatagtagtaaagaccataaacatgtgagataaaaatgttttagttaaccaaattattccttttattcaacttaaacatgaagtagcatgttctgaacctataactcaggagtcatacatatataaaacactatatgcctaaaacacgttgtaacttgtaaaatgcataaagaattcattataaatccaaaaattgtgaaaccaaatgtgttagtcttagaaaacacatctccacacccctgtgaagtctaatctagtaaaaatcactttacaaaagtattccataacactacctaagactatactactataaaccgataaaacttctaaaaattcataactccctaatggaataagataaagataaaataaaaattctttcacctaaatttattttagatcagtaccaacccactgtgcataaatcatgcattttagagcattttggattttcaactctttcggtgtttaattgcatatcgtgtcctttatctagataattgcgtaatcggtgaagaagtggattaggtgctaacaattctctgatcaaggaaagttttctcctcccatcctttgaacacattgaatcccatgatttgaggaatgaaaatatttgtttacaaagttgcatgtgaacttagactatatcggtatttgaaattgggttaaggtagttatgacctatttgctacatattccaccttgaataattgatcctcttgctgtttgaacccctagaaatggttagagtacactctttgtgctcaaatgggtttatatatgctctatgtgcaactacttgcttagccatgcttagaaatatgcaaatgctcattccatctataattaaaatgtggtttgatacttgaacctttgctggaataaaatgaatatgatgagtatttgcgaactaaaatgtgtaaaatgtgattttacacttgggcagcaagtggtgtgcatatagtgttagttgcataccgatagggggagtgtttgcccaagtccataaggaccgaacttgtgtcacccatttaaagttattcgtacatccacatgtgctagtatgggatggcctaagctgattaatctatttaggactagccttgcattctggtaggccggtgtgtatgagttagtcgataattctgaggaattagtcgatgattcagaggaacttcctatttgccccgacgtggtagtttaggtgactaagtctgtccaatacaacggtattgtgccacgtgggtgggttcccgttgtgtccgccaccacggcgttaagtttaaggcgtgggcccgccacttaacggttctagacatatttccaagtatgcctaggatggaggaacacgtatcgtgctggtgcaaggctagattctaagtagtgtaaaggcttcgttatgacctctagatcacattcaacatgaagagtgtgatggagtcttgcaaactcaaaacaaactagagagttcatatcatgtgggtaaagctgtacaaactctgcagagttctttaaactaattgattagccgtgctcacggtcatgagtgctttggtgatgtgtcatgagtatagactatgttttaaaaatgtaatcatgtgacattggtttgaaattgataaatgtgttgagttgtgtatgtggtgatacattatgacttattattaagtatggcaataagagattgtttatgacggaattatgaagaagctaataatgaaacttaaaacttgtctttgttaattgaagcatcaactcctttacaaaagaattgcgaaacaaaacttgctttatgctgaaaatgaactacatattgccttcctttgaatatatgccttacatgtagtatggtaggattgacttgtgcttgccagtacattaacttgtttaatgtactgactcttgctgttgatataaccttttgtttgcaggtttagtcttagtctttgagtgatgcgggttccgattgcttcttctaggatgagaacttaatggggtatacccctagtcggtgtgcttgtgtttgggtagtcaagcttccgctgttctctaataagtctatttggccggttggcctatgtaattattaagttgttgtaagtcttaagtttctttcatcttagttgtgtttgctatgtataatcatgcttaagatgaaagtgtgaatctagtgcacatcctgggaactagattcacatgagtatgagttaggaatatttgggaggttgcagatctttagccatttttgtcaagtctcctgaatgtgtaacacatctggtcgccgccttcgagtggtttgacgggcacatctcaggctgaagttgactggcaggctaagggcccagcaatgtctccaatattcctctctcgaggcgtcggatgtttcattatgcttgtttgatgacttgaattattcacttcatctctcaaatataatggaaggtctggagagcctatgacagcatggtatcagagcaaataccgactacaggagccccttaagttgtcacttagaattgcttcttaaaaattattttgagtgctatgctctcagttacaaattatttgcaaaaatcatgttcaatcttatatctcatccttctttagagattattttactttatgtctcatgttttgattttaaaactcttatcttgctctataggaccgaaacattttggaaatactatttttgttgaattttatttgaaatcacttaataatcacagcaaaacagtaacatagtgttttgaaaagttttgaaatccatttgcaaactactcctatgtattagcacggatttctaaaatatcgggttaaacatagcccctagtaaatgggttttgaaaatgagtcgataaaacttaaaacttgctagacaatattggaattccatctccctatgttatctttgaaccaaaaatgaatttggtgggattttgtactttcctctcccgatatttcaaaaattcaaccggtatggcctaaaatgtgtagttgggtataagaatagaattgctgtgcttaaccctctagattggttgcttagatgg

SEQ ID NO: 4357 - DNA, 9198 bp, Oryza sativa
gaaccactctagcgcctgatctctctgcaactttctgcagagttcagtgcttaacaaaaacaaactttggcaaacattggggttaacaccaatgagccacattattcatagcaagtacttacatgattggaaagatagaaccaagcacctactactattttattcatgggaaaggaaacatctaattagcataatacttattttccttccctatctctatgaatgcacgcttgattttagcgcacaaaccgcgactaagggtatcgaaattatttctaatgtcagcaagctctacccctagctccgcgttgcgatccttaagctctatgttctccttgcggagtttcttcacttgtgcggcgagcttatggatcgagggctccggcgatttcacctcctcttcttggaattggctgggagccctcacaattggagggggcttcaaatgacgcttcaccttcataggtggagggctacgggattctgctgccccctccttttccgatgccatcaaaggccgtagtaaactcttaccatacccactgccgggagttctcactccttggatgcggaatcgctcctccttcggagtagacggagtagcggtgggtgtggtatacttgtggagcatctcatctccttccttggtgaacagggtgcccacatagcgctcggcgagaggtggcgcggccttcccgtcatcttggaaaagccgtcgtgccttcaacaagccgagttctcccgttgtcggccgtcgcgtaggtgaatccccccagatttttgtccttgtgacatggcgaggggagagggatcacgctgccgaacggggctgagaagggttcggccgaaccagggagctcgtcgatcggctccaaaattgcaggggagcctggcacagctgcaaggggttgagcccatacagcgtttaccccttccatcgtgtattcttccaccgggatcaattgatttgccggtgtcgcctctccggtgaggtcgtacgtggaattggatgaagagccgatgaatgtaatcaaggatttgccagccattggtgggtatgagtgggaattcgaggaattgggttggattggagaggagagtatgcaaaggtggagagaaagaggaagaagaagtgttctagcgagatccgagcgttctacctccaaatgcgcatctaaacaaactaggaacgagcgggggagagcgaagttcaaaaatggggctgatcgggcgcctccctggctcggccgaaccagcaccttggtgggtccgattgagctccatttttttcctaggcctaataagtcctaaactaagcacaaaaatgacaacttaccgggttttaagcatgcaatagatgagatcatcatggttcataatcaactaatttaacaacatccacttcttcatctaaagtttcatttggctcaaggaaagtctttaagcgttgaccgtttaccttaaatatgttaccgaagtcatcgcggagtgtgattgccccgtgcgaagaggtgtcgatgacgtcgaatggtccttcccatttgctgcgcagttttccgtggccgaagagtttaaccctggagttgaacatcagtactttgtctcctggcttgaatttcttgatttttatccttttgttatgtaacgtcccgccttcccccaagccgggcccacttacatctgatagctttcataggtcatagactgccctcacagaccaacacatgtcttttctgcacattttgtcctcactcgtgtgcacccgggaaattcttcccggtcggtcacccatcccaaattgctccaggccaagcacacttaaccctggagttctttggagattggcttccggaaaagaagttgcaacttgttgatatgagtattctattaatcctattaagccctaggccgggatgttacaccctcacccccttaagagagatcgacgcccccgtcgatcaaccctaggccaggaacgtcctctcttggccacgcccatgtgtccaatgacagcgcatgtgccatgctgtgtaaccactccaggtctacaccagccatgcgcaccatgcctgcgcaactgcgatacacgcgcccgtgaaaccgcgagagtcggctctgataccattttgtcacgtcccgccttcccccaagccgggcccacttacatctgatagctttcataggtcatagactgccctcacagaccaacacatgtcttttctgcacattttgtcctcactcgtgtgcacccgggaaattcttcccggtcggtcacccatcccaaattgctccaggccaagcaaacttaaccctcgagttctttgtgcatttggagttttggacttgtattccataatagctcccatgagcataatctaaaagaattatttcactaaacaaacctatagttaatcttgagtgataacatgtggacttaatattaaactcaaatatcatcttctcagtctaaaagaagtttaatgtaatccctataataatattagatgcaattatgaagtgggaacacatatacaaacaaaggtcatcttaattctctaaaatattttgtgcaagataaaatcatggaaaaatttatgtggacaatgattagcacaaacttatcctccgtaatttggtaacgtgttaacactcaagttgatatctcaaattaatcggtcgaaacagacaactaaaagaaatcaaattaaattttaatcggctaaaaccatatttcatccaaaagtacatttaactgcacataagtgaacatggaaaataatttattcaaatactagattagttatcatgaataaatgtaatttttctagaattttccttctctgtttaagcctcctaaaaattcaatctagctttctaatagcccatctttgtttaatttctgtgagcagtccacccattatttttgagtgcaaccaaagaaaatggaatctaggtgtaatcatttacctccagtaaaatcaacactaattaatttggtccacacattgaattatgtagtttcaaagttagaggagaaaataattccgaaaattaatctaaaaatcaagtttacccagaatcttacccaaccctctcaccctagcctagtttgccacgacctggacccacctgacagcctcttaagcttgccttgactctgtccatcacttcctccactgttccagccgagagagggagagattgagcgagccgacgcgtggccgcaacgtgtcgtcgatctcggtttcccttttctcgctctctactcctcccagacgcgtcgccattctccacacatcactttggagctgaagaagccgagggagaggttctctgcctctccgtcatcctcaacctcgccgccggtcgtagtgacgacgaccttcgccatctccgtttgagtcaaggtcacctccatctctttcgcgttcccatctctccacacaatgccgagcatttcctcttttgacctaaacccctctcgtgcagtgcatcgccgggaacgcaagccacgtcgacaacgccctggagcacgcaccggagcgccgccgcttcaaccatcatcgtcgtccggccattctcattcacctcagagaaagctgctgcgccattgtcattgcctcaacctcctcttcaaaacgcctcaagaaccccagccggaaacatcaagaacacggagaacacatccttttcttcaccggcgccaatctaggatcgcctccgccgtcatcgtcgattaccgctgcctcggtgagccattgttcgattccttgcgcatacaccatctccttgacctcacaaccctcgtgcatgcttgcttgaagcagctcattgtcccgttcgagccgtcgtcgttcacccgaggaggagcgccgtcgccgagccgttccacaagtcaccgctgccgccaagacctcgacaaccctagctcgacccacggtgagcatcctgaagtctagaagaccacatgcatgcatccttttcgttcgtaatcgacttccatgcgcacatgcactttcaccccaaaaccaccgccgctcacactcgccatcggcgctactccgatgtcctctaaccaagaaaactagaggaatggaatcgcgagagcttgctcttcattttatcttttgacctcaacctcaagcgagccaccgtttgccgccggcgagctccagatcgagctcagccatggctagctctgctatgtctagagcagagggatgacttccgtgaattagattaagtgcagggatccgtttacaattatagaaacacactgacatatgggcctaggactgcgggttgattcctagaaaactcaagggcctttgtgcatattggtccctcacagccatgtggacccatcctttaaaatctgaagaaaaattaggaaaatgcccaaacaattatatgtttagcagaaaaatgcacaagttgtaaaatctatataaaatcaaatatagctcattttgaagtgattccagtttctgtagattcttgaagttatgaactttattccaggaatataaaacttgacactcactgtacaaataatgtctctaagatttatctaagataagtcatgcataaaacatgtacaaacttataaaatacaaagaaaattcatttcaactcattttgaaacaaactcaaaaacttcagattcatcatcagacactctctgattaggtaaaataaaagtaatgacttactttgcatcaaaagcctctaaaactattatctttaaaatgactagttttagataagctaaactttagaaattcatgtagaacccaatttagcttcaatttgaataaacttaagttatgtaggatcactaacacatgtatttccaagttatgaaataatattatatacttgctgtgtagtaaaagtctctaaatattcatataaggatttactaacatagagcagccattaatttgtaaaacttgtagaaaattcatttttagtccaaatgaaatgaacaaagtttctatagaaccagcaaatagttatcttcaacatagtaaaataaaatttggcaccttctgtagagaacattgatcaaaaccttaacttagtgaaataagaatttaaacacatagtgttgtttaagtaatacataaacatgtataagtatatatatacactttaggtctaattaaacctaaataaaaacttgattgaccagtgaagccatagttccatcctcatccactaaacttagaagaacttggctcatataacaatttctaggttaatataatatattgctagtttagattaaagcgtctctactttataaaatatgaaccatagtagtaaagaccataaacatgtgagataaaaatgttttagttaaccaaattattccttttattcaacttaaacatgaagtagcatgttctgaacctataactcaggagtcatacatatataaaacactatatgcctaaaacacgttgtaacttgtaaaatgcataaagaattcattataaatccaaaaattgtgaaaccaaatgtgttagtcttagaaaacacatctccacacccctgtgaagtctaatctagtaaaaatcactttacaaaagtattccataacactacctaagactatactactataaaccgataaaacttctaaaaattcataactccctaatggaataagataaagataaaataaaaattctttcacctaaatttattttagatcagtaccaacccactgtgcataaatcatgcattttagagcattttggattttcaactctttcggtgtttaattgcatatcgtgtcctttatctagataattgcgtaatcggtgaagaagtggattaggtgctaacaattctctgatcaaggaaagttttctcctcccatcctttgaacacattgaatcccatgatttgaggaatgaaaatatttgtttacaaagttgcatgtgaacttagactatatcggtatttgaaattgggttaaggtagttatgacctatttgctgcatattccaccttgaataattgatcctcttgctgtttgaacccctagaaatggttagagtacactctttgtgctcaaatgggtttatatatgctctatgtgcaactacttgcttagccatgcttagaaatatgcaaatactcattccatctataattaaaatgtggtttgatacttgaacctttgctggaataaaatgaatatgatgagtatttgcgaactaaaatgtgtaaaatgtgattttacacttgggcagcaagtggtgtgcatatagtgttagttgcataccgatagggggagtgtttgcccaagtccataaggaccgaacttgtgtcacccatttaaagttattcgtacatccacatgtgctagtatgggatggcctaagctgattaatctatttaggactagccttgcattctggtaggccggtgtgtatgagttagtcgataattctgaggaattagtcgatgattcagaggaacttcctatttgccccgacgtggtagtttaggtgactaagtctgtccaatacaacggtattgtgccacgtgggtgggttcccgttgtgtccgccaccacggcgttaagtttaaggcgtgggcccgccacttaacggttctagacatatttccaagtatgcctaggatggaggaacacgtatcgtgctggtgcaaggctagattctaagtagtgtaaaggcttcgttatgacctctagatcacattcaacatgaagagtgtgatggagtcttgcaaactcaaaacaaactagagagttcatatcatgtgggtaaagctgtacaaactctgcagagttctttaaactaattgattagccgtgctcacggtcatgagtgctttggtgatgtgtcatgagtatagactatgttttaaaaatgtgatcatgtgacattggtttgaaattgataaatgtgttgagttgtgtatgtggtgatacattatgacttattattaagtatggcaataagagattgtttatgacggaattatgaagaagctaataatgaaacttaaaacttgtctttgttaattgaagcatcaactcctttacaaaagaattgcgaaacaaaacttgctttatgctgaaaatgaactacatattgccttcctttgaatatatgccttacatgtagtatggtaggattgacttgtgcttgccagtacattaacttgtttaatgtactgactcttgctgttgatataaccttttgtttgcaggtttagtcttagtctttgagtgatgcgggttccgattgcttcttctaggatgagaacttaatggggtatacccctagtcggtgtgcttgtgtttgggtagtcaagcttccgctgttctctaataagtctatttggccggttggcctatgtaattattaagttgttgtaagtcttaagtttctttcatcttagttgtgtttgctatgtataatcatgcttaagatgaaagtgtgaatctagtgcacatcctgggaactagattcacatgagtatgagttaggaatatttgggaggttgcagatctttagccatttttgtcaagtctcctgaatgtgtaacacatctgatcgccgccttcgagtggtttgacgggcacatctcaggctgaagttgactggcaggctaagggcccagcaatgtctccaatattcctctctcgaggcgtcggatgtttcattatgcttgtttgatgacttgaattattcacttcatctctcaaatataatggaaggtctggagagcctatgacatgtcatgccagcgcttcgtcctttctttatatatctttgcgttgtggtaagccatttctctccattcctcaagttctgcaatctgcatttttctccattctcctgctccctcaaaatccatgttcgaattcctgatggcccaatatgctctatgctcaagttctacgggtagtcgacatgacttcccatagactatctgatatggggacattccaatgggtgtcttgtatgctgtccggtatgcccacagtgcgtcctgcaatctatccttccattctgttcccattttgttgaccgtcttttgcagaatattcttgatttgtttgttcgatgtttctgcttgaccactggtctgtggatggtaaggagtggccacgttgtgtttggcttccatttctcgtaggaggtctctgaaggttttgtcaatgaagtgaaaacctcggtcgcttatgaccattctgcgggtaccaaatcttgggaagatggtttctgtgaacatcttcttggcgtgcctcgcatccgcggcgctgcacggcatagcctcaacccacttggagacatagtcgactgccaccagaatgtactcgcagttacgagacttagggaaaggtcccatgaagtctataccccaaacatcgaatatctcaacttgcaaattgtatgtaaggggcattgcatcgcgagcagtgattcctccttgcctctggcagcttgtgcatcttctgatgaattcttttgagtcttcgtacattgtcggccagaagaaaccactttgccagattttggcctgggtgcggaatgcaccgtaatggcctccatagggtgaggcgtggcatcgttctataatcttaagtccttcatcagttggcacacatcttcgtagtaagccatcggagcatacccgatataggtagggctcatcccatatatgacggtgactttcatacttcagttttcgttgattttcccctggtggtatgcacttggataccatgtagtttactatgttagcatatcacgtgttggagtcgcgaaccgtcatcagcatgtcatctctcaagagatcatttatcggttgttcctgcatgttagtgatgtgcaatctggacaaatgatctgctacataattttctactccctttttatctttaatttctatgtcaaattcttggagcaacaaaatccatcttaagaggcgtggtttagcatctttcttagtgagcaggtatttcaaagcggcatgatcagtataaattatcaccttggctcccactaagtaagatctaaacttatcgatagcaaaaacacccgtgagcagctctttttcagtagttgcataattcaactgagctccggttagagttttgctagcgtaacagattgcatgatgctttttatccttggtttggcctaagaccgc

SEQ ID NO: 4358 - DNA, 83838 bp, Oryza sativa
  unsure (1)..(83838): unsure at all n locations
tagccagttgtataaatgggcttcgatgaaggaggtggctcatagaattcgccccgaggagcagacatctcaaaacgaggttgctccatggtcgagaagagtttgacaggaatacttctctaggatagcaggggtgaaggtagactaaaaaagtaaaaaggatacaaggatgaactgggttcggaaatgatcagcaaccgttccccggcaacggcactaggaatgcttgttggtatttaatacgggtacagataaaatctgcaaccgcacggatataccgaggtagcacttcccctacggagtattccaagggtatcgaatccaaatgaacgtgtatggtcagatcttcctccggttcatccaaggacacaaagtaaatgataggccaggatagagaggatttactagtgagagacagtatctagggaaagcttaactttaatcctaatgcaatacttcaggcactggcaacccgctgttcccagatgtcgctctagtacgtacccggaaagggaggacttaagtgatctcaagggctgtcaccacctctacacctacctcaaacgtaccgtgggatacgcagcaattactggataacaattacttaaataccacgtctaagcaattaatatctactttagtgtttataactcatcaaagcaatcactatattttagttgattatagtgaacaataatcccgtatgctatttaggaactaaccaagagataattctcacaagataaatctaaattattcaagaagaatattatattgaattcagagtaataaatagaataaaagaaataggagaagattaccgacaactccggaattcttccgacttcttctactctactctcttcctattctagtgtacaatatagtacaatagagcctcttataattcagctcaagcttggaagtgtgtgtgagagtgaatgaagtgaggtccttttatagggcagttatgacggttgtgagaaggggaaatgtccgaactgcaccgcaaccgtcattgggagaacatctggagcatccacgccaaaccccaggatgaacggtgatcggggggttcggccgaaccagagggttcggtcaaacctgggctgggccctcctggcctggccttcggtcggtggactctcgggaccttcctctattcatttctcggagttttcggttgatttactgatgtttcgatgaagttcacaaccctacttgtatggatacataattctcctcactttagtctgattttcctcccaacttcagggtttatcatctgcatacaaatatacaccaacacttgtggaatatgtaagattaagcacctattactatgttggatgttttattatctagactttatgaagatgttggcggtatgggattgtcatttaacaaccgccaacaatggggcatggcatcgggtccacgagattgatcgccgcaagactaaggctatgttcgtctgttcgctggagcctgttcccaactggaacagtgtgcacgaaaaataaaacggtccattaacaagtgattaattaagtattagctaatttttttttcaaaaatgtattaatatgattttttaaacaactttcatatagaaactttttacaaaaaaacacaccgtttagccgtttgaaaagcgtacgtgtggaaagtgaggaagatgagttgggaaacctgggctaggaacacagcctaagggtctgaggcagaagcggaggcgaaagtttctctttttttttcgtgaagtactttcctccgtgtgctgtgatgagatgattaaagatcaagtttctgccttaatttctcaattggagcatgatttttcattagttccattgttttcagaatggtaccaataatgttagaaggtgctttattttatacctagaaaaatgtctgttgtagagaaatgaagaggccatggtaggacaccttgccatatattttttaggaagaatggctaatatgcattggctagggtttaatatctaattttattgcagctggccatgattggagacattgccatgtataaagtgaggtatagcattatattctatattgatgccaactttaggataagggatattttacgttcctctgattcagctcatggtgacaagttattatatgacttacaggtgcagggaacacctaccaaagtaaattgctattggagagaaatagtgtgtattttggtggtatttcagacgaacaatgtgaagtacctactttgtaatttgccttaaatatatggcataatttgaattaaagctcccattaaactgattatttttactaacacaaaattttagtcatttattaaaaaatattaaagatcgtagcgttagcacgggcatatactagttttaaagatagaatgaggccgaactaaacaatgctaatttaattagtgaaaaccgaaacaacaacagggaaaaaaacaacctaaatactctgagcaacagccacatgactaattaataagctcaaagcaaagcatactccctacacaatgccattgacattagaccatctacacccccccccctcccggggattggacaaatctagcatccctaagaagcacaagtgaacaaggtcaacatcctaaccaataccaaaacacaaccccattggacttagtgttattgttgcacatgttgcccccctccccctttcttccacgtgaacgttgcacctctaactttactaccaccagctttattgaaatatgcgtaagctagattagcaaccagggagcagccaatcctacaccctattagatgggagtgctaactcaaccaggaggtgggaggtgtcatcatcttgttagatttaattctcaggatctaatttgcttagcttaacacatggtcacaaattctaagtgtggaattgagatgattactgaccggatgaactgaagccataagctttgccaattcttctgttttttcttcttctctgttgatggaaaggaagcacagagaaaacctgatgaaccccttccagtgtctaaacgatcaggccattaattttagggtttgaggttagagagaaatcatattgtcacctagcctccctccttctctttctttacataagcgacactggtggggctcgggggttatctcaattagtttaggattctgttttctgtgccgatcacacaaaaaaaagaatttatctcttagtttgtttcttgttaggataaggaaaccggtggtttagttcttctcctaatccttatcgactcaagtcgacaaaatcagctaacattctccccttgatttcgagacttacttatgagtctattaaataaaatagctcccaaggcaatgtgtcttcaacaacattatgcgtcactgagacaacaagacctatagctcactataatactcaaataaactcaagcttaacttagtgagtgttgattgaaaaattaagtccccctcatccaggatcttagtaaggctctaatttacatatgtactggccaaaacataatcttaattaatcttaatttatgagcctttagaatatggatccattagcaaatgcttagcttaataattcgatcatgggacatgtctttcacaaccatatcaatgtgttaggcagaaaacacacaacatgttgctactagaatagaaaactgtgtttaattagtgcacaacttataacagtatattttgggtggttaacatcttttgagtggtttatgagcgctattcactactcttagttttgggaaatatgattaatcataacacgctttaaaatctaacttcatcgtcgactatgcagtaagagattatttttggagcttttacatggttattgctcccctatgtgtgaacatagcttaatctgaataatcttcataaatatccacacatctcataaaataagtgtccaaatatctctaaacttctgagatcaatggactttaggaaaaaagagcatgttacttaagattgtcttgcaaataatggaaaacattattaataccagtggtttagtctggatttaattaaatactgccaagattcccagtaaaaaaaagtatgccaaatctgtatgcatccagatttgagctaatctcaagcttctgtcagctgaatcataaatgattatctttgtaacttaatgtcagcttgactaactttaattgaattctctcaaattatttctttatgtcagtgtatgacttactgatataaacccagtactccttcggaccaaaataattcatggaaaaaaattccttagtttctaagagcaatatgcattgcttgacaataaaatgtcattagaatggagtaccggtgaatgaaattcccacctttaattttcatgcacctgtccacctcacttgaattgtttgaaatttccatcagagtcaggcttaattttattaacccacttaaatggcccaatattttgactcattcagaaacttctactaaattctttattttgttcatcaatctcaattattcttatatggttcgaaaaccatttatatgaacactttaatgtcttattttgttcatccatctcaatttattcttacatgattcgaaaactatttggatgaacgcttatttttaatgtcttataaggtgaacaagctttatttagtgtttaccaccataatccgatctcataacttcatttgattttagcattagtgtcttaaatttcttaaaggaaatcggaggtcgcttatgggtaaacatagccataaaaaatcatttgttggctaatatcttaacttcgtgaaattttcacttaaagctaaacaacgccattaaaatctaagggaaagaatatctatatctcatgagacgttccaaactcccctaggtatgtgacataagagataatgacacaatttcaatgacgtcttgctttcatcattatagaataattattctcctcattcttatttaagcttagttcactaatgacggaacagaatttaaaacatcatcaatgtttgattaagtccacaaatggatttcttaggtctgcaccctatgcgtgacttgtctttccataacaaaaccctaaagttatgttatatatatttaattgtgcaagtcacaaattaagagatacaaaattctagcgtccacataatggagctatgagtcataaataaggtagaataatcttctcttattagagctcttgatgagctcccacagattgtattatttatttaatggaagcataatatcttatttttcataaacttgaatcacttaattttacttggtgatttatcatctaagtaataatagatgtcagaaatttctaagggtgaagtgtctcgatctcaatgagacgtccattctccccttgaaatgtggccgaatattaaggccataattttgacaacgtctcataatagttcaacccaaaataatgccattaatcttcttattaactactttcttaattcaggacattaagcatgtccctattttttgcaaagaacttacacaagaaaatttcaagagtagcatacataggacatagaggcaatttgatttccccttgcgaggaatatgagctttattatcattaaatttggaagttgcaacactcccccttagtgaagcttcatctttgccatcaaatgacaagattaacaagatcttacttagtttgtctcttagtcttcaatatttcttattgatttgaagagtgatgaaccaagtcaattatggtccattttgtcttagtattacaactccgaaaatgaccgtagtctaatgggagaagaatcatatgaaatggacaagtggcgcatatgaaatgtgcgatgtccatcccactaagtttgcacgccaattatggcggcaaatgtgcataggcactaaatttgtactaagcattagtcttgacaaacttctaaagttcatctcaacatttgctagatacagtttcgcaatgtcatgctcaaaattctcccctaacactaacagggatgataatcttaatatttatgagtgacatgcgaaacataacattatattggccttctcccaggctaaagatgcctctagagtttaggaaaaattagtgacattagctgcgggagacacaaggaatccttttttaatgctaagtcatactcaaataggccttaggctcagttaagtcaatgaggaataataataataattccatagactttaactgataaacaacattatttattgctgaaatattaagtggcactattattgtggttgcttgggcaaattacgtgcaatagtacattaacttgcacaataataacttaatctttatttcgctttgtatcaccattgggcagagacaaaatgaaggaatcaataaatgaaattacttgtaattcaaaatcaagtcaccgttgggcagaaatgatttagggaataaacattaatgtcttaaatcacatcaccattgggcaaaaatgatgaagttaataatttaaaatcctaaatcaaatcacgtaaggtagaaatgatataggaatgatgcccttagtgatgccatagaattaaaattaaaattcttagccatatcaccgttgggcagaaatggtaaaggaattaagcttactgacagattagatcctcgataacatcaccgtaaggtagaagtgataaaaggaattaatgcactaatggcataaataaaattctaagtcatatcaccattaaggccaaaattacagagaatatttaaaatagtgattgacaatacttagatttcttcccttaattacatcaccattgggcagaaaataattaaggaaataacaatcttaatgaaatcatctttctttctagataaacttcccgttggttccatttatcttgaaataatttactcagtattgcaagtgatcttaaataataagaattggtgattgcatataattagtttaccatggcttaatcaatcatatgcaaaataaacttagaatttcatagtcaaagcaccattggtcataaataattatgaataatcttaaaattaattccttaattatatcaccatttggtagaaaataactaaggaataaaaaattataattgtcatgcaattataataatgtgggttaaatataacttcaaatcttaatactttctagtcaaatttctcgttggttccattcgagtataaataattaagttattaaggaaatgaccatcataatgatgttgacatgaaatcataaatactttctagttaaatttccattcaactagaattaaattaaatggcttaaagaaataataatcttaataatattgacatgaaaccatattaacgttggtcaaatataatatcatatcattaatttctttctgaacgaccaaataattgatcataattttccagcaattttaaatggctaaaataatgccaaattgaattgtgtaattttgaaattaattaaataggtgcttagtgaattaaattgatttcggccaacttcttccaatgccggcccaaaatcgggccggcccgtctacgcgtgagctcgcaagcttgagcggcgcggctcagcatctttttttgcggcccagaggccgtgcggcccatcggcggaggcggcccatcggcgaagatggcctaacgcggggtcggtctgaaccgtccgatctaatggacggctctgattcgctccacgccgaaaaagtcgccgacggggagggtgagaaccctaaccctagctcattcttccccaatcctcatctatcttaatgctggccgaaaccataattctgaccgaggccataacttattttcttgagacaattaacttaattaaactgaagcttaagcattacagaagaagatcataaattaacttaatctaataaacataatcttgaaataaaatttgcatcaacaaaacatggacagattgtagatgcggctaattgtcaagttcaaggccctaaagaaggatcatgcttctttggaggtcttgtatgaggagctaaagacttctcatgagagactcaccatttctcatgagaagcttaaggaagctcatgacaacctcctttccactactcaacatgaagctctcattgatgttggcatatcttgtgatttgcttgatgatagtgctacttgccatattgctcatgttgcatcatctagcatttctacctcttgtgatgatcttgtggatatgtctagctctagctctaactcttgtgtttctatttgtgatgcctcacttgttgttaaaaacaatgagcttaaggagcaagtggctaagctcaataagagcttggagaggtgcttcaagggtaagaacactcttgacaagattttgagtgagcaacggtgcatccttaacaaggagggacttggattcattccaaagaagggtaagaaaccttctcaccgtgccactcgttttgtcaagagtaatggtaagtattgctccaagtgtcgtgaggttgggcatttggtgaatgattgccccggtggtaagcctcctaagacatgcatgtttgattctcattatatgcttaggaaggctcatgatggtagcattgttgatagatatgtgggttcccctatactcggtggtaaaaagaatgccatttgggtgcccaaagctttggtctgtaacctccaatgacccaaacaagtttgggtacctaaaagagcttgatcttcttttgtaggtgaactactgcaccggtgggagccattaggtgcttgatagtggatgcactcaacacatgaccggtgatagggctatgttcaccacatttgaagtaggagggaatgaacaagagaaagtgacatttggagacaatagcaaaggaaagataattgggttaggtaaaattgctatctccaatgatttgttaattgataatgtctctcttgttaaatctctaaatttcaatttgctttcggttgctcaaatttgtgatcttggcttgtcatgtgctttcttcccgcaagaagttattgtttctaaccttcttgacaagtcttgtgtgttcaaaggttttagatatggaaatctttatttggttgatttcaattctagtgaagcaaatttgaaaacttgtttagttgcaaaaacttcattgggttggctttggcataggaggctagcccatgttggcatgaatcaattgagcaaactttcaaaacgtgatctagttgtggaattgaaagatgtgaagtttgagaaagataagctttgtagtgcttgtcaagccggcaaataagttgcatgttctcatcctactaagagtatcatgtccacatctagaccattggagctctttgtcacgcccggaatttctatccaaaattccaaacgcttacatgtgtgtgaaccctcgtccaggaatcagccgaggcacacaataacaaattgataatagagtacaaatattactccaattaataagcgaataaaatgtcattacagaggtagatagttcctctcaatcaataaagatctaagcagcggaaaataaataaacagcgcagacggctccactccacaggcagcttgaccaaggctacacctaatcctccacaccatcagcctcattgtagaactcttcctctgatgaatgattgcaaggtgagtatatgacatactcagcaagccacgcagcaaatatgcaagtgcacaggataacaaaggatggcataatagggttgcatttgcaaaagcagcatttagcaaacatttgagaatttgataaaacagttaagtaattaaacaatattaatctaacgctatacaacataccctgttgtataggcccaaccattctgaacaaccaccccggctgcacagttctatctccaaaccaggaatataccattccaaaccaggagctaatcaaattattaccagtttaagcatcttttacaatgatgagaggtgtgagactaatcacgaaagacattgttagacccgcccataaccgcgggcacggctattcgaatagttttactctgatcagaggtgtaccactgtacccacaagacacaaccccacatcatgtcaccatgtgcctcaataccaccacggtatctcggaaaggagttgtgacaatacccctcgcataacacaatccactgcagcgcaccttcctggatcataatcacccccttataaacaaggcatggactccccagcgacccccgtgggcttatctccgccacttctcagtctggtgccccgcaatgaaccatgctatacaaaagataaagccgttgcccatgctggcttgtggttggcacggttaatgtttcacaaccgaaactcgtgaaccggtccttaattgtcatgagcacgaccagcaaaaccatgtgctcacaacccaccattaccaggttttagttggcacattaattaattaactaatcacgattgaccatcgtgaactatcatgaaaccatcatgaaatattagtgagtcattagttatcccgaatgtgtactaatgtttctaagcagggctaagcaattatatctaatatctagttgaaccaatataaataaagctcaactagtcaaattgtaataacccaaggtatcaaggaataaggtaatcaagtacaaaacggccataacaaagaataggtcaattccacccaatgacattcgaaaatagatgcaatagttgaatagaaacaatagctttaaataggatcaacatgctcaaagggttgtttgggatctgtgtgacttgccttgctggccttggaactcttcaaactcttcttctgcgaaaacggactctccggaaacgacggaatctaagcagaaaagagcaaaatcaccaaaacagcacataaacaagcatgaacagtacatgtggatatttttaaagtgtagatctcaattttagaagaatttagagacttgaaccaactaaatcggagctaagatgaattagttatgaatttttaaagattaaatcggattaaaacctttatatcggtttaaattgaattatgacgcaataatgaattattttgaaaaggaaaagagggtttattgcgtcagcgggctagggtttggtggaccgggcgcacgggcggcggttcacacgaacggacggccgagatcgaaccaatccaaaacgaacggccgagatcgatcggatccacagcggctcacggcggacgaccccgatgacgtcagcggtgacgtcaccgacagcggcggcggctcggcggagaagacggctcgaacggcgcacgctcgccggtgaacggcggcgcgaggacgcaaacggagggcaccaagacgaagcgggcggcacggcgaactcaccggcgaccaaaacgacggcggaaggtcaacggacggcgacggcgacgaggaggaagcggcgaagctcttcggcttgacgacggcgacgaagctccgacgatctccggtgacggcgaaggggcggacgaggacggcgacgacttggcgagcacgacggtggtcttcccgagcgacggcgacggctgaaacgacggcggcgcacggctggagcggcggcggcgacggcaaagctagggcacacggcgctagggctcttccgacgacgagaggcgaaggcgaaggtggcgacgggtagaggagacaccgggggtccttttaaaggggctcagaggcggcggcgaaggcccacggcggtcggcgacgaggaaggaaagatcgggaagaacgaatccgggacgaactcgaatccaactctttccaaaacgatttagccaaagattccaaaggagaaaaggtagaggagatcccggagattgttttccctcttttgattcgaccggagaaggaaaggaacggccggatttggaaaggaacggcggcggcggcgcgctagggtttcgggcggcggcggccgaaggtagacgatgggtccgacaggtgggacccacctgtcagcgtccgaacgcgcgcgcgcgacggctgcggactgggccgaactgggccgaggagagagagagcggttttgggccgactttcggcccaaagccaaaagagactttttaaaacctttttcaatttaaattattccttaaatgcaattccatttattaaaaatacttccttagctcaaataaatcccagaaaaatctaggaattatagaattaagcaaagtatttaatgaaattttatctggccccattttatattggaatttattaattaagattagattttcttttcaagacttttaaaattatttctaaaaaattccaactaaacaacaatttaaattttgaattttcagggtgtgaccatgatgggaacatgtggctaagcaattgctatgataccacaatgttagatttaattctcaggatctaatttgcttagcttaacacatgatcaccaattctaagtgcggaattgagatgattactgaccggatgaactgaagccataagctttgccaattcttctgttctttcttcttcttctctgttgatggaaaggaagcacagagaaaacctcacgaaccccttccagtgtctaatcgatcgggcgattaattttagggtttgaggttagagagaaatcagatcgtcacccagcctccctccttctctttctttatataagcgacactggtggggctcgggggttatctcaattagtttaggattctgttttctgtaccaatcacacaaaaaacgaatttatctcttagtttgtttcttgttaggataaggaaaccggtggtttagttcttttcctaatccttatcgactcaagtcgacaaaatcaaccaacacatctcaatctaatcaccattggtcctaaactggtggatgcccaatatgaggtaggaacgccaaaacagtcatccaaggaagacatacaggcaagactagctccaccactcaattcgacaactcacatttagattttcacattgaagatcacaagggtcaggacatgggagataggacaccaatggcaacgcctttaagaagacaaacaacactcaagaatgtagtcatcgctcgtaccattcaaagctaagaaagtcttccactcaaagccaactgaaaataccgcacgaccccacgccgcaaactaggcaacagcgcaaagaaacacttccacagccactagaacaccataattctcctcataggctagatttggagaaaggagacaaatccgacaagatggaaggatctaatgcagcaacaagttttcaatagtgccttcgcctcagtgctaggtatatacctttcgcacgggccttgcccggtgccaatgcctcaacaactttgcaacaagcagctaccacaccactctgtcatcggctagctcgtcttgacccgatgccacttcatgctaacaactagcaagatgtggcctccgtatagaccacacccgagcaccgattaggcgtacaggcaaaagctgactaaatgcatgattactcatgggaggtgtcacgtagatctatcttcataggtgctgcatggtctatgctccttctacgtgccatggtccacacaattaggacaccatcttcccaatagtagccaccactacaaacacactccaagtcatcggcattgagccaccgcttaaagtgccaactggatcttgctagccaagcacccttcacgatgccccgttgacctggcatgcacctattaccgcaggtgggtgttaatgcgaaaaacacacactggcctggaagatctacttaactcctgtgcaggtccaaaatcttgcttttaagttcgtgagcatgccagttgatttgatcctgcaatcaacaagaataaaagacaagaaaacgaggttaaatccataaatgatagccgatcggctgagagccgatgacatattgtcaatcgtcgagccgatgttattgacattagatcggcaacgatgaataaagtaatataaaactaaatctactcgatcagctgtagatattaacgatatataatctttctctcgatgtatacttaaactaagtgattgggatatagatcgaacgccatgtcgaaacagtataaatcacttaagtctaaagatgcattaagatcatgattatgtgaacgtttataacatagccaatcagatagatctagcatgtatcggctaatactctaataccactctatattaagatatagaaacagacaaaatatattaagcataaagtgtaatataccttaatgcaacaagatcttaatataaagggcatatttagcataacaatcaagcatacatgatataaagtagctaaatcaggtaagatcggctgaaactccgacaatatctctaatgatgatcatgaaataggctagatatcacaattatagatagaatttaatagatcgaactcaaccgatgcatcattaaccataaagataattgtaagatctaaacaagataatgaaaacctctaagacatggtagatacacgatataatctaaaccaataacgagatctaactctatccgctactttctaacagtaaaaactagccaataacaagttatataatgcaactaataaatattatgaagtgtatatgataacttgacgaattacataaacaagattagagtgtcataaagatggaagcactaatcccgagaacgcaagccgtcatgacaagtttacctctagttgaaaggaagaactcgccgaaatagaacgaaagtaaaaaggttggcgatgtgccgaaagtgttattggactgttgttgtaaattacatgggatcgggttatatttatacccgagatacatgatatgtccttgccggacacgactcttatctctaacaaactctaagatacacataagtctttacggcagacttttacccaaacatatctctaaggaaattacataaaatatactaattaatatatacaattgtctttctgagagcttatctccatcgtggcaattcttgtgttgcacgttgatcgattctagaagttgtttcattagaatcggctgtatcggctgtcctctgttcgatccatctcagtcaatgcagactccaactgatgccttcacagccgatgcacactctgttcttcgaatcgaactctttgccgaatctactttgattccaataccgaatctggctcatgtcttaccaaatttggtcgctaacagtgggcctcttaagcagctgcctactggcccatgaaccatcctcagggaagagatttttgcatgtggggacagttatggcccgcctatagcctggaagggatcttgtccgaaaaaagtgattatgcagtagtgatgctgtgacgcccagggcccgtaaatggtattggatccatctcattaacacctagcactgcaactcactgcattcttcgtcctcgctttaacacaaaaatttcgaaatcggagttgctagtgcttgtgaaataaaacctgctattatgctaaattgagctacatatagccctctttgcttgcaagccttgcatgtagtttgttaggattgatttgtgattgctagtacattaattcgattaatgtactgactcttgctatgtatatgtttaattttgttttgcaagtatagacttagttaaattgagtgttcgggactgttgctttacttagggcttgattctaaatggggtctacccctagtggtttgcttgtggattgggtagccaagcttccgcgaatcgatatttatctgccctgtcggtcgtacgtaagtaatctagttctttgtctctatttatatctaagtcatcttttatgtactttaccttgataacatggcttagatgaaaatgcaaagctagcaacttcttcctagggatagctgagcatgagtaagaattttgagcaattgagatattgtagagcttaagcaatttgagtcaagtctcctgggatgtgtaacacatttgggctgcgctcaggaaccttgcctctctacatgaaaaacaaagcacgcgattatagtgagattaattaagtattagcctaaaaaacttaaaaaaatggattaatatgattttttaaagcaagtttcatatagaaaagttttacaaaaaatacaccgtttagtagtttgaaaagcgtgcgcgcagaaaacgagggaagttggaaaagtgaggaaaagaacacagtcttggtcgctgccatcgtgtggtttgactgaggctaaagttgactggcatgctaagtctaggcaatatctcctttgctcattattcggcattacggattttatattgaatggtattaagttgtgatcatgaacatattgaggtttgagtggctatttatgcgtatacgtatcctactcatccaaaatcatgtggtggtcacaaatggcataaaaaggtttaaataattattacgtatcctactcatccaaaatcatgctcacagaggtcataggttttttatcagaggcttaatctgtgcgcattaacgtttgtttcgacctactaatcttttcgtgtcatgtatcacctaactttctctcgtgagaaatggcatcctcatttgccagcacagctgttgaaaagtttagcatcaaggcccaaattgtattttgctaattgtaaggtcaatagtcaccgagtgtttttactcatggtatgatcgatgtgatttacattgtcctatttttgtagaaggctgcttatttaattactcatttttccacttccttgatattacatctgctttgcctcacatgttggttaaattacatcagaactttacaaaacctactgccttgcaaatatgaatgctaggtgattgattgccttacctgaatgtgtaatatacgatagtacatatgtatttgtacctatttagattagtggatatctgtaaacttaaggcaagctaaattcattagtacatgcttgctagttgatcttgccttttgttgtactattggaagttaatacatgtgccaaacaatttgctaatctgatagatggagttaactgattttacatgcacatgtcagacctgctgctatttatgaaattgtacaaccaatctgcaagttcttctgtctagggcttatgaaataatggcagaaaactcattttatgagtacatataactgcacacatcatctgtgattgattttttttttctgcccagtgcactggctatgtctactgcttgtatttatgacatttctgcatgccctgtttgtatttcttcccttcatattgaaagagtaattgttttgttcttgttgcagatgaggagaggtgcccgtgtgttcaggcatggacctctgaagttcattccagagcatcacgcggtgtatggtggtaggactgtcatgctgaacaggtcgggtgttgttcggcataggccggcagcaccataggtgccacaagatgctcagatcctcgatgttgatgacctcaccaacctggcactcctaccaccctctccggagccatcttcaggaccgcgcagaaggggcaagagaatcatggcgccggggtactcttcaggtggaagtagcaagaggacaaggagcgactccaccagggatgcactgaacaggcttgcggacctgagggtccagtccaacgaaagttgggcaaggagggaggagcagaagcaagcgaagagcgctagagcatgcatggagatgctcaaggctgatgggattactaggcaggatcccatataccacacagccctgaggatgtttcgtgatgggtacctgcgcgatttcttcattaaggactgcatcacaccggaggagcgcctcaacttcatccaccagcatggtggactaccctaccctccagcattcgctccagaccctctgctgtttgctccactgccaccaccgacctgctcaggccatatggacgactggtacaagaggtttggtcctcaagatgatgatggtggcgatggtgccaatggtggttctgatggtgcagctgtgttttagcactgctgttgcttgcttctgtcgatctggtgccatgctatggttgtgatgcatcttttaattccgctgtgatgtttgtttaataacttgctctgattcatatcgggcatcgttcttgttgtaggccttaattaagttgtgtgtttcatgaacaatttcggcaccattaattagaactatgagcttgtgtgcttgaataaattaagttcagctgaaatttatatgccctctgttcacttcctgtattttgtagaagtaggtaattttttattgttaccctaactacatttacagtaccattgctttaatatgttctatacattaatccctgcctttcttgcaggcctttgatactttgatctaacgtttggactaatatgttagttgctttaatatgttctaatactttgatctaacgtttcgactaatatgttacttatctcaataactttcttgttttgcaggactatactaaattgaactaaccattgcactaatacattcgatatgttaacccctggatattttgtttgcaggaatttaataaactaaactaagatatctgtaaactgacaattctatttatccctagttagatgcattgcttcttttcagcacatagggtgctaactgtaccatgatattactttgttatctgttgatgtaggaaacatgagcacttcgtcagaaaggtcatatggttctgacgatggctactacagtgatgaagaggactccattctggacatgttggttgcggctttgaaggcaaggctaagtgtgagggcagcacgtcgggaaccgcaacaggaaccgcaacaatctggaatggaatggatgatggagacaatggcaaacccatccaatgccaagcaattttccgtctgatgcctgatcaaatccatgctctgtttggggtacttactaatcggtacaatctgcatggatcaattgaggtatgcctaatggaagcacttggaatatttctgtacatcatggcggggggcaattcaaatagggcgactaataataggatggtgcgatctgggtctactatctctaagtactttcatagagtacttaatgctatttatgcaatggctgctgacaaaaataagccggtagatccaaactttgagagagttcattatcgtgttgttaatgaggaagaatttctgccatttgctggtgcggctggtgcagtggatggaacacacattccttgcattgtggtagtggatgattccattcaacataggaactgtcaccacattacttctaggaatgttctttttgttgttggatgggacgaccgtgtcatttttgcagatgctggatggccagggtctgtgcatgaccaaagagtactgacagaagcagtacggagctatccctttgctttcccaaggctaccatggggtaagttttaaatttaatcttacacaaatgcaaagctgactatctattttcacaaaaaaaaatgagtttgcttattttttggtgcagggaaatattttcttgtggactcaggatatgcaagccggtatggattcctaccatcatacccacattttttgtaccacttggatgaatttgggggtaatacagaagcagccttgccgcatggaagggaagagactttcaactacatgcacaattcactgtgtaacacagtggaaagggcatttggagtcatcaaaagccaatagagaatcctgagggaattaccttacttccctaggagtgacgatcataccaagattatacattctgccttcgctctccataacttcaggattgacagctccgacactcatttccttacacaaaacccattgtacaatgggtacccaatcatttcagacgctccacctctacgcggctggtacgatgcacccaacagtgcggaagtaatgaatacagtccgcgacgctattgccgatgaagtttacaactagttggtttttagggcgcaccgtttaaaataaataacatagccatggctgttgtggatatgttatgtagcagtctgtgtgtttctatgatctgtctgttcctgcatgtgttaagtcagtgtgtttgtagtactgttttatttgtctaattttcctgtacgagactattatgattaatgcgaccacctttgtgttaatctctccatttgatttcgtatcttgcataaattagcttttagcatccttcattactgccgtgattcccaccagcagtgcgtcggcctcagaacagctgctaagcagcctcagcaacatctccaccgacggcctaacgtccatccaacggcgcctcctcgctccgttcctgctctgttggctcacgacagtactttgcttcccagctgccgtcaatcgtactgtagtgcataaagtagagatgaccattaaatttctttggatgaagccgttggaccaaacgaacgagcccgttgtcgtagaacttaaatgttgatatgtcaaatggcaccctaataattatttaattgatggtcccttgcccattaatctaatgttattaaaagctgttcaatcacataaaaaggttgcatcttgccacaaacactgctaatcggtattagagcgagtacaatagggtgatatacataggttgtacaagttaccacatcatatttgtgcttatgtggatgagacaggagatgagagaataaaagcgggctgcaaatttatagacagctgcagcatgagctagctccaataaattatgtgacagggatgtgtggattagttgtattaatgatgcaatatataattacaactaactattgtaatgagtgagctatttggctggctatatatgatattttaatttttagagtaagtagttggctacattattaaactttctcaaatacatttactccctatatgttgattaatagaacatttcatcccttgagtagagttggtgccgctcaagtcaattcaatgaagccattttgccgtatgtttcatcaagtcaattcaatgaacatttcatcgatcaatagttcattttagttttctataggtgaccatatgctcttactttcttacacaccacccccccccccccccccaacacacacacacatatagacacacgcaccgtctgaagaaaacaaagcaggaatagcttataccccttgccacattcattttgtagtactgcactatatattcatgacccactttctttgttttttttcaaaaaaaatattttgtttaccagagttgatttcggtgcaatatcttgactatctagtctacctacacacctttatctatttttatagtgaagctccatgcatacacggtgcactcactaattaaggagtaggtaggtaattagggatgagcgacatcaggaaaacatatagttgctctgatgatctggaatgatcgcgatatttggtcatctcccgttgcacaagtgaaacccagtgagcaaatcactcctcactgcagttacttgttctgcatattggagctaccggtatacttttgttccctagtcgcttattttgctttacttttaaaatcctttctttgcggcttaagttactttccaattcgtagaggaagaaaggattaaaaagtctgtacagttagatactatacatgcttaagattggctcaacctctatgcatgcatagtaactgctgcgcttacactcttcctcggttcagtattccaacctgattggtcatgtcgttgaactaatcaattttgatgggtggatgagttgtggggagcctgacatgtaaattgagaggagagatccagagcaatggctccgtgtagcaaggtactaataaatatactagtacttaatttgttagaattaaaaggactggacccagtttaattccagcaatttcaaagcctcattatttatgttaagagattaataataccttgaaaacaaatgagatagtccctgcattccaaattgatctacgtataattttcttgaggttattcctaaatgatctatatatttgtgttcattcattaagtctattccttatttgtgtattggagtaaatgaacattgatgcatacatccatgcacacaagtatttataacatacatgcaatatcttgatttgctattggctagaaaatagtgaggatggtgcatgcatcgagtttgttgatagagtaaatatagtatgagagatttattagcttttttttgtcttggtatacctatgaaatatgtagatcaatttggaatggagagagtagtatcacagtatggctgcgttcgtttcacgaggttcccaactcatctctcttgtttttcgttcgcacgcttttaaaactgctaaatgatacggtttttttaaaaagtttctatacgaaagttgctttataaaatcaaattaattcatttttgaaaaaggaatagctagtacttaattaatcaagtgttaatggattactccgttttccgtgcagtagagttgggttcctaacccctaaccccaggtatcaaacacacagcctaaattaactactactccgagtccagcaacacctccgacgagaccggcgctacctccatctccgagtctggcaccacctccatggcgcgagcaagcgaggcgagcgggtcagccatgaccgcgagcgcgatgcgagcggcggcggcgagcagtggcggcgagctcgacgcgagcagcggagtcgagcgcgacgcaagcggccagagaggtgtgctgcatgcgggagtaaacgaagaggcttaagaattggaactcggccagagagggcgtgctgcatgtggcgcggcgttgatggaaacgaggcgagcgatacgaagcgtcgcccttcgcgcgagatttcaggagctcttttgtaatccgctgatcaatatggaattttctgtttttcaaaatatgtagatcaaaatcaaaagagaatggagggagtaattgagagcacctttcagcggttgagttggtggtgagaatgcaacgcgcacgcgcgtcctagagctggtcggggcgtggcagggtggccgctcgttttcttcacgtttctgtttttacgagaaagcgaaaccgatggacactcacgtttctgttacgttactctcgttactctggtaacaggcaagttcatgaatatcgatcaatcacgattaattcagagacgttatccacctacgggataaacagagaggaactcacttctgttcatctatctgattcttcgttgctacacatctcccaccttttgttctgcacagctttggctctcccacacgagtgtttaggattgccttcaaaactctgtcaagcttgagtacctacacagctaagcggacgattcattctcagctaagcggacgattcattctgattgaattagcagcttaagggtgtgtttagttcgcgaaaagaaaaatttttaggtgtcacatcggacgtttaaccggatgtcggaaggggttttcggacacgaatgaaaaaattaatttcataactcgcctggaaatcgcgagacgaatttattaaacctaattaatccgtcattagcatatgtgggttattgtagtacttatggctaatgatggactaattaggctcagaaaatccgtctcgtgatttccatacaaactgtgcaattagtttttctttttatgtatatttaatgctccatgcatgtgttcaaagattcgattatgacgttttttgagaaaaaaattttgggaattaaacaaggcctaaaggtgaaagttttttgctactaagaacatacacaatagcaggctataagccagctacaaatatattttaaagagataaataaggagagagaagaacaacgggctacagatttatagccagctgtagcacggactccaagatgcactgtgtgtatgttaagtggggccagatattaatagtatagtatataactattgtatgaatgagctattagattggttatagatgaattgaagctagcagttggttatactattaaacttgctctaatacttatttcatcatgggcaatatttgtgcactgaatgactctttaggttgctttctttggaatggttccaactccctcttgtcgtttttcgtgtgcacgcttttcaaactatcaaacggtgtattttgcaaaaaaaaaaatataggaaagttgctttaaaaaattatattaggccctgtttggttccacacacaaattttacaccccgtcacatgaaacgtttaaacacatgcataaagtattaaatataggctaaaaaataattaattacacagattgcgactaatttgcaagaagaatcttataagcctaaatgcttcatgatttgacaatgtggtgctacagtaaatatttactaatgacagattaattaggcttaataaattcatctcgctgttactgacagattctgtaattagtttttttattagtgtccgaatatcctatataatacccgacgtgacacgtcaaaactttacgccctgatctaaacacccccttaatctattttttaagttagttttaattaatcatatgttaatgtgcttttccgtttcccttgctgaaacggaaggttccaattagcacaaaagaacaaagcctagagtggcttcaattatcacaacacatcaatttactgccccgtgcatataaacagccatgcgccgccttctttttccttcacttacttctccgcccacttgcttacttcttctctcttgggttctagtactagtctggatgaggataccaaattcatgtgctttggacactcgcctggagtatttaaccaggccaaatccatttcataatgtcacatcgatatcgatcaatcagcatggccatcaacttaatttgatgcatttggaagaaaaatttctctacgttaagcaaaattataccaagattacgagaatgtatttaaacttttacgagtagtagaaaagcaagtcatatgtcttgccaaacatgtatcaaagagtactggagtcaattttggataaataaatggcctaaaaccactacaaggtagggatcttttggttttggtagttgagcgaaagaatgaacagtactgcagcaaaccaggtaatgccgcttctcggggtgaacagactataaatagcggtcacgtatttcattagccagcatttcaaatagaagatagaacatgtcatatgtgcacaagacggtacatatatattcttagaatgggaagcatcaaggattctaaccacacggaccttcttgatgggtctataattgatttatctacaggtagtgtttgaaagtgaaattgctacccatcacaatctacaaaggactaggctattggagtaattggaggggtgggcattgctttggggtcaggaataaccgggaacaacaattggaactgcaatgttctgaagaatggagaatttatgttagaaagcatgtaatgtacattattatcgaatgtttgtcacttccagcctgttgtcctagctagtcccacgagttctaccatcaataggatatttcattactttagtactccccccaccccgtccctaaatataaaggattttggttaaaagctagtaacacatcctaggctaatgaatctgaacatgcttctgtccagattcgttgtactagaatatgtcatatctcactacaatttcttatatttaggtacagagggagtatccaataaaaaagaccatatgtggctgggtttcgcgcgtgggttggggggggggggcggcggattatcatggagcgtacatatgaggatcatgatgaaatggaacagtcaacatgagcagggaatagctgaacagctatactgttacggggccacgaaacttacatgcatgggttgttttgtgattaagcgaatttagttgacttctgtgacgcccctatatttttcttgaggcattcaaagctattttagtaaagtaatcctcatttcaaaatttttgttcatcatatgtattatggtcctagtaccgaatatttttatcgaaaaaccaatttttcacatacgcaagtagactacgtaaactttttagacagctgctaaagagaaccacccgcacaaagaaaaatcgctatattaaaagtgcaccacccagctatgcaggcagctagccccatgcccccatctttctaaagtacctcaataccatcctctcccagccaaaagtttcaaacctatcctcacgcactaccacgtccttcattccctctacctaccatgcatacaagctagtggtggcggggttcaacagcggcaggtgctggctcgacgaccgagcttggtggctgcggggggcttgtcggcggtggaacttagtagctgcggtggctgtggggctcggcatcgtggtcccatatccaatagcctcactattggatccgtctatggcttgcctcaggtgctactgtgtcggtgatagttgcgacagggcatcgactgcgaccatcatttcctggccagaactgagattgttccgatcttcatccacactggcaggaggagctcgttgaggagcgcgccatggtggtggtggtcaagaaaggaagcggcggtggaggcagatccgatgatggcgtgcctgaatctagcgatgacctcctgcaacgacgacaaccatcgaggcgctgcttctaggatgttgttgatgttgttattctttttttgcatgttgatatttgcatgctgttcagtgatgatatttttaaggtactaacaatgatacttatagtacgatgatactaagtaccaatgatgaaactccctgtttagtgatggtacctatcaggtactaatgatgatacatgtatgtatcgatgatagtacctaccaagtatgagtgtatattacctgctaggtaccggtgatgatacttgcaggtatcaacgagtgactatacattaaaaggtagtggtgagtgacgatatttgcaagatatatatatatcaacaagtatgatacatgtaggatgaggtatatggcccatcaaaagacagctctagcaggtctcatcagactagttggtgaactgataaactctagcaggttcttcatggctgtgcttatgcacggagtagtgtaggtacagcctaaggcctctcacagtgcaagctatgggacccatacccctagcctaaaaagttgacccaaagacacccaccccatagtgtaagcacccatatatgtgtggttaattggatggaggcactggtaaagggtatcaagcccacagtgggcgtgaccctaggcgcgttactacagagcggaacgaaatttatttctctcaactacccttcagcgtggtcctcacctactactcgcaagagtattcctgcacctctcctcggcacgaccgcctccttctcctctctcccgcaccaccgcggctcctcctctcctcccacgccgccacgcctcctcgcctcccacgccgcggcagcacgcgggggatgccaccgccgtgcgcctcgcctcgctgtcgaccgcgccgctcgcttctcctccccttcactgtctcctccttctttgtcgtgctctcctccctcgcgggggacgcctgggacaccgccgccctgcgcctcgccttgccgtcgaccgcgccgccagcgccgcacccactacatgctatggcggtgaggggggacaccggggaggtgaggtgccgacgccgcggtgaccgacgcgcactggaggactcctctcctcatcagtacgtgcgcgggctggggaggcgaagtcggcggtggcgctagtggacatgagcagcgctgacgccgcggcaactgacgtgtgagggaggcgtccccgggaggcgccggcgccagtggttgccgcaccgtcagcgtcgctccccacctcattgtcgtcctcctcgtcatcggagtcggagcaggcggggttgtcggagtcgagcatgacccagtcgtcgtatttttctatgatggttttgctttctttttcttttttatcttgttgaatctgatttgttcttcttttccaatccccaagattttcttgccttttctcttccaatctgatctgtggtgggagaaataatgctgtggcgggaggggatttcaggagggcgaatcagggattttgctgcggtgggaggagattttgggtgctagggcacgcgagcgcaaggctacgctgcccacagcgtgcgcgacccgcgtcttctctttgctgtgcaccctcgttttggcgaggttctgcgtcgctcacttaggggccgagaaacctagctgaggcgcggtcgcccgctccatgttgacgcgaatccgccgtggcacaacgagatcacgcgccagctaggagcactgtaagagacctaggtaggcaacgcgtgaaggtgctgcactgctgttattgccgtgagaggagtcatatgcggatgagcgcacgtcttgctttcttatcaaaattagaaagtataccgttttataatggtataccgtcatctagcagctctcatactgcgttaactacagtaaaattgaaagtatcaagttaactaataagtaggccgcttataaatctagggtgtagctatatttatggcaccatatttttcatcaaaaaatagtcggcatgtatttacattgtaagtccctaaattacatatgtaattttagtgtatttataatgtaagtctcaaaattacatatgtaagtcaaaaattacatatgtaaattcaaaaattacgtactaattacatatgtaagtggggtgtaaatgaggtgtaactaatgtgtaagtggctgaaaaaaaatcgactgtagtatatggcgccatatttctagcaactccgtaaatctatctatctattatatactaaaagtcaattaaacttactataatcgctcctaagccgccacatggcatctctacaaacgctcctagactgccaagtggcgtttaaaacatctagccattaattttcatttaatctggtggacctatatttttaaccgttatatctaaaaataccaaatatatttaattcatctttagaattcagaaagccacacgtccacgttgatcgatcgctcgtgtacttgtacgctcatgtgcgtatacttcgttagtgtacgccctccccccctccctttcttttattttttctttttctttttcactcccatgagataaaaaccaaataaataatttcaaccaaataaatagggagtagctgatcctataagcactttacaacattgtcttaaatttattacttatgtattaaaaacttaatatgtattatgcaatatacttggtcaatcctagcctaaaatatcaatcgtatatcctcactgatccctatatatgcaagttatatatataagtcactatttactaatcaccaagtcatattacttacggggtgttcatgcacaatgcacctaacggccggttagctaatatctaatgagcaatgagcatgtatgtcatcaaacaccgaagataaagagcaattctaagtgtgtaatgatcaacaaattataggtaagtagaggatgcaaccaatccatcgcaaacaatacttgactacaggtagattgtgactatgagtaatagtatttctatactcctacaaacacttctaagatgtcatgtgatgctctaattagaactaatctaagaaaaactgtaaaataaaataaaaataactattcatcgatttacactcaaaatcggtgatccattatttttcaaccattaaattagatctataataataatccctctgtctaaaaaccatctaatcccttcttacgtacatacacagctaccattaaattagatctataataataatccctctgtctaaaaaccatctaatcccttcttacgtacatacacagctcctatgtacatacctatgcagatatataaaaaagaaaaaaaaagaagagtgtgtatatgatttgtctcatatggttgttttccctttctttccggattaaggtgtttttctaaattgagcatatatgtagtgatcactccttgccatggcacagtctcatgccaccctcttcccatcaaatttttaaaaatacttttttactaacaatttaaaaggcaatcacatgagctcacataaatgcatgcggacgcacatcatgaatacaaattcgcaaacccaatttctatgatagacaaatatttatccgaaaagaaaaaaaaacaaacgtccatactagaaactactacgctagaaaaaaacaaacatgtaactacatttatctcttttttttatgtcgtccccatcaaaatagtgttaacattttgcacaaataattttaataaatttcatcaaatattaatccccacaaacatgaattggtgaattagatgtataatacacgaaaaaaataaaaacttatattaacttgtatgtttgcaaaagatcacagtttgagaaaaaaaattttacgtggtcctcaccatcgaagctattagatttttcgaagtagagtccaatgatcaaccctgctaatttttaaaagagaaacttatatatataccactaaaatttagtagtatcgattaacaccataaacaaactatatatactctatataataaatcaactcaagacataaaaaaactattttcatcaactctattttctctcactcataccctaaagggtgccaagcatggatctcaactggctacattgtagtaactatggcaggagtatgcattattgagctgaagtcatcttacccaaactgatctaccttattttaaactattagatctatatattaaaaacacctactgatcgatcaggccgtcagaggccgtcagagtgcgtatgtacagcacatgtttccagttccctgctcacggactaaacaaacccactggatctctcgcctctttgttttccttacaacaattaagttaaccactaaataaaagatcctaaaaattaccctgaaaaaaatatccaccttaattttttaataaaattggtagactaattacttcataccattagacatctaacgactttctaccaacttaattatatttcccaacttgtataccgggtctatttaagctaaatcaatctataaggtacaaataaatccgtctatgaatgaagctcttttttattactatatatctccgtcttataatggatcttaaaattttataccccctccatcccgaaatataacaacttttagcacttacggtacattaccaccaacattcacgtcccaaccaatcacaattctccgcctttcacttttctcaccttccttcatttctcaacccaacataacatctccctattaattctacttactttcttaataattgtatccaactctataacttcttatattctggtacggagggagtagaaatcaaggaggaatgaaaaaaatactatgatacccatgattaaataaggctcattaaataaggggtatgtagagagttagaaaatggttagagtaatgttggataaaaattaaatgaagaatgaccagatggaacgagtagtattaataattccttatattttaggatataaaatttaaatccttcgatttatggatggaggtagtagaagtaaatagaagtacatgagtatttgtttaattagataaagaagtcatattatcatatttttaatagaaaaattcttatattaatatatcgtaaaatctacaaaggcatattttgtatacaagaaaaaatattaattaaaagtttaaactaagatgctaaatatttttaaaaataaaaacatgtagtataaaaataatattttcatatgaaccagctccattattgtgacatatttttctcataaatttaagacgacatgatgcaagtaattttagtttacaatttgtaacagcccattcttcagaacaaggcagcccagcctccatccaattggcacgcttacttataaatattaccccacttacactttcattctcgcttcgcataaaatagtcaacccaaaaatgatatggttggagggataatgccttacaagttggctacactcttgcttaaatagcaagatagtactactaatcatgtgcacacaatgcttatggacaacacatatcaaatcctttcaataaaaaaacatagaccacatcctaattgcactaggatgtctaagacacccccctcaaaggatctgacgttcccatcggtccaacttacctctatagttacatatgcatatagacaaatatccagaaacatgttccctcttaacgcacgctcgtacgtccagtgatcgaaacaaacttccaaaacaatccaaaaaaatattgataaatatagatttagaagagtataaaaaaaatcctatacataaacattcatcacaaaatttcaaacactgttcaataaggtgcccgcgtatttgcgcgggctaccttcctagttattatatactaaaagtccgtcacgtggcacccatacaaatgctcctataccgccacgtagttctctaataaattagaagaattataaaaaaaagcaaaacatctggccgttggtttttatttaatctggtggacccaatattatttttaaccattagatatagcataaaaatgtcaattagatttattatctttaaaaagccacacatggcacgtacgtgtacgtacgtcaagtacgtacatattttgtacgtgggccccatgtcttctttttatttttctttttcacgagcacatgatgagaaaaataaaattcatatttcagcccatatagttcggagtatgtacgttgcacatgagataaaaaccacattaataattccaggcttcagcccatagttgtacaaatataagttattttgagttgtattgtactatacgcacgtcatcaaaatatttataaaatatctaaataagtggataatatacattatataattatataattgtatatcacttaataacatgtattgttaaattagaaatgcattttgaaaaataaaaacaactccagttatgagtaacattaaaaaaattactccctactataagaaaatactgttatataagaataatattactaaattattataattacactctaccaatcaaatacttaataattaaaaaaattaccaaaaatataatataaacttggcaaatattagtgcactaaccatctacactattcataaaaataaggaaagttttttttattaagtatactattaataattttaatgttatgatttaaaaagtaataatattatttatttgttaattttttattataccgaataagggagtaactaatcccagaagcattttagaacacactcttaaacttattacttattacttagataccaacacaatatgtactgtacaatatacttggtcaattctagcctaaaatatcaatcgtatatcctcattgatcccatataccatatatgtaagttttatatacaagccatattcactaatcgccaagtcatattacttatgaggtctctgtgcacagtgcatataacgattagctgagatctaatgagcatgtgtctcatcaggcaccgaagataaaaagcaatactaactacgtaactgtcaaagaggatgcaaccaatccaccgaaaataatagttactacaattagattgcgactatgcgtaatagcattcctacactcctatagacgctcataagatgtcacgtgatgctctaattagatagaatctagaaaaagttattaaaaaagcaaaacatctatttacactcaaaatcggcgatccattattttcaaccattaaattagatatatgacagtaatacctttgccctaaaaactatccaagctgtacttatatacatacacaactcctacatacgtgcacaatagataaaaaagaaaaaaaaatagtatatgatctgtcccatctagaagttttcttcctctttccaactataaggtttttcccaaattgatcatatgcatagcgaaaactcctagcgatatggaaagagaagacatgccatgacgccgcctcatgccacccgttgctctaccctcttctcgtcaatttacttgaagtattttttttactaacgatgtaaaaagcaataatatgagctcgtctaaatgcgtgcagatgcactctatggatacacttacatacatgatggacaaatattccttcgaacaagcattggtgaaatagatgtataatataataaaaaaataaaaacttgtattaactcatatgttagcaaagatcacagtttgagcaaatattttttacgtggtcctcaccattgactgaagctattaaatttaaagtagagtcgaatgatcaaccgagctaatttttaaaagagaaaataaattatgtctactctatacaataaatcgactcaaagacataaaaaaaaaactattttcatcatctccatcttctttcactcacaccctaaatgatgccaagcatggatctcaactgacctacttaccaatacaatccgttataaaattatactctacgcttatctttaggagctcgactatatcaatgcggaacccaagaataaaggcatcaaagaaaaaatcttaacggctacaatcggcttcacccgacttttagagaggcattcatatataagtttaatgatttcatcctgttaattggtagaagcggtatatttaaatatttatatatagatttggatacctgtaagtcatgttatttggaatgaggtagagatgaaccttttttggtattaatgatgcattgggtttattttttggtacatatataattctatcaattaaaaagaccttcatattttaagacaatgatagtaagtagtggtgatgagtgagaacaaaaagatttttgtttggatatgatagatattcatattatttagtatgtcaacatttatggtttactcccccgtcaaaaaaacccacttttgaatttgaatatggatacatatgaccagattcaaacatagaagtgagtatttttttttttgacagagggagcattctttatagtaaatatagcgaggcaaagcttcatttagttttttttataaacagtaaataaatttcccgtatgtgcgcaggctttcttcctagttattaagtaaaaagcctatatcatcctaccgttgtctatatctcgttattgccagttgagatcaaattatttaacctctgctatatatctcgtgcagcttctctaatcagtacttgcggctcgtcaatattttaggcctcacatcttggactgttgtagacgatcgatagttatggtatgacggctgcgttgacggggatagatatagatgtggtagtaactttttgccattcaaagcatcacgtgtacatctgatctcacaagatcgacttttgtctattttgcttaaacttctcaggtcacaaccacgtaacaatatctgatctttcagactttgcactccaatggccaatatacggggtcgtatatatatcctatatatacacactactggagaatcttttatagtcctggttgggaacccctttttagttctggttttccaaccggcactacgaatccgggactaaagatgactcctaggggcagcggcaatccggttagtttctatttttttcattgtttttttttctagtgattttctcccaaatccagaggaatgcatatccccaaatcaaactaatattccaaataccacaaattaaatacatcacagatccatgcaatggatggcagattctaaaaaaaagaaattatacatctcaatccatcaaatgaatcacaaattcttcatctcaatcaatacaatgaatcacaaattcttaaaaaaaaaggacaaatctccggtcggcctccatgcatgcatatgccgccactcccacccgccagccgccactgcgcccgcccggcggccgccgccgccgcgccctcccggccgccgccgctcccacccagccgccaccgtgcccgcctggcggccgccgccgccacgccctcccagctgccgccgacccagagagcaagagtactagtagagaacttcgtggggaggggcaggagagaggaagggggaggaagaggagaggagaggggaagtgcatgcgcttggttgttggatcgagatgagaaggataaggccgatattaaacagggagagaggaaggggaggggatcgataagtctcggacttggcgcgcgcgcggctcgggaggatttttgttgttcccggttggggtatatctaaagttaattggggcctaactagatctggtaacttctttgaaccgggactaaaaacaccaaccgggactaaagatcaaaatttttttaaccaggactaaaaatgatctttagtcccggttactattcgaaccgagactattgtattttttggacgaccgacaaaatatggtttctccagtagtgacacaagctttccgtacacaccaactagtaaatctttactattataaaaattgaagatgtttttgcctcatgctttggtaagtcgcccgacttccacacggcctccccacacctccattttctcctggttttttttcaaccgcagtcctataagttcaatttggtttcagtcaggcgttgtccgattccccagctctcacaagctacgcaacgatgcacgatggatgagatcacgtttccacgcagtggtgcaaaatccggttcatttacgttccgaatcgcctgaattagagcccgccgatctatgtatatactataactatatacacacacacagatatactccctctgtttcgaaatgtttgacgccgttgactttttagcacacgtttaatcgttcgtcttattaaaaaaatttaagtaattattaattattttcctataatttgattcattgttaaatatatttttatgtagacatataattttacatatttcacaaaagtttttgaataagacgaacggttaaatatgtgccaaaaagtcaatggtatcaaatattttgaaacggagggagtactatacgcaagagtatcgtaagtacacacctgcagattgttcgactgtcgacgagcgcagttggttgaggctgcgttttgattagcagctaggaagcggccgggtgcgctccaaggcctgaggccgatggttcagtcgtggcgaggcgaaccaccaaggcatgcacctgccagcagcaacgacaagatctactcatcgtgtattagatggatacgcatagaacaaattatttagttttcctgccatctagacaacttgagtttttgtttatagggcaatcgtcagatgaattctttacatggagaaaaaaatatatttttggttcttactgcctcgttttttaatatatgacactgttgattctttcaccgttctttttattcaaattttttatataaatctttactattataaaaattaaagatgtttttgttggtactttgatatgtcatctgtgtttgagtcggttttaaattcactcgcttttggaaatacaaatccatgcttgagatggttttaagttcgttctctaaatacagaaggagtcgtataagaaatggtaacttgagacgatcaaactcttaattttagctcataattttataaaaaaacaaatccaagcaaatttccacggtgaatttcaccttagctaaaccgtataataataaggtaattcaaataacctcctcgttgcaacgcatgggcattttttatagtgttatacaaaattttaaaaaaattagacgcatacttctaataatattacacctacgtgcgaaatcttatcttcaaattcattatgttttagctgtaaaaaaaagataaaattctgacagatttttatccttaacactatcagattttttaactttttttgttacggctaaaatataatgaatttaaatatgagactttgtagatatgtgtaatactattagaagtaaatgtccaattatttatagacatttttgtgatatttgctagtcagtgtgcacttatattcacagtatatggaagttcttacccctaatttcaattttaattctaattttaccttaattttgtaatattataatttcattccgttttctcaacttaagcttgtgtttgctttgattttaggaattaacggtgctcaagcttgtatgtacttccttcattttataatatattataagccgttttgatttttttttcaaactttttaggttttatcaagtttatagaaaaatttagcaacaatataagtttgacgtagaaaatagcaagtcctgataaatagacaaaaacacccaatgagatgatataagtagattagatcatgcaatgagtagaaatgcataattacatactactatactagcaatatacatccttgttcttattcccccatatatagtagtatgtaaaccatattattgatataacgtacggcatccaactatacctttcatacttttttgcattcattgaacaaactgcaggcagttgatttcgatgcctagtcgaagaaaatgtacaacaatgctcacgcaaagtcaactatgtgaacacgaatcagatcgtagactcgaacattttgcttcgatgctttgacaattatggatcaatgtgtttcatccttttacaggagatattactctctccgtccaaaaaaaactcaacttctggagtttgaattttgtcccaaaagaaaccaatttctatcatcctacctacccttagcatataaaacgagaagttttatctctcgaaaaccctgtacccacctatcaccattactaattttttcgataatgaggagcattttgatcatctttactcctcactaaatttgtattggaatgctctttttggacggagggagtaggtacaaagcagacgcagaacaagtccactgcagaattatataaaatcgaatcactggcctttcaatcgctagactggactgtgtccaatattacttattctaaaccatattattgatactacgtaccggtcgtactagcactgcaagtcgcaccagctgctacaaccataaatctaccacatgaatacatatactacctctgtccgtatcattttaaatgcagttatgggtttccatgtttaacgttccgttttatttgaaaaaatatataaaaaatttagtcaaatagaaagtactatttatgtttgatcatttaataacaacaaaaaaaatactactccctctgtttcacaatataagtcattctaacattttccacattcatgttaatgttaatgaatctagacatcaacatgaatatataaaatgctagaatgacttacattgtgaaacggaggaagtaataaaaaaactgttcaaataagacggacgattaaacgttggacataaatagtgtaaaactatattctttatagatcggaggtactccctccgtcccataatataagggattttgagtttttacttgtaacgtttgaccacttgtcttattcaaaattttttgaaattattatttattttatttgtgacttgctttattatctacggtattttaagtacaacttttcgttttttatatttacaaaaaaaaattaaataaaacgagtggtcaaacgttgcaagcaaaaaaaactcaaaatctcttatattgtgggacggatgaagtagtatatcttcgtgttggaatacaggaataccaagctagccattttccttccattcctcaatagcaaagtaccgatgaataatgacgatccacacgaaaacggctctgctatgcctcctaggcgccgtagcaactacggcatggctctccttcgccgtcgcgcaaccacagccgccgccggcctgccggagaagatgcggcgacgtcgacatcccttacccgttcggcctcaacggcgatgcccccggctgcgccctgggccacggcacctacggcttcaacatcagctgcaacgacaccggcaacggcgtgtacaagcccttcatctgggacgtcgagctgctcggcgtcttgctgccggaaggccaggccaggatcctgatgagcatctcctcctactgctacaacccggccaccggcgccatggacggtcccgaaaacaacacctgggcgctcgacttcacctcgtcgccgtacaggttctcccacaccggcaacgtgttcaccgccatcgggtgccgcacgctcgcctacatcggcggcgacaacgtggacgccgacgtcggcagcctgaccaccgggtgcgtggccacgtgccggctgcaggccggcaacctcaccgtcaccgacgacgacgtcggcgcctgctccggcatcggatgctgccggacgtccatccccgtggggctccagtactactacgtctggttcgacgaccgcttcaacacgacggccatccacaacgtgagccgctgcagctacgcggcgctcatggagaagtcgtcggcgtcgtggttcaggttcaccccggcgtacgtcacctcgtcggcgttcaacgacaccttcaacgggcaggtccccttgctgcttgattgggccatcggaaacgagacctgcgagcaggcgaggcgagcgagtcccgagtcctatgcgtgcaggagcagaaacagtgagtgctttgactcgccaagcgggctaggctacatctgcaattgttccaagggattccgtggaaatccttacctgcacccagaagatcccagcagttgccaaggtgaatgttcccttttcttgattgaggaattaaaatagttgctgtgttagttagtttggacagtaacataggattaattaggtaataatcaaacaacaaacagagtattattaggttttaattgaggatcagagcaattaattaatttagacttatggtgtttcttatttgtagtatttgattttgttaaaaggacaccttagtattatggacgtgactacacagctagtggtaactagtttgtctaaaccagctaccagttcatctatgagagacattatcaacctatatttcaaatacaattttctattaaactactcatccgatttatgatccgattgcaccattatgtttgtaacaattaaatctttaaaacaagatcacacatgattatattttgataaaaaattataaattacttttataatatatctaaattactttcaaatttcactaaattacttcttatacatgtaaaagtaaattcaatgaagcctaaaagtaatttgcatatattatagaagtaacttataaccaaaagaaagtaactttaatgaatgtcttttttaattggatgtgactacacagctagtgatagctagtttgtactccatctagtatctcctttcaacttgaaaaatacgatagtatcttcttttctcattctatatgaaaaacaaaaatgaaagaaaaagacaatcaatgattaaacagatttatagagagctacttttgaaccatgcaaaagttacttccaattaacattgaaattacttttaaaaaatattaaacttatgtgtgttgatctgtgctgattaaatttaatttctagataaagtcatatttttatccctacgacgaatttacttctaatgtcgtgacaaaattacttccgttttgttttaagttacttttataatatatttaaattacttttagactctattaaatttacttttatatgtctaagaagtaatttagtcaactctaaaagtaacttatatatatgataaaagtaacttacatatataataaaagtaatttacaaatataaatattttttcatcgtaatataatcatgtaagatattgttgtgaagatttaattgtaacgaacacaatggtgtaatcagattgtagatcggataagtaatttgagagaaaactttgtttgaagaggaaaaggacgtacatgtatattaaaaaaaatgcatgcatgtattaccatgtaatagctggacttctccacgtttctctatgttggcgtcgctagttaaggcaaaattgagatacctctctaaatagattttacatagtattatttagctacacattgtagacgcacaatctatttgatttggttcaaattaaacggacctttcaaaaaaagttccattgtctcgttcacccaattagggcctatttagttagcgaaaagaaaatttgttggtgtcacatcggatatttgactggatatcggaaaaggtttcggacataaataaaaaaactaatttcataactcgcctggaaaccgcgagacaaatcttttgagcctaattaatccgttattaggatatgtgggttactgtagcacttatggataatcatagactaattaggctcaaaagattcgtctcgcgatttcccccctaattgtgcaattagtttttcttttaatcttatttaatggttcatgcatgtgtccaaagattcgatgtgatgtttttgggaaaaatttttgggaaactgaatcaggcattagtttggatctcttgtgaagagaatgtcgatatatatatatatatatatatatatatatatatatatatatatatatatatatatatatatatatctttgtttttagtagtactgcttcctcctactctaaagaagtgcagtttgaactagtcaaacacatattaagaaaaaggttaaaagactaatatacctttcactactgttgacagtacactaacttggacccgatgtcgcgcacaagtcgtattgttggaatcggctatatcggcttatttagctcgactcagactcagccgatcctaaccgtagccgatctgaactccagccgtctttgtttccgaacttgatctccgcctccaactccgctttgatcaaatcctctttcttgacatagatgctaccaaatttgtttgttaacaactactagataattatttttctataagaggacctatataagttgtaggcggaccataaatgatcgtgcctttaaaaatcgaggctcattttcatatgcggtctaaaaatctatttatgcagacagaccacggcatgaaaagatgagcatattttttcatgtggttctcttaagtggctaaaactacacttatttagggctacagggagtaactgctaccatgaaagtgttagtctatacatgtttgttttggtttctatatttgctatgatatatttttcacttaaactctctctctctctctgtttaatgactaattgtagatattgatgagtgcacggatcagaacatgaataacaattgccacgggatttgtcgtaatactcttggtgggttcgaatgtatttgtcctgcgggtacccgaggcaatgcctcagttggacagtgtcagaaagtgctaacacatggagtactgttggctataggtataaatgcattacaattatgttttgtgtgtttgtatatatatgaagatgcttacttaatttactaatttgatctaaaaaaatcaggaatttgttcctcaacggttgttggccttctaattttccttggcatagaatggatcaagtataaacgtcgattggttagacaagatctcatgaataaaagggatgcatattttcgtcaacatggaggccaattattacttgatatgatgaaattagagaatcaagtttcatttaagttgtatgacagagaagaaattgagttagcaacaaacaacttcagggagagcgcaatcctcggtcagggcggtcagggtactgtttacaaaggttttgatctagatccagaaaacaatcctgtggcaataaagagatgcaagggaatcgatgcgaataggaggatggaattcggacaagagttgctcatactctcccgagtgagacatgagtacattgtcaaacttcttggttgttgtctgcagtttgaagttcctgttctagtatatgaatttgtgccgaataagaccctacactatttgattcatggccaaagcgatgcatccactagaacactagatatccgactggaaatcgctgcccagtctgctgaagcacttgcatacctacattcacttgatcatcctatttttcatggggatgtgaaatctgccaacatacttattggtgacaaatttactgcaaaagtttctgattttgggtgctcaatatttagggcagcggctgatgaaaatattaatgtagtgaagggaacaattggttatctagatccagaatacctcatgacgttccagttgactgataagagtgatgtctacagctttggcattcttcttctagagctcttgacacgtaggaagcctctatccaatgaggtgagcctcgcctctctcttccaagatgctatgaagaagggaaacattgatcatcacatagataaagaaatactacatgaggataacatggaactgctatacgaattcgcatgtctagcaagccagtgcttagttatggacagtgagaacaggccagcaatgagccatgtggcagacatacttcggcaattggcagatacggcgtcacaacaacacactggcacacttcagggtattcgctcactcagattattgggaaactcaagtggtagcatctcagagccgtgttattctcctgttaaaacaatggagtatgacagcaggaagacatctatgggcattgaatttgcaagataagggcatctgccatgtataagcattaaacttagttgcacaagcctatagaaagtttttgtctgagctacatttggcttctatgtcgctctgagattgttcaacatggaaggaatgagaacgtaccaattcccatgatagcgtaatatggtgatccgaacatgtaaaggtggtaaaacatgctttggcatggaattgtcaacactttgctgactgtacatgctatggtccaaaaccgaaaaattccgattcatttgtgctaaaacagatatgtccggacctattttctatgcttaatatcctcttacattctatattttcctcatcacacaacaaccttttattttccaacgtacgttttgccataacatgttatattcacggttggctttgcccattgtaacgcatgaatattttgctagttagataaaataaaaatttggtatacctatggcctttgcattaagtaacatctctgtttttctcttgttggacatttggtttttgctgaataatgtatggaaccactcatggcataacattccacagaatggcatagcctatctaaacccaacaacataggtcggcctcttggcaaccggcccgagatagcgaaactatggcttgctacgcgataagatcaccacataatgcgctacttctctcgattcacggaagaaactacaacgccgattggcacaaccatagctttgcgcatctggtccatatccaccagcagcggtgtgaacagagcatttatagatcgacgagtttcctgggtgaacagattgaagacgaatgacggagcagaaaataactgagtaccagcccagttccgtacacgtatgacctgatccattgtcagcactattgaggggagatacccgtagaccggataaatagggtattggggtacattggtacgaggatctatgcgatatggcatctagcaaacaagaagacaaggattataataaggattgtgctagttcaggccccttatcaggtatagccctagtacagtttatataatattgatatggaaaactatatagtacaataagagtagatgaatccgatgataccggcgagatcgtagtcgtgggattagacaagatctcccggcaagttggcttcacgtgctccggcttcgtagactatggtgggtatgctgccggtgagattcgatgccttgaaccctccagggggtacgccttttataccgtggatcaacttagtctccaagtagaactcggggacatcggactacacgcgatatagaagaaacccaaccctttccaagtaagacgtcattagtcacttgcctataaggatattttccatattatcttgtgatttcctttatcgtatacggaaatagatcatatcttcgatggtgtaccgtatccgcatattacataagtcataggataggagatatgccttatccgtaaccatgacagtagccccgacttcaacttaaatgagttcacgttgtcattcacgactacgcttatgttaacagtgaaatttggtaagcccttaagagaattatcacatcgccaatagttggattcctgctatattcggttaaggaaattaatctattaaaggaagcttatccagaagttaccgagttcaaggacgatgcggcatggcaagttatctattaattaggaagagtttgttagtttccttttatctttaggaaagtgtgtttagtgtcaaataatgactttatgtttagtatctccccatgggtcattgtaaactatctctcgatcaatacaactactctcggtgcatcgccaccctctttaccgaggtttttacttatcatccggtggaacttgacacctgacagagggctgcatcggttcagtttgatctccggcgaaggggtaagtactacgttccgctggacctggtgaatctatcggctacattgctgttgttcacggctgcatcgcttcgatctcttggatcgctctggtttcattgatttagccgatgacaacaaagatttcattgatttatctaatcttgtggattttatgacatcggacctccagtcgatgtctgctttaaccttcggatcaatacttattttatcatatcattgttagccgattggtctatactggattatattattgttatattatattatcatcagtcgattgcctcgacattgttatttacatcaagcgtcagaatctacatcggaattatagccgatagctcaaaactctattgctatcgactggtatcggcatcgactggaattactccatcggcttgtcagccgatcggctcattgatctgctgtttacatatcttgtcagtttgcaggatcaaactgactggcacgcccgtatctcatcaatattttggatctgcactagagctaagtagatctcccaggccagtgtgtgtttttcacatcaacacgctttttggtacgcccggtagaaccacgaattttatacctacatgtcttaagaagtcaatgccaatatcatggtcacagtggagaatttaatggaggaacagaggcaatagatggagcagtttgtagctgattttcaaatgcgttgtcttcaatgtttcatcatgacacaagaagggccaattcagaagactcaattccccaagccgatagttgaaatacttcaagatacagttgatgaagcggttcatctcgcattgtttaatcaatctagagttttcacggatacattacaaaatttgatcaaggtaacagttgatgaattaattaatcagaaaagccagctcagggggcagactgaagaacaagaacagtatcggcttgggggggcaagcacatcagtgtcagcatgacgagctacatcaacaatatcggccagaagaatataaaacacatcagaatatagaagattgggccgatagaattgcgaagttagtagaggagcagtttggacttagacctaaggaacagatccatgtgtatcggctgccatatcttgagtggtttgatagggttccattgtgttgatgcgaaaaacacacaccggcctgggagatctgcttagctccagtgcaggtccaaaggttattgagatgcgggcgtgccagtcagtttgatcctgcaactgacaagatatgtaaacatcagatcaataagccgatcggctgtcaagccgatggaatgattccagcagatgccgataccagccgatagagatagggttttaagctatcggctatgtgtttgatgtagaatctgatacttgatataaataacaaaggcaatcggctgatgataatgcaagaaagcaataatataatccagtagaaaccaatcggctaacaatgatatgatagaataagcactgatccgaaggttaaataatatatcgactggagatccgatgtcataaaatccacaagattagattaaacagtaaaatcattgttgcaatcggctaaatccaacttatatgcaatccttataagccaatgcaatgtccaaataactcatcggctgaaacctcgatgaaacccttattggcagtcaaaaagcaggctaggggttatggttctaaacacgacttagtagatcaaacttaactgatgcaacactaagtatgaaaagaaacataatatctagacaatcaaggcgttgactgattttttaggctgctgaagaaagtcgcgagcaagtaagcggaatgtcctgactctatgttctcggttttcgtgttgtcgtgacttggtctttctgataacttgtatatttgtcttcatagggcttctccggcgtcctccgcacacagagaggacaatgtcgcaacaagcgtggcgccagtggtcgtcgcagcccgcgcccctccacctgtcacccttccgccttcgcctcctccagcgctggctgccccacagacaggcgccgagatgttggctgagggccggcgtctccttgaagctgacgcttgagagctgcaactcgagcaggaactcgacatatgtcacgcccggaatttctatccaaaattccaaacgtttacatgtgtgtgaaccctcgtccaggaatcagctgaggcacacaataacaaattgataatagagtacaattattactctaattaataagcgaataaaatgtcattacagaggtagatagttcctctcaatcaataaagatctaagcagcggaaaaataagataaacggcgcagacgactccactccacaggcagcttgaccagggctacacctaatcctctacaccatcagcatcactgtagaactcttcctctgattaatgattgcaaggtgagtatatgacatactcagcaagccacgcagcaaatatgcaagtgcacaggataacaaaggatggcatagtagggtttcatttgcataaacagcatttaataaacatttcagaatttaataaaacagttaagtaataattaaacaatattaatccaacgctatacaacataccctgttgcataggcccaaccattctgaacaaccatcccggctgcacagttctatctccaaaccaggaatataccattccaaaccaggagctaatcaaattattaccagttatagcatcttttattatggtgagaagtgtgaaactaatcacgaaagacattgttagacccgcccataaccgcgggcacggctattcgaatagttttactctggccagaggtgtaccactgtacctacaagacacgatcccgcacatgttaccatgccccgaagtaccaccacggcactacaaagggggaaatcgtgacagtacccttcgcacaacacaatccaccacagcgcaccattcctggatcataatcactcccttataaacaaggcatggactccccagcgacccccgtgggcttatctccgccacttctcaatctggtgccccgcaatgatccatgctatacaaaaggtaaagccgttgcccatgctggcttgtggttggcacggttaatgtttcacaaccgaaactcgtgaaccggtccttaattgtcatgagcacgaccatcaaaaccatgtgctcacaacccacctttatcaagttttatttggcaaattaattaattaaccaatcacgattgaccatcgtgagcttccattaaatatccataagtgatagtgaagcatgatttatcccattaatgagctaatgtttctaagcacggctaagcaactataaataacatctagctgaaccaatccaatatatatggtccatgctagtcaaattataacccataggaaaataaagtcatcttcggccataattaaatgggaaaggctcaccacccaatgacattcgagaacaatgcataagttgaaataaatcaatagctttaaacaggttcaacatgctcaaagggttgtttgggggatctgtgtgacttgcattgctggccttggaactcttcaaattcttctcctgcaaaaacggactctccggaaacgtcggaatctaaacagaaaggagcaaaatcaccaaaacagcacacaaacaagcatgaacagtacatgtggttatttttaacatgtagatctcaattttggaaaaatttagagacttgaaccaactaaatccgagctaagatgaattagttatgaattttcaaagattaaatcggattaaatcatttatatggattttaattgaattatgacgcaataatgaattatttttgaaaaggacaaagggaattattgcgtcagcggctagggttcgcgaaggaccaggtgcacggcggtggttcacgagattggacggccgagatccatccatccaaaacggacggccaagatccatcggtccacgaccaggccacgggggacgacgacgatgacgtcagcagtgacatcgccaccggcggcggctcgggcgtgcatgctcgccggcgaacgacggcgcggcggcgcgaacggagagcacctacgggtagcggacggcacggcgaactcaccggtgaccaaagtagcggcggaggagcaacggacggcaccggcgatgaggaagaaacggcagcgaccttcggcttgacgacggcgacggtgttccggcggtcgacagcgacggcggaggggcggacgaggtcagcgacggcttggccatcacgacggcggctttcccgagcggcaacgacgactggagcgacggcggcgcacggctggagcggcggcgacgacggcggcgcgaagctacacggggctagggcgctacgggcggcggcggacgaagacgagggtggcgacgggtagcggcgggcttgggggtgcttaaaaaggggctagggcgcggcggcgaaggcccacggcgaccggcgacgcgaaggaaagattagggttcgggagagagagatgaatccgattcgagattgaatccgcgaatttccaaagcgatttagacgatgtttccaaaagggaaaaggtagagtggatcacgaagatcatttcccctctattgatttcaccggaaaaggaaaggggcggctgaatttggaaggagacgacggcggcgcggcgctagggttcgggcggcggccggccggaggtagacgacaggcctgacaggtgggccccacctgtcagcggcagcgagcgcgcgcgcgggcgggcggctgcgggccggcttgggccggggagagagagagagagaaggttttgggccgactttcggcccaaagccaaaagaaaacttttaaaaccttttccaatttaaattattcattaaatgcaattccatttattaaaaatacttccttagctcaaataaatcccagaaaaatctaggaattatagagttaagcaaagtatttaataaaattttatctggccccattgtatattggaatttattaattaaaattagatcttctcttctaggcttttaaaataaattctaataattccaattaaacaacaatttatatatttaggatttttagggtgtgacaacatagcacacgaggaccttcagaagatgaaggaactcgttgttgggaacgagtcacagcggcacgggctggagcagcagatgttggacctaggggaccacctggagccaattcgggatgccgtccacaagaacttcactctccttcatcatctcgcgggggaactcggcatcgaagccgacatcccaaaacactccgacgagacgatgctggtgtcttctctgtatgacctcatcaaggcgatggagaagatccctgggaagcacgccgccaaggtggccgaggacacctgcaccggactgcgcacaggcgcatgtcacattcttgcctgcgtcaagcttgcctaccctaatatcgacctcaacatggtcttgaccaagggggcagacgacacgagcaaggacgtgatgtcggaggtgtcggagaccatcctccctttttatgaagagtaacttatcttgcgcttttaatttcgaacttgtaaacacattgggtttgtatagtccttgctagaacgattctccctttttagtttacttcgagtgatttgcgctttaatgggcagatctggaggtgtagctataaatagtccactctctccatttgggagtgctgctggactgattggatcatttgagattcatgctttcttgtttccatctctccatgcgggtttgattcggatttggtgcgtgtgtgagagttgtggattcaagattgtgtgggtgcttcttgttgacttcgtgaagatttgtgagcacttgcatcatctccgggagatcgttttaacagaagacaatttggctaggaggaattggaatggtagtttgagatgttggttttgtatgaaaaatgaatcgatttaccatcttttcctacattgccattttgctagatttctttggagatttatgcaattctcgtttggattataccctccacatattatatctcatatgtttgggaattggcttgttggtgttaattaaaaaaatcaaggaacttatccttgttggaccttccactgtttgttgggctctctggcttagtagaaatgaaatggtttttgatagatcacctcaactacaaaggcatgatgatcatatcaagctaataaaagatgcgtatcataaacttgagtcgacgatcatgcagctctttgccaactttggatagagattcaccaatagaattctgtagttgtgggatctttaccttgtttggtttttattgtttgaaccttgtaataattggttgtagctattagagcaaaagtcaggatgttttattccattatctaaaaaaatctcactttttctcttatcgaattgcatcaaaatgaatattcatttagacacaattgctcttgatgtctttcttcatacttgttcacaagtgagcaactgttttctcattggtcatatgaagggtgtcatcgcaacagttgtgttaagaagcttttatggtccaggaagctaccagttgaagtgcttactgaaagttcaagtgccattagtttggttttggtgattaatgacaaattcaattacatgagactaatattgttataaggatgaaatgcgtggagatcaagctatatgtatcactctttctctccatgcacatattgatatattcatatataatattttcatgtgagactaatgttttgtttgagccatatcttgtttagtctctttacattgagaacatggagatgatgaaggtatgtttttattttaatgtctatatttgataaatgccttctattcttgtataggataagctctcaatgtttaatatcttgttatgtatactcttgcttcacacaaatattttgtatgcatacatctagggggagcaaatcctatactttagttatgcatgtaatcgatccaagttattcactttcatttaattgagatctttagatttgagcatatatttgagtatatgacacttctggtgttgattaatactcatcatttattcatatcctattatacatgcgatcggttggttaacatgtggaggttgacaaccagatcattgggactaataattttattgagttgaatgaaaaaaataggtctcaaggattgcaaaggtgttaatgctcaaatgatataattacaccaaatgataccaagaatgacaaagtgaagatattgaatgtaacatcctgaaaattacttattttctaattaagcatcatgctggttcttatgttcttattaaccttttaaacctaggaaaatataattaaagagacctccaaaaattaacttgcgtagaatctctctttgctatttaaagtctttcgtggtttttattctaaaattgatcttattaaaccaaggtatttactttgattcgatttttcactttaaaccttcttttgtaaaattcctctatttcaattcaattaaaaacccttttatgaattatggtcctagaaaccttcccatattacccttgaatctaaaccaccaaaaattctaattccattggaattaattgttaacccatcctttaatcttaaacctatcctttgattctcgatccaaatatccaaattcctccttttgatctaaccgccagtttaattcctacggcttgatcccttctcggcacaagaatggtattattacaaacattgtgaataattgctcttgtgctaaggaaatagattatatccttgtcattcaaaatctcatttagcccataattaattctctagatttctaccacatatttggggctaaaatcttatgtattccattccctccatttccctcccatattcccaactatatcttcaattttattcatatattcctctctcttatttgagtgcatcaaataaatctcattatatgccacctctaaaatattgcactcaaataatttgaaaatatctctcttgggaattatgtcgtccgagtcttcatcatcatcatcaatgatcagttttcttggcctcttcctggagctagcttgatgtgaccatggctactacggatacaacaattgctcacatcatcgatgaacaagatgatatcaaaatcaagtccttcaagtgctgatcaacaatccacggagaggtgtattgatcgctaaggcgcaacacaacgtctcgtacggttgtagtcggatcgtcaacgtttctccctaatcgtagttacctacaactcaccgaaagaccgggccaacaacagccttgagtgtcgagagaaactcagggttcatcaggtggtatcagagctttcgttgctcggtgagttttcatttttacctagaaccagaaaatagccaaaaaaaaatttcatacattacctagccatatttgtgccattgcattgttctatgcagtttttgctttgttgaatttttgttgcattgtcacgtcgtgttgctggtcttagcgtctagttcgtttagagtttcgagttctggtcacgttttgtaccacagtcgttgttgcctccatgtatctattgtcgtcgggacctacgaaaacggaatcggcttgctgccacggttctatttttgtagttttcagaagtttctgtcggttagtttttgagttcttgagttgcatctaaggtttctgttcggtggctatgccgtggttgtatccgtgatggtgcgcatgtgatgttgtgcatgaggaagaaggaaggagaagagtagattagatcggtttttggtagtagattggatcggtttctatttgaaccggattcggtttccttgcatgagagttttccttttattcggactccgtgtgccgtgtccttcctttgccgcccaccaccaccaggccgagatttctgagtcagactccctccctcacggctataccatgacatcccatacacttgggtgaaaatttttcgtgcgtcggattgaagatctgtttgcaaaaacgcaacctatgcaacgagagcatttcatttttgtatagttctaattttgggtttggattttcgtatttgagtccctgtaattttagtatttatatttgagtccgtgtaatcttacattaagatccttgagtcggtttttgttaaaaaaataaaataaaaatgagagaagaaaaggcagaaaggtgcataaaaaaagaaaaagaaaagccgcaccaaaaaaaaagaaaagaaagaaaataaaaaataagagaaacaaagaaagaaagaaggcaaaaaaaaatcagtttggtttcatatattaagagtgtgcttgagttgtttctgatgttatcttgtggtaccgtttgtgtctagactcgcttctctattacgttctagccttggaccagcacggtacttgactttgaacgatcattcaactttgcattctctagattgagcatttgctattcctttgctacatatttaagcctacctagagctccacagatttgattgtagccatacagcaagtgtttgccaaggcatcgatacatccaaactccattggggtgcttggttgagtcagtgtacgtcaccattccacttgctttggtaagaacttgtaagagcttggtgaaaagcttgagtgtgtgtgatatttcagctgccactacctagtagttgataggagtgtgcatattcttgtgtatgttttttgtttgctactaaccatggcaggattgtgcaaggggaaacaagatggtcatgctcaacatcaacatcttcaccatcaacgagatatagcgacttcttcacgcatcacatatgaggtacatgataatgatcttgcaagggtagaatctaaattgccagtttttgatgctaagtatgatccgcttatgttaattgggagctagcagtagacaaacaatttgatgagtatgatttctctaatgctcaaatgattaaggctgctagtaataaatgtaccggttctgcatcattttggtagtacacagttggcaataagcttgaaacttgggatgaatgcaaaacaatgatgaggaaaaagtctgtgtttgcatattataaacgtactctacttgagaaattagaacatttaaaacaagggtgacaaacctgtgcnggagtactttcatactttttaaatttggtatcacttatagtggtttaaaagaaagcaatgagaacacaatgactagtttttttttagagggcttaattctgatattcaggctgggcttattaatgtgacatataatcatataggccacttgttcatgctggcttgcagtgttgagagcaatgttttaaagaacccaaaggagaaacaagctatgcttgtgcctcctattaatgacattttgcagggagctcagaacattcaccatgaggagaagagcaatatgctcgggatgtcatctccatcgctcacgaaggaagaagagaagactgatgcacctacaatatctgaagagggcataaaaggtaaattaaatggtgctgatattactcaatgtgagtgtgcttctgatgagtcacatttgtccactatccatgctaatctagagcaaattttggtggaaactacttctgatttgcctttgtcacaagttgatttacttgctgttccttgtgataaagaagagttgttgataatgcttcacttatatccctaccacaactagtgaatgaaaatgctatttctagtgtttcattgtgtgctgattttaagcatgttgttcacattgctaatgatgttgaggaacgtaaattgataacttctttaaatacttttggctatgttcagttcgatggtttttgtgagctcaataatttggaggagaaattatttgctaagtttgatttgccatgtccaacaaatgctatttttcatatctttggcgaatataatgatagaggtgatgtgactatggctactacggatacatccgttgctcacatcatggatgaacaacaagatatcaagtttgagtcctccaagtgccggaatccgattcggccacctgctacactgctgacttcaaacggccgccgaatctgcatacgacctccgttttcggcccgtgagtacttgatggaaagctctcggagtcctctttccaatgaatccagcctcattgccaaattccatctcactcggcagcaactgaagaaacaatgtgctgcgacacctgtaatgggcctatgggcttgtaacttcgtctggtaccccggcccaagtggggaccatgtggggtgcgccccaaccaggtggaggacgacctagaggacctcccacctccttaaatagctaggtagccctttagagtttcttgggttttgatagattaaagtttagccattgctacttgcttgcagcgcgcgtgtcggctagaccgtccgtctgcttgttcttcggaaccccaacttatcgtgtgtattaattcctatttgcaattcggattgcttttatcttgttcttgcttgtttcttcgatttgcttgcaggaataaggttgatctgcaccggcaagatcaacaacccacggagaggtgtatcgatcgctaaggcgcaacacaacgtcttgtacggttgtagtcggatcgtcaacgtttctcccaaatcgtagttatcatcaagtcagcgaaagatcgggccaacaacagccttgagtgtcgagagtaactcagggtccattaggtggtatcagagctttcgttgctcagtgagtttttatcttcctataaccagaaaatagccatacaaaataattcgtatcatttacctagccatattgtaccattgcattgttcttttcagtttttgctttgttgaattttgtgttgcatcgtcacgtcgtgttgctggtcttagcgtctagttcgtttagagtttcaagctctggtcacgttttgtaccacagtcgtcgccgcccccttgtctctgttgttgtcggaacctacgaaaacagaatcggctcgctgccacagttctatttttgtagttttcagaagtttccgtcggttggttttggagttgttaagttgcatctaggatttatgccgtgtggttgccctctgttccgtggttctgtatgtgatcttgcatggccgtgctgatgcgcttgaagaagatggaaggcgtgcggaagatggaaggtagagattagattagttttgtttggttcgggaaggaaatagttgattggatcggctgaagatcatatttcctttcttcttatctctttcatgcgcaccaaatccgaacacctgccgtttccttccaccccgcacccaccaccaccatgacaaagtccgactcctttcctctactctcggtttcagtccgcaccgtgagttgctagacatcttggtgaaaacttttggagtgtcagattggagatccgtttacaaaaacagaatctacgggacgagagcattccatttttgtataattttaattttggattaggactttttcatttgagtccctgtaatttttgtattttcatttgagtccctgtaatcttacaataaggtccttgagtttgtgtttggtaaaaaaaatcaaaaaaaaggagaaaaaaaggcagaaaggtgcataaaaaaacaaaaaaaaaagagccgcaccaaaagaaaaaagaaaaaaaacatgaaaagaaagaagaagaagaaagaaggaaaagaaaaatcagttgtatatttgagattaatttgatatatcggagtgtgcttgagttatttctagtgctattttgtggtatcgtttgtgtctaggctcgcgtctctagtacattctagcctaggaccagcacggtacttaactttgaatgatcattcaactttgcattctctgatttgagcatttgctattcctttgctacatatttaagcctacccagagctccacagatgtgattgcagccgtacagcaagtgtttgccaaggcatcgatacatccaacgtccattggggtgcttggttgagtcggtgtatgtcaccattccgcttgcattggtaagatcttgtaagagcttggttaaaagcttgagtgtgtgtgatttttgagctgccactacctagtaattaataggaacgcgcatatttttgtgtatgttttcttcttttctactaacaatgacagggatacgcaagataattggggatagctgtgctcaacatcgatatcttcgtcgagacatgaggagtgatcaacatgacgattataaggtaagtgacaatgttctatgtaatatcaaatctgcactaccttatttcgagggaaattatgatcctcatgcttacattaattgggagctagcggttgatagagaatttataaagcatgtcttgtctgagaaacaaaaggttatgtgtgcctctagtgttttaattaaacatgattctaatgattggaaacatctttgtaggcataaaaaaatgccacaatcttggaaagacttgaaacgatatttcagagatgtttatgttcccatgtattatactgatattctgctcaacaaactgcaatgtttaaaacaagataccaaaattattacttcatactatcatgatatgcatgcttgtttattacactgtggcttagatgaatacgaagaagctacagaattgaggtttttacgtggacttaacaaagaaattcaggacatgcttgcttgtgaaaaatatagatctctttctcatttgttacaacttgcttgcaatgctgaaagtaaaatagaggaggatatgaaaaagaaacacgctatgtctttgcctccaattactaaccatttgcaggaagtgcgtaatcacgaaaaggaggagagagacatgaaagagccaccaattccattgttcacactcaagttcgagacacctcgatcatcagaagaggacatcaaaggtaaagtaaatggtactgaaattaatcaaggtgagtgcgttgttaacgaagtaaatttgtccacttttcatgctaaagtagagcaaccgttagtggaaccaaatgctagtattcctttgtcacaagttgatttactcgatgttccttgtgataaagaagagttgtgtgataatgcttcacttatatccatgccacaactagtgaatgaacatgctatttctagtgtttctttgtgtgttgattttaagcatgttattcacattgctaatgaagttgaggaacgtaaattgctatcttctttaaatactttgggctatgttcagtttgatgatttttgtgagctcgataatttgaaggagaaattatttactaagtctgatttgccatgtccaactaatgctatttttcatatctttggcaaatataatgatagaggaatatatttggtgcatagagttttcatttgttcggatttagagaaacatgttattgctaatcacactacttcgagtttctctagttttgattggatgaaacaggttattttgaatggactatgtgaagaacaccatatggaaaaatcgaggacggttttccgtgaaaaaggggaggatgatgtgaccatggctactacggatacatccgttgctcacatcatggatgaacaacaagatatcaagttcgagtcctccaagtgccggaatccgattcggccacctgctacactgctgacttcaaacggccgccgaatctgcatacgaccttcgttttcggcccgtgagtacttgatggaaagctctcggagccctcttttcaatgaatccagcttattgccaaattccatctcagtcggcagcaactgaagaaacaaagtgctgcgacacctgtaatgggtctatgggcttgtaacttcgtctgggaccccagcccaagtggggcccatgtggggtgtgccccaaccaggtggaggacgacctagaggacctcccacctctttaaatagctaggtagccctttagagtttcttgggttttgatagattaaagtttagccattgctacttgcttgcaacgtgcgtgtcggctagaccgtccgtctgcttgttcttcggaaccccaacttatcgtgtgtactaattcctatttgcaattcgtattgcttttatcttgtttttgcttgtttcttcgatttgcttgcaggaataaggttgatctgcaccggcaagatcaacaacctacggagaggtgtatcgattgctaaggtgcaacataacgtcttgtacggttgtaatcggatcatcaacatttctcctaaatcgtagttatcatcaactcaccgaaagatcggaccaacaacagccttgagtgttgagagtaactccgggtccattaagaggaatatatttggtgcatagagttttcatttgttcagatttagagaaacatgttattgctaatcacacaacttcgagtttctctagttttgattggatgaaacagattattttgaatggactatatgacgagcaccatatggaaaaactgaggacggttttccgtgaagaaggggaggatgatgtgaccatggctactacggatacaaccattgctcacatcatggatgaacaagatgatatcaagatcaagtcctccaagtgctggaatccgattcggccacctgctacactgttaagttcaatcggccgccgaatctgcatacaacctccgtttttgacccgtgagtacttgatggaaagcactcggagtcctctttccaacggatccggccttatctccaaattccatcccagacatccacaaaggaagaaataaagtgctgcgtcaccagtcatgggcctttggccttgtacctttgtttgggaccccggcccatgtgaggcccatgtggggtgcgccccaaccaggtggagcatgaccctagggacccctaggtcgtcctcccacctttataaatagttaggtacccctttagagtttcttgggttttgtttagatgaaagtttagccattgctacttccttgcagcacgcgtgtcggctagaccgtccgtctgcttgtattcgaaaccccaacttatcttgtgtattcattcctatttgcaattcagattgcttttatcttgttcttgcttgtttattcgattttcttacaggaataagtttgatctgcatcggcaagatcaacaactcatggagaggtgtatcgatcactaaggcgcaacacaacgtctcgtatggttgtagtcggatcgtcaacgtttctcccaaattgtagttacctacaactcaccgaaagatcgggccaacaacagccttgagtgtcgagagaaactcatggttcatcgtccctccaaacacaaattctcctctaaatcaaattattcaatctccatacaaaattagactttctcccttttgagtttgggccgcatttctcctttcctcctctcactcgcacggcccaagccggcccaaccagctgagccgccctttctcctctctgtgggcgcactcggcgcccaagccacagcgccgccgccgcccacggctttgtgcgccgtcgccgccgtcttgccgtcgccaccaagtcgcgccgccaccgtcgccgtgccgtgctgctcctcctccgccacccaacacagcagcagctgccacgtgctcgcgccgccgtcgacatccaatgggagcacagagctggcgccgacttcttcttttccacggcgccgtcgcgaagttctcctcgatcttctcctctggaaccgccttgcatcaccgccttttgccgcctataagtacccggcgaggtcgcccttttcctccacacacatccaagctcaagctcttcttctctctctcctccccatgccggccgtcggccgatctccctcgtcggagcattgccgaccaagccctcgcgccaatacgttcgcctcgacgagacaaatccattccctaaccttccccttcctttccccttccgagattagccaccaccgttacttcccaaaccggccggggcaagcttttgtcatcgccgttccggtctcctctctcactccccctgccggacaccgccctccccggacacgcgacgctcgggaacacactttgccgccggcgtcgccacctcccggccaccggagcaccggcgaccctctctccctctctcccctgtgactcgactggaaaggagaagagaagaaacgaacgaagaagaagaagaaaagaagaaagaaataaagaactgacaggtgggtccatgaacagtgcactttcatcttttctagatttaattcaaaccccaatctttagaagcccatatctcctaaaccatatatccgattccaatgaaacttggatctaaattcatctaaattcaaatccttcattttgatatcaaatttgctatattaagattttatttgaatttccttaatttattcaaataccatttgaataaatatttgatttaattaatcttatatttgaatttccaatttaaacttatatttgtatttcaaatatttccttttaacccaaaatacccttcagccactaaaaagctgccggttagaactttacaccttctatgtgggcgtccgtgcgatctacaggccccgacgtcgaacagttggttgtaaagcctggcaaaacccaaacccaaggtcgaagtgctgctcctggcaccctacgcctcgatgcgtacaacggtcggagcttcactattccttcgacctccacagcacacaacatagttcgctcttgaactctgtgtgatcctagccacttcgccaccactcacggtcgtcggagtaacacttcttgtacaaacttccgattcctctagccgttataatatccatcgacaccagctagagaagataccaaacctagtcgttatgctactcaattctagcatcgactagtacacaaccaaatcctagtcaataccttgctagtcaaattccagtcgtcttccaatttccatatcagctacaatattacctatataccactttccataattttactcacccccaccatatattctccatctacccagaacctatacatataatatagagcctggctaatatattgccctactccacaattggcttaaatataaccaaaccctaggtgtaaacctacctaaacctaccaccagccaatactagccacatactcgcttaaccagttatatcccctactctccaagatattaaagctttcacatgaaatataagcgagaatagttgcttaatcccctctagcctccaaccatttagaatctatacctgaaatattagccaacaatccctacaccttataaaggagatatctataccctaaacccagcctttctcgctcttcatcattttcttgctattttatggcttttattgaagttggttcttcctcttcttcagtagagtctattatatttggatggcaacctgtggtatttcgagcatcggataatcaggttgcctatctcggatttatttgcgctggagcaaggcaagttattattcttatccttgagcataattaccctatattctatatctctattctatgcattagtcatacatgatttcaaatgcataacctaaacatagcaaaccagatatgctagcttttgcttagccctgcctagttagactgcataaaatataatgaacttagattggaacagtacgatagaaatagttgatttccgggtggctagtactgtttcaaccgacataagactgcccaaatacttatgaagaacgaacgggtacgaccacagctctaagtgcaggtatagatctagcattatgttattaacaatgtggtacctatgtacagtggttctttttaagtcctcatgcaggaggaaaacttatgtcgagcggggcaatattgtgatatttaccgaggcgcaggtaaatatttgtttgagataaattatgatgactagtctgtttggcatggtgtcatacaatcaattctctctaaatacctcgggaatgccataactcctcacgctgctgataacgttacgttcagagcgtatggggactagagttcatggaacaggtgccactattgttagtaatctaatactaggccatgacgaaactgatgattatcagcaagtcgtgggctgtgggtaaagcgtacatttactgcagtatgaatattcatgaatctattcgaatagccgtgctcacggattgagtatcgagactcatatggtatttggttagaaacttaattctaaactttattaaatactgttgcatttaaaacattacatgccttcttcctctatattctcagccttctgcaagtaaacttagctctactcaaatattaccatttcatgcattcaatattgattaatataatagcttgctgagtacgttgtactcatccttgcttaaccccacctttttcagagtccatttgatgttcttgccgaagccgggagttcaatcatataagttagtctcattctaacttagttctcaagcatatactagatagtttaagtctatagcaaaacattagagttggctcatcctatagcttctactgtaatagttagccacaaacttctaaatgtcctattattttataataacatctcctctggagccttgattaaatgtatgcaatgaagatccatattattgaacctgtatcaatctactgatccagggcttgatacagttttaataagtcggttaccgaatcattagttttgggacccgacactgaagatgtgggatacaaagttactactatggcaagacggtgaaggacaagcaatgctcggtcacgatggaccatgcggcggtgaagggcaagcaaggggcttggtgccaaagaaccaaatccggtggtgaagggtgagtgacggctttgtcatgatggaccgtgcgaggccatttgaagctacaagtaatcgcatcaatcatttgaggaatatatggtgaaacggttttggcattggtatcccttaagacaataaaagaaagatgaaaagaaggcattcctgttgacataattatcttcctatttatatttgagtttaggaatgccgtactattaagagggatacaacgtcgaggtgtatatgccaccggtttcaccccctaacttgaataagccattataaatatgcaaactgcaaatttgccgctgaaattagtttgcattgcttccgtttgacattaccatctaaactggtatgattaaaagggcaaaaacaaggagcatgaaaagaccatctttcccctagccggaatagatctcgcacccctctctcttgcgggtgtgcaggaggaggatgtggaggcggccaggtgggcagatggcgtgtggacgggcggtgtgttggagcatgacgccatgacgggataatgtgtggaccgcggcgtgtggccaggcagacggcggcagggcggcggctagtgtgcgcgtaggtggcggtcggagtcctcaccatgacggcatcggagtaatatttttgaggtaatcttgcgggaagtgcgagtcgacggcagccgccgcgatagcagctgcaacaggagcagcaatgcttgcggctgtagcacaagcatgcgacaacagccgtgcttgtggcggccccagcagcattgtgtggcatcagctcactataggcatgtcgttggagcagcagcagcaggtccctgcgacagcagcaagccagcaagctggtagagctacagcaagagcagcaacaatggcggacaaaggcagcagcagctgtagcagggacaggggcatccttgtcctatttgttttgtgaaaacccatagtctaacgatgatattccgagccgtgtatccaatatgtacgtgggttccaaccgttttcgatggcaggcatgcaattacgttttttatagtggtaaattcacaataccgattcaaaccagtgctaaatatgcaattggcccaaaatgagttgagtagtcctctgagtgagctttacatagagtccaagatcatcaaaaaggactcccgagcgaaaagttatggtcgttttactctgtgctttccggaaattccgaaaaattatcggaaactccgaaaatttttgaaaaactccgaaaattttcgaaaattccaaaaatggctgcgaatctgagattggcttctgtaaatttttggacttatctgaaaatgcatttcggaacttccgaaaatcacattcttggcctccaacggctagtttttgaggggctcgggtatataaactcctccatccctcctttgagtggctactgttcttgggaagtattagacatattcaaagccaaatagtcatccccatttccctacctttgtggtgcctctttgtgagagggatttaagaaggggagagagttggattgagagactaagaagttgagagctagtgagcttcgctccatactttgagcactcgagttcatagcaagcaaattttcgattgtgtttgttactcttggggattaaggtctcctagacagctaggcgtcgccggtgagcacccaaggttgtggtcggccaccgaatgtttgtgaaggcttcaatttctcctccgcaaggaaagaaatcaagagtaaaaccgaggagtgcatttgtgcaacctcgtgaggaaagggttgaaatagggctggcccttgtggctcctcaacggagacgtaggatccgtgaatctgaacttcgggaaacgaatcacgcatctcctctcttggtttgcacattcttgcattctctcatattgtgcttgagcttgtttttatccgttctacttgcatggttaattaatatagttggtgaccttatatcttggatagataacttatttgtcaccttttgttcatatacattttgtttgttcgagctacaagttcatagctagtgttttattccgttatccgctgaacttttcggttgagaccgaaacttccaatcccatacctaaagtttcgatttgaactgaaagatctcatcattctaatatgctatgaagttgtgataatttttaggaacgcctattcaccccctcccctctaggcgacatcaaggtccttccaattggtatcagagcgagatctctcatttcgggcttcaccgcctggagagaaattatcgacaagaggtgaaatgttccttgaactccttttgctagatggttcaaattacatatcttagagtactcgtgtgcttaatgtgtttagggccatgggtctgcatatagagtgagttgtagatgtgagtatttctcctcctaatgataaagagctatcatttgaagaggaaaagaaatgcacacatctcaatgctaaagctactaatgttttgtttagtgctttaagtgaagatgtgttcaaaaccatcatgccacttgaagatgctcatcttatttggacaacactaaaggaaagacatgacaagtccaaatctgatggagatgatactcttgtggaagcatcatttggggattgctctacttcatcgcctcatcatgacaagtctcaagtgattatctcctccgaccaagaaggtctcaccccatcatatatctcaccaacatgcaactatgagcaaggtaataaattggtgagtaaggttgatgatcttccaactctcccattggactccaacaacactgataatgaaattgatatatttgattgtgttgttgactcatacatatcacttagcattaaatatgtgcatgtggatgatatggatggatgctctacttcatgtagtacttgtgaaactaaccttttgaaggagaaaatgaatggacatcaatgattaaatgaagaatccacaccatcaatttgttcatcttccattgccgaagatcatctgtgctttatgggtgatgatgatgactccgtggttgatcacttgaacaagacgaacacaacaatggtgatcaagctcatgaggattattgagaagtaacaagcatgtctcattaagaagaatgaagaaatcaagggtctagccgatgaacacaagaaactcgagggatctaattcttcattaattatgaggtatgaaaaattgataaatgaatttgcttgtgccactaattctattgcatgtgtagcatctttggagaaggaaaatcaagagctcaaatattgtttggagagaatttaaactagaatctccccgcccagggaaataaaatgtgcgggcgtgccagtgtactaagtacacaaataaaatagacaaaggaaaatgtatttattataattcttgatgaattaaaacaatgcaaaatccttgatcaaatgcgctccacggcctataggcaaggtggatctgccttggcgattgtgttctcctggttctcggggtctcggaagacacccggttaattgctctcgcgggttaaacccgtgagatacctccgattaagctgcgctggtcgtcgtcgtcagtcttcgcttcactttctcccatgaatgattgtgatggtggtgaagatgtagacgtgtgtaggcgccggcagcggtccacggcctcatcggtccgtgcgccggtgttggtgacgtcgccttgatgtagacttcacttgttcatgccgtttagcctcatcggtcttaaatggtgtacttatagtggacataggtttttttggttgtaagcactaggaggctggtacaactcttctagtcttcttgaccgtcttggtgccatgtgagcaatgggagaatagtcaggagaacattgaccaatcattttgctcgattatcagcgggataggtctctggctcgatgtagagatacatattgttatggccttgcgtcgaccaatcactgtgacactcggaatagcgctgcttttctggtttctagcacactggctgaatatcattgtggtacaagagtaggccttccaatcattgcagtgcacacttaagattaagtggtttttgttgagattatagacatataatgatttaatctattccataaataaatcatgacattacagatgaaaactagcatgaacgcatcattagatctacacatgtaaactacacagtataacatgaacagatcaaatatgcgcaacatattgaacacgtaccgaggtgacggaaagaccggctgcttggtcgaaacttttcgcaggtgtctacgaaggcacgaaacacgcgagcgaagaggaaagcgagccgtcatgaacgaacagggagcagtcgcgcgaagcgcttcccaaaaaccttattgccgccttctcccggtgcagaacgtcgaaggcagaggttccggagacctgctctcccgatcgccggtgcacgccggcgagcgagatggagtagtctacgagcgacggcgcagtacagagtaggaggcaaaccctagattgattttcgcatatgctgcgtgaagacggcaggtcggtttatatagagaagggtcgcttgatcagggcgcccgcacgatctctactgcgcgtaaccgaaccggataagtcgcgcgtaacttatccggactccacgccgtttgcacgcaccggatttttcggaacgtttccaaaacaaaaacgaatccgaatttgcagcaaaacaaaactgcaaaaggaggctgcatctgcgcaagggtgaggagccaatttttcggaccattcgacgcgtacgtcgtgcacgcgcgccgcctgccctgcccggccaggccaggcgaggcgaggcgagcgagcgcgcgcatgtgtttcccctcttctctccaccacacatgcttcaagtgactaggagggcatcctcccttttaaggaggtccccctctcctagaataagcaaggtggtactaaactccacatgcatgccatcccatgaggtgggcttttgtgattttccaaagaattaatcttcgagtgggctaaggcccattcattaattccaacaatcccccaccaaatctcaaaatcccactgagatttgccttttccaatgtactgtttatataccagcggttcgatggagaccaattaaggttgaacatccacctagaactccaagctacacttactcacaacttgaacaatggactacgccttgaattgcaagtcttgtgcaagcaagtttcactcaaagtcttatctggtactagaccgtctgtagactacccctcgggtggagcgtataagtcatactcctaggtctttagtaagcttcctagaagattcacccaaaatcttcatagactgcgaccaacagtcaagctcacaaaggtgagttctttcaagaatgctctgcaggacaacatctttgctaattaaagtcaacagaactcattaaggcatagccaacctgccttgcagctcacgagagtatatgcatcttcacttggagagggtatatatattgatactctcctctagtttactaatggtttgttcttcccaggatctaattcacgggatctccgatcacatagactgggttaccaccatagtataactcacatgggtctcaaacccatctccttcgatgcattgtctatcacatttcgtgatagtcccttcgtgaagggatctgccaggtttctcgctgtttggatgtaatccaacgttataactccggagtttcttaatttcctgacagacttcaatcgtcttttcacatgtctagacgatttcatattatccttagaactattcactttgacaattaccgtttgattgtcacagttcataaggatagccggcaccggtttttcaacaacaggcagatccattaatagatcacgcagccattctgcctcaacagtagcagtatccagtgccgttagctctgcttccatggttgacctcgtcaaaatggtctgtttgcaagacctccatgaaacagcaccaccacccagtgtgaaaacatatccactagtggctttgatctcatccacaccagagatccagttagaatcactataaccctccagtaccgcaggatacccagtatagtgaagccccaattccacagtacctttcagatagcgcattactcgctcaagcgcacgccagtgatcatctcccggattagaggtaaatcggctcaacttgctcacagcaaaggagatatcaggcctagttgcactagccaggtacatcaacgagccaatgatttgggagtattccagttgattcctagcaattctcttgttcttgcgaagcaacaagctaggatcataaggtgttggagaaggcttactatcaatgtagccaaagcgattcaagatcttctccacataatgggactgcaagagtgtaatcccattctcacctctaattagcttaatgtttaagataacatcagctactcccaaatccttcatatcaaaattttgagataagaatgatttaacatcatttatcacctcaaggtttgtcccaaatatcagtatgtcgtcaacatacaagcacaaaataactccctcacccccaccatggcgatagtacacacatttatctgcctcattgactgcaaagcctgtagatgtcaatgttttgtcaaatttctcatgccattgcttaggagcttgtttcagaccatacaaagacttcaacaatttgcacacttttccttcttgaccttcaactacaaacccatcaggttgatccatatagatctcctcatccagctctccattaagaaaagctgtcttaacgtccatttgatgaacgagaagaccatgtgaggctgctagggaaagtagcacacgaattgtggtcaatctagcaacaggtgagtaagtgtcaaagaaatcttcgccttctttctgagtatagcccttagcaacaagccgagccttgtacttttcaatagtaccgtcaggcctaagcttcttcttgaacacccacttgcaccccacaggtttacacccatagggtcgctctgtcacctcccaagtcccgttagcgacaatggaatccatttcactacggacagcctccttccagtagtctgcatcaggagatgcatatgcttctgaaattgacttaggagtgtcatccacgaggtacacagtgaaatcatcaccaaaagacttagccgtcctttgtctcttactccttcgaggagcttcactaacatcctcctcagagacaagttcatgtgtatgttcagtttgttctggtggtgtgattgaactgggaattatttcagatggttggttcgaaccactatgtgtatccttcattgggaaaaagctctcaaagaagatagcatcacgagactccataattgtaccaacatgcatgtccggtacctcggatttaactattaaaaatctataggcaatgctatgatgagcatatcccagaaaaacacagtccacagtcttaggtccaagtttgcgcttcttcgttattggtacattgactttcgccaagcacccccatgtgcgcaaataagaaagtgatggtttttctaccaatccatatctcatatggtgttttgtccttatttctgttaggaactctgtttaacacatgatttgaggtcaacaatgcctccccccaccatgccttaggcagtcccgcggtgtccaacatggcattcaccaagtcagtcagtgtgcggttcttcctttcagcaatcccattagactcgggagaatagggaggcgtcctctcatgtatgatgccatgttcctcacagaataagtcaaactcgttcgagaaaaactttccaccacgatcagacctaagcctttttatctttctgtcaagttgattttcaacttctgccttataaattttaaaatagtctagagcctcgtctttcattttcaacaagtacacatagcaaaatctagtagcatcatcaatgaatgtcatgaaatatcgttttccacccttcgtcaacaccccattcatttcacaaagatatgaatgtaggagttctagtggtgccaagtttctctcctcggcagccttgtgaggcttgcgggttgctttgattgcacacaactatggcacttagaacctttgacaatggaaaacttaggaattaaacacatgctggaaagccgagacatcaagccaaaattaatatgacataaacgtgaatgccaaacattagcctcatcatccacactgccacaaatatggttcacagacttattgcagaaatcagaaagggaaaagcggaacaggcctccgcactcataacctttaccaataaaatatccatgtttagacacgactactttattagactcaaaaaccaacttaaatccgtctctagtcagacgggagccactaacaagattcctgtcgatagaagggacatgctgcacgttcttcagctgcacgatctttcccgaagtaaacttcagatctaccgtgccaacaccatgaacagaagcatgtgacccattccccattaggacggtggaaccccgtgcgacctgataagaagaaaacaatgagatgtcagcacaaacatgtacattggccccagtatcaacccaccaattagtagattgattaactgaaaaaacagtaggtaaattaccatacccgcttccatctccagtgttgccaatggtcacattagcagacttagaagtctgccctgcaggtgccttcatccccttgcgctgtggacacttcctagccagatgaccaacttgaccacacacaaagcaaatcctctcatcctgattaggattattgttgttcttcttctgcttcttgaagttggtggtctgctgagctttgtatttccccttgctcttgttctgggccttgtgcacaacattggcactggactgcccaccatcgcccttagacgcggcatctttttcccgagctttctcctcaacatcaagagacgctatcaacccctcaacggagtattcctgtctcttgtgtttgagtgcagtaccgaaacttctccaagatggaggtagtttcgcaataatgcacccagccacaaatttgtcgggtaagacacacttaaggagttcgagttccttagccatggtttgtatctcatgagcctgttcgactacagagcggttgtcagccatcttgtagtcatgaaactgctccatgatatacagatcattgctagcatcagtagcaccgaatttagtattcagtgcatcccacaactccttagcgtcggtcatatgcatatacacctcgaccagacgatcgccaagaacgctaagaatgcatcccacaaagagagtagtggcttcctcgaattgcttctgctgttcagcagtaagaactccttcaggtttgccagtactcacccagaagcatttaatagctgtcagccacagagtgaccctgatctgccatctcttaaaatgcacaccggtgaatttatccggcctcagtgcatcggcaaaaccagccatagtaaaatcacagtgcctataataaggtttttggattgttgagattatagacatataatgatttaatctattccataaataaatcatgacattacagatgaaaactagcatgaacgcatcattagatctacacatgtaaactacacagtataacatgaacagatcaaatatgcgcaacatattgaacacgtaccgaggtgacggaaagaccggctgcttggtcgaaacttttcgcaggtgtctacgaaggcacgaaacacgcgagcgaagaggaaagcgagccgtcatgaacgaacagggagcagtcgcgcgaagcgcttcccaaaaaccttattgccgccttctcccggtgcagaacgtctaaagcagaggttccggaacctgctttcccgatcgccggtgcacgccggcgagcgagatggagtagtctacgagcgacggcgcagtacagagtaggaggcaaaccctagattgattttcgcatatgctgcgtgaagacggcaggtcggtttatatagagaagggtccgcttgatcagggcgcccgcacgatctctactgcgcgtaaccgaaccggataagtcgcgcgtaacttatccggactccacgccgtttgcacgcaccggatttttcggaacgtttccaaaacaaaaacgaatccgaatttgcagcaaaacaaaactgcaaaaggaggctgcatctgcgcaagggtgaggagccaatttttcggaccattcgacgcgtacgtcgggcacgcgcgccgcctgccctgcccggccaagcgaggcgaggcgagcgagcgcgcgcgtgtgtttcccctcttctctccaccacacatgcttcaagtgactaggagggcatcctctcttttaaggaggtccccctctcctagaataagcaaggtggtactaaactccacatgcatgccatcccatgaggtgggcttttgtgattttccaaagaattaatcttcgagtgggctaaggcccattcattaattccaacagttttaggggatgttaggggcatagcctagcctgggaacgatgagacgtgttccaggaactgggtggccctcttgtatatgcgccgacaatcggagccaaacccaaattatgttgggctgtctccgatcgcagtggcttgacttgggagtactgcgtcgtcggtcttcgcttcacgttctcccatgcatgatggtgatggtggagtagatgtgtgtgggcgccggcagtggtccacggcctcgtcggtccgtgcaccgatgttactgacatagtcttcatgtagactccgcccaccctgccgttcagcctcatcggtatattgttgttgaagacatgtatggaattgtgtagcttggatgactcgacgccatagcaattgcgtcggaattaaattataaaggtatgaatgatcaacacggatgatagctgaattagtcagggcttgaagatttaagggcggagcagcaccaaatgagtatgaatttgccaactcattttaacttgtcactgtgtacggtagcatgcatatacaggtcttgtttgcttgcttgtcatcgtgtacagtagcatgcatatacatgcattcatacagtgcgcatgcacaatacaatcatctgagtaatttcagcgcggcggctgcaaacgacatgatggcatccggggcatgatgaccttcggatggcttggtcggcagcttcccggcagcatagtgacgccggcagcgaagccaatgatttaatagatgtcaacggcgatccgcagaggctacaacgagcgtggaggacggagggcgtcgccgattagtagagtctcagtcggacatccctgcccagcaaggccgcatcatgacaggtgccagcaacaggggtccgatgatacccatcgcggcttgtggatgatatattaacgacctccggatatcagcaaccagcaccttggcgacctggcaatggccttctccggcgggcagctgatgatgacggggacgagcgttagccggcaacgcctcgccgtccatggacttgggcggctcagcggtgtccacggcaactccagcgagatggttcgggacgcagccggagctgatgacgccttgcgggcaccgagtagtggcgctccggccggcgttctcttcaagcagcaagacaatgtgtgtagaagatagcagtgttgatgagggcgagcggaaagtcgacggcgttgcgtagaagaggccgcgaccggcaaggcgacgacgtccaagcatctcggcgacatcgccgcgccgtgcagaaacatcgtctcaaccttgacggaggcttgcctacgacgtcaactctggcgactctggcgactctggcgatggcggtgcatccggcatcttctctgctgaggatgcatcatcccagcgtgcatgcgctgaaatggagcaaagggatgaaaagaaaataggctagttacccatggcagtgaactggagcagcatcgtctgcctggtgatcgtctcctccttagcgcgcttcctcagcgcacgcgcctcctcgccggacaccgaggtacagcagccgatgttgccggccgcagtgcacgcacgttcccgccagacgccgagatactccagccaagacgacgtgcgtgatggttgccgatgagcagcctgtccttgtgcttctctgtgtttctctcatgtgtctctgtgtatgtctctctacggactactgccaaggctgggcatggcgcagcgcctggcggtggcggtggcggcggcgtgaactgcaggccctcgactcgtgcctctgtactctctctgctgcctctcggtgtttctctcatgtctccccccgttgtgaatttgcttggccttctatagcagctgcaggtcggtgcatatgcatgcccgtgcatggctttgccaaaaaatgctgaatgcggagattataatttgccatttaattgtctagctcgcttctatacttgtgtccttcaggaagcttcctgttgattaaagtaggaaatagatgtgctattttccatctaaccgtgatactgtgaatgatgtatttccattaaaatgatatatcctgaaattataacatcaagaggagatatgatcatatgtatttccatgttgttatactgatcaggagcgatcatatccacatctagcagatttgtgggcccgggtagataaatggcacttctggcaggtccggtgagtagctaagtactgatgatttgctgcatgtgtgtgcttatcggcaattagctatgactaggtactaattccccttctttaaataatcatggaatctttaagtaatcatggaatgcacacatgaaagtaaatcacaggcaaacaaccaagtattccttgcgcgtgacttgcccattagttctcaactacagtactccgcacagttcatttttataatccataaaaaagcgcacaaaatttcgtcgaacaaatatcaacatgaggacacttattgctccaaagcaaacatttccccgagcactacatgtgatttggattgtgtaggaaaaagggagaatcatatggatcatggacttgtggacaaggctcaaccttctcaagataaccgtgggaacatggtgaagaagcttgagaagggatcaaccgtagcttgcaccaagtcctgtcaagaaaacaataagtccaacaacaagagtaaggggcaaattcaaagttggatcaaaactctcattacttgcttcatgtgcaagaaagtgggacactatgccttgatatgttccaacaagattgatgaccaagtcacacttccaaagaggagaacaagaagaagcaataggaagtgctatggatgcaatgagaagagtcatgaagttgcatcttgccctcacatgaagaatcactttgtgtcatcaaggaagaagcttaatatcaaggtagcaagtagcaaggtagcagagaagatgcaagatgtggtgaagaaagcaccatgtaaagacaagaatcgactttgctacaattgccgtgcaaagggacatattggtaacaattgtcccatgggtaacattcctaagccaaactcctcatttgattatgatttgcctagggatgccaaaaaggacatttgtgctattagggtgattagttcaccacatgctagcataaaatccatttgggtacctaagtctcatgtgacttacctttatggacccaatgttgttgaagaccaaaatgtgctaaaatgagaatataggtacatggagaggcattgaggtatggttcacgcaagaaaaggtggatctcaccaactttggaatttgaagccaaccattgcaaaattcacgtcaagaaccaatgtcatctcagtaacatgtatctacattgaattatcttgtatttaaccttgtataggttgtattgcattaacaaagcatttaagaatttacattccttgtatatatgaaagtcatcatttatgcatttttgagcaagataggttgtggtgagtgtttagtactcaatcatattcatgcatatcacatcccttatatgtgctcaagttggctaagtgctagttggtaatttcaaaataaaccttttaggcaaaagtgaaaattttgaaaactatagcttttctatgaaaatctaatcggaaattattttaaagtgtgtttcaaaagtttccaatatttttatttttcaaagaagagctaattttcaaagaaaatgaatttcaacccaaaatgaagttctaagtatcttgttttggcttttaacttcaattttttatacaattaattctaaaaggaatttgggaatggtttcaaaatgaaaaagatagggttggctaattcaaacatttttgtattcaaagtttctctaaaaggccaatcaatcaaaagaaatttagattccaatcttgaccaaaatactatctagaccataaatggccacttactagcacttaaatgagttgtcattgttggggttgtgtaaacgcatcatgctagctcaaatgagtacataacattcattcatactcatttctctccaaaaccatctcatatgtttgtgtttgcattttggaagaaaaatgtttaaaataaggggcaattgtatttctgcccatgctttacgattcaattgtgattttacccctgcttttaagggtttgtgattttgcccttgcttttttgaactgaagcagccgcctgcccctactctgttaagtaatggtaacggtgttaaatgtgtggtgaatggacaaatttacccctggacatgttttggcatgcacactgtatatgtttcaagttaattttgtgcgaatttcatatgggacctaaatgttgacaaattttgtaaaagttaacataacacaatattgtggacaattttgatggaattttagcaataattttaacacagtttataaaacaatgacagaacacaatattttggacaaaattttgacagagattcatcaataatttgacagcacaatatcaaggacaaaatttcagcaataatttcaacacaattttaacagatattttcaagatgtcacatataacatgtgcaagcatcacaaagtagcacaatactgaacatcacacattaatatccaacaaaagccagctagtagggagctttgacagtacggcatagtcaacataataccacaaattacatgacaattaagcagtacatgtctaggaaaagtaaagtagtacatgccgattacatatggagttcaaatatcacattgaaggaccaaacaattcagctagcatccctccccatccacttccccttcccttcccctttcccttccacgtccacttccacttgctcgtcctcttcccctacctcttccccttcccctccctcttccctttgttggtggtctttctcctcccatattacttgcactagcaggacttgataagatggaagtgaaaatgtgttaataaacatgtttttatgtatgtaaaaacagcaaacaaagagtaaagatgaatgactcacattgatggttgagtgacaattggttcactgctgccctctcctgtttgcctccttttttgactagctgtgagactaattgtagtagtgaatagttgtgcatgtcaacatgctgtgttggcaaggttttgctctggaggtaggtcttttgcccgccatctggcaagctgaaatatgacccactctaataactactttcaattcgctatgaatcggcctacaataagaagaaaccaaatttacaattagctaattcgtccaaaagacaattagctcattcaccctaggaacctaagtgcatccataactaatacagagcataaatcagttggtatggatattaccaaaagacaaagcatcatcaattggtatggatattccgaaacaattagctgattcgcctagggacctaagtgcatccagatctaattcacaaacacaaaaatagaagacaatacatgcaggcttcttccatgaaaatctcctccatggcaaggatttcctttaacagcgccatcccgccaccaagcttcactacacgctgctcgctggccgatggagccgtcgctcctctccgctgcgcaccggccgccgcgcctccctgcgcatgcaaccgcggcgccgccgcaccgcgcctccctgctcgctggccgcggggacgccgcacctccctgtgcgcctgcccgccggtcgatgccaccgcaatgccgtcgttccactctgccaagcctccctgtccacgcctgactccgcccggcccggcctccctgcctgcgcccgactctggcgctgctctccaccgctcctccctgcctcaccgctcctccctgcctcgcgctgaccgtgagtcgccgccgccgcttgctaagagctagggatttcgatttggcatagtgacggattggggacaagactcctgcttctttcatttgaccaagggtagaatggtgtttcacaaatgataaaaatattttctttcttcttttaattcgaaaatttcgagcccaccaaacttctgtcaaaactaggggcagacggctgcttcggttcaaaaagcaggggcaaaatcacaaaccctaaaaagtaggggtaaaatcacaattgaatcgtaaagcaagggcagaaacacaattgccccttaaaataaagcttgtgtagctttttgctcaaatttggtcttttcttccaaaccttgacttaatggagttaaagtgagaaatacatcaattgggagtggtcttaatcatatttttatatcccatgctttcaaaatataaaagatttcaaaatttggatatatagccatttcaaatagcctttttggtcaaaagtcaaaaatctcatttaagaggcaaaaatctgtggaaatcctctcaaaagtacttcaatatgtatttcaaatatttttcaaggtatttgaagtaaaagttctaatttctaaaatggtttagcaaagtggccttaaaaggatcttatatgatcttgtttttgctcaaaatgatttatctccctaaatcaaaatctattgtgtttttgaaaaagtttctaatataaaaatttgagggttggtcattccaaacatttctctagttgaacgttttcttaaaatagcaacgagtaaaatccatcaccggtccctaaacttgtaccgatgtgtcatcctggtccctaaactcgcaaatcgaccgttcaggtcctcaaacttgttcgactgtgtcatcccggtccctaaacttgcagatcactcatttagatcatccaacttgttcagttgtgtcaccccagtccctaaagaggacggtctaaaaaggggatatcaaaaaataattcataactttttcatgtgacctctaatgaaga

SEQ ID NO: 4359 - DNA, 17952 bp, Oryza sativa
ggaattttctgacatctttgtggagccaaaaggtttgccacctcaacgacaatttgatcacaccataccattgctgccaagagcacaaccagtgaatgtgcgacctatatgtatacaccagcacagaaggatgaaattgaagctcaagtaactgaaatgttgcaaaatggcatcatccagcatagcaccagtccgtttgcttctccggtgttgttggttaagaaaaaggacaggtcatggtgcttttgcgtggattatcgacacctgaatgcgataacggtgaagaacaaataccctttgccaatcatcgatgaattgttggacgaattggcgggtgctcagtggtttacaaagttggacttgcgtgctgggtatcaccaaatccgtatgaaggttgaggacgagcataagacaactttccgcactcataatggtcactatgaatttcgtgttcttccttttggattaactagcgcactagctacctttcaaggagtgatgaacaacatactgtgctctctcctacgccgttgtgtgctagtgcattggggcccaaacatttgggtttgtccacatacaagaaagagagcttggcaataatgttggcagtggacaattggcgaccctatttacaacatgctgaattttctattcggactgatcgccatagtctggcatttctagatgatcaacgccttaccacaccttggcagcataaggctcttactaaacttcttggcttccagtacaagattgtttataagaagggaatcgacaatggcgcagcggatgctttatctagatatcctgaatctgaggtcttatcaactctgtcagtttgtgttcttatcgcggttacttgaattgttatctgctaactctaaaggttcttctccccgtcaagttttgaactggcgatgggtgcgcaaaggggcgaagtaggtggaacaggtgcaagtctgctggtccagccacgattcgtcggttgttacatgggagaatcttcatgaactccagcaacgttttcccaatgctgaagcttggggacatgcttcatttcaagggggagggaatgtcacgacacctgacatgcctggaggtacagaacaggaagtcgagccaaagatgcatatgaatgctaatccaccgatgctgcgcaagtctactcaggagagtaggcctaatagtaggtattattcaagtgaatggacccagtacaaatgggctgggccatgtgtgagggagtgaggtccatggcacgatgctataagagaccgacagggagttgagacagaatcgaacactgtagaaacatattctgaataccgaattcaaatctctccctgttctatgctgttcttccccaaatcccaaattccttgctacttctaccctcaattctgttcaattcttccttgttgaaacattttaaatctagcgccgtgacaatttatccccgttcttccttgtcacagttctctgcttgggcaaggcagagacgcaaagtgcgtgggcggcacgcacgccgggtgtggcggcgtggtcggcctacggtgccctgcgaggggtcgctggaccactccgctcgtcaagtgtctccatggtggcgttcatgcgggtggagacggcctgacgcaacggttcgaggtggctcgggcggtggtggtggcgcaatgaattcgagagcaagagcgcgcgattgaaaggggagacctgagttcgagataaggggcgaaagaatggattagccagtgaacactcaccttgcggcgaccaggatacagcgtgccatggattggggtcggggccatcatcggggcggggatgggcgtcgttgtgggcatggacgtcgtctccttctcactgtggcatgaggttcatcaagtcatgactgcaacgacgacgtctcctcgtagtcctgaacggcgaggcctcctctttgttccgactgcatggcgatggctcggttgcgggagctagttgcactcccgtagccgaaccgatgggcggggagttggagagggatgggggaggcctcgaggtggccggtgaaaggtggggaggatgaaaggcttgaggtgaagaagggaaagaatgggggaggtgggtgtgtagatggcagcaatggcatcctctaattttttggcgcgcgatgagctcggccattgccccttttccagggatgtaggtcccctgcagtactacatgtgcaacactgctcactaacatgtggacctgcagttctgcaggggatctcaattgcttttgcagagcgaggatggcatgggcaggagtcactggggtgaggccggcatcagaggcgtcagggagaggatgtcatggcaccggctaggcggcagggatagggttcatggcgacatgcagcaaggacgggaaagacgaccacgggtgattgggaaggcggctgactctctggcggtccgttaccgtgctcgtgtgcggcatgcccatgcggtttttcgggtatggcggtggcgttcgatcttgctgtcaaaaggcagcatcggtgtgtgccaaagaattatgggaaaaaaatatcattcctattatttccataggttatattttcgttattttctacgtatacaatttggcaccaacttctcatgaaaaaaagatgagtaaattgcattggcagtacaagaacttggaaggtgggtgcgattaggtgcaaaaatttgaaaaccaagcatagcggtacaagaacttgacaggtgaatgcgattaagtgcaaaaacttaaaaaccgagtatagcggtacaataacttggctaggtgggtgcgctcatggtgcaaaagttgccacgccattgttccacctcagcgaaagtgccacatgagcatgcattgaccatctcattttacagaaaagtccctaataacttttatattccaattacttcttcagatatgtccgttttcctcctgtatcacaatgatcaaaccagtccatcttctcatccaaataaattctgccaactccaaaaaaaaaaatccaccacgatacagttcgactctagagaatccccttcttcctcatgacctgcaatacaaaataattggttgatgtgttataccgcataaggaaaataatacactaagattatttgcagattattcaactaattatatctgctgacaagggtacaacacatctagcaagaatttctcattgccaatgtttctcttatatcatatacagttacaggaaacaccaataattacagtaaaaccaatctagtggctagtaccattagatcacttcattgaattgtaataacaaataacaggatattcaagtgaaaacccaaaaaaatgcagccattgtacagatcaatgaaaccttaacttcgaaatcatccatcaaatgaacgaaaaatagaaatctacaaccatcagcaagtgatttaccataacaagctaggagcagatgctccgaaaactcgtcgattcagaaccatcccaaagcttgcggtgaccacgtcgacagtagcaaattgttggcttgaattggtttggttactggtttagggcttgaactaatctagcacacgaagccctcgccgccgccgcgatgtaacggtttccctcgttgtcgtcgtcactgccgccgccaccgtcgctgcgccgctatcgccagcaccgcagccgcctctcaattaggaacatgtcaagaaagatggaaggagatatgcatacgtttgttctgtttgtcgagttaaaaaggaaatgtgattggaacaaaaaaaaaaagctatttggggttttctataaaatgagataggtctttcatatcaaagctgatgtggcaattttgctaaggtggaatagcaacgttacaattttttttacatggctacttttgcaccatgagcgcacccacctagccaagttattgtaccgctatgcttgattttcaagtttttacacctaatcgcacccacctgccaagttcttgtaccgccaacgcaatttactcaaaaaagattataggccgatagaaattaatagatagcaagtggtgtatacataatttctgttgcacgaaagacgattaaagtgtatggtccgatccaccaaccgtagatcatacatatctttttcacattggacatgctccacgacaggcccaactagagcaacaactctaggttctaggcttacataaacaaaatactagttgatgaatgtccctcccttttaaattgtgctcgcccaacatcaattatcgatgtgtcacacatcagacctagcaatctccctgtcacatcaacccatgtgacctcgaagactggttaaccaggtcttcttctccatcaaaaccttggctttcatacaacttgtgaaaatgttcaacccggctaaccaaccatgggctactcatatcacattgggtctattccaacacaggctcaaccggagtcaccactttaggtcctattcttaaacaacccaaaggactagtcttatgggtgagaattgccttcaccttttaagctaagctcttctatcatcaattatggatgtgagtctaaacccaacaaaaacaatctgctgctattggttgcttaaaaggcatataactattcacatatggatgccatactgccatcccagtcctagacaacgatttcttaacatcataattaaaatagagttttctgtcacaatactattaggacgactatgtcaatttcagtcactaattgacaacattgatggaatgaacatttattcagcaaattgtcgcctgagttacagaggcgaggtggtccagttgtcgtcttacactcccgcgcatgatcaacttatttagcccgtcgtctgagcttcgctcgtagtcactcgcttctcagttctctcacgctggccatcatgcaccacgccgtcgtcaatgttccggtggcggtcgccgctgccatgctctacgccctcctcgttgcctcccacctagctccaggaattggccgcctcctcgccctcaccccggtgcttgcccttctcctcaatatcacgttcgctatcccctgctttacggcgcccgcggcaccgcggccttcttcctcgtctggctgggtgagttcaagctcctcctcctcgcttcgggccgtggcccgctggatccctccatccctcctcttgcgtttgtcttcagcgccgctctcccagttaagctcatccgagtgccctctgatgatgccgtggtcacgaagcttgcgtctatgcctatcatgtctctggccatcaagcttgccgtcatggcggtggccatcttctacctcctccacaaaaagaacgagatccatggttatacggccttcaccatctacgtcgtcctcacgtactgcttcctcgacttcctcatgccgtgtgttgccgcggtgggcgccgcgcttggcatggagctggagccgcagttcgacaggccgtacctctctgcctcgctgctggacttctcgggaaggcggtggaaccttatggcgtcggcgatgctccgcccggcggtgtacgaccgtgttagggcccgcctcggtgcaccgggcggcgtgctctccacgttcctcgtgtctgggctgatgcacgaggtgatcgcgtactacatctccttccgcgcgcccaccgggcaggtcacggcgttcttcgcgcttcacggcgtgtgcatgtgcgccgagaggtggtgcgcgcgcaggtgcaggcggagcccgccacgggtcgtggcaacgctagctgctcatcgtggcactggtggagaaaccatctttggtcggtcggccgaaattcacaatagtcccggatccatttaaaaccgggactaaagatgatctttagtcccggttggtggctacaacgggcatatgtgatctttagtcccggttggtcacaccaaccgggactaaagatgatctttagtcctggttgtagagatgtcagacgttgtcagggccctcgggatctttagtcccggttggtgtttccaaccgggactaaagatcacggcgatctttagccccggttggtaacatgccttcttcctcctccagcccgagagcaagcttcaaaatttctcaaagaaagaggggaggtcatgccaaaatttcttgtgaaattttttttaatgattatatacaaatcggaagtgtctaaaaggttagtaacttcatcctccaatgttttttgttgttatattacttttggagctatgtttcacacatttttttttgtctccaaaactttgttgtaagttgatgagagagaaaatttgtgtggggaagaagaatatatagaaattttattctcatagtttaaaatatgatggaaattaatcttaaaaaatagacaacaaactaaattgaaaattaagagaagtacaacattaatattagtttagaacttcaaaaattgttaataagaattgcttgtcgaaagagtttttaattattttatcattactgtttgactgtcattattgtacgaaaatttatttatgtacgattttttttcatttgatgtagatggatcggcaatggatgtacgctgaccggcggtccaaagagtttatcgagggcgtgcattatcttttgagagtggccgaagctaacaagcgtaacggttttatttgttgtccatgcaataagtgtaagaaccagaaggagtattctgcatccaggattattcatttccacttgtttgagtcggggttcatgccaagctataattgttggacatcccacggtgaggaaggggttgaaatggaagaagatgaagcggaggacgagaacattcccgactgggctcagtacgctggatttgaaggaaatcaaacgggcgaggtggacagggatgctggcgataacgacactgcagatgatcttggtcagatgttgcaggacgcaaaggaggactgtgaaagtgaaaaggaggcccataaattagagcggatgttagaggaccacagaacatcattgtccccaggttgcgagcgggggcacaaaaagttggataccactctggagttcttgcaatggaaggcaaaaaatggtgttagtgacaaggcatttcgcgatttattgaaactcatcaagaacattcttccggagggaaacaaattgcccgagacaacgtacgaggctaagaagatagtctgccctctaggattggaagttcagaagattcacgcatgtccgaatgattgtatcctatatcacggtgaggagtacgagaacctagaagcatgccctgtttgtaaagcactacgatacaagattagacgagaggatccaggtgaagttgacgggcagccaacaaagaagagaattcctgctaaggtgatgtggtatttccctataataccacggctaaggcgtttgttcaggaacaaggggaatgcttgaatgatgcgttggcacactgaagaacgtcaacaggacgggaagctgagacaccccgccgatggttcgcagtggtgaaacatcgatagaaaatttaaatactttggaaagacgcacgaaacatacggtttggtttaagtacggatggcatgaatccttttggagagatgagcagcagccatagcacttggcccgttacgatgtgtatctacaacctccccccttggctatgcatgaagaggaagtacataatgatgccgattattattcaaggccccaagcaacctggtaacgacatcgatgtgtacctaagaccattggtcgaagctcttaaactgttgtgaaaaaaggaaggtgtccccgagtgggacgaagataagcaggaggagtttaacctacgagcgctgctgttcgtaaccatcaacgattggcctgcatttagcaacctttccgggcagtccaacaaggggtacaaggcttgcactcactgtatggatgaaacagaaagtacgtatcttaagcactacaggaaggttgtgtacatttgtcatcgtcgattccttgttgcaaaccacccggcactttgaacataaggcagaccaccgtacgaagcctaaacatcgcagcgggaaaacagtgtttgctatggttaaagatcttaaagtagtgtttggaaaggggcctggaagccagcctatagagagcgaagatggtcacgcggcgatgtggaaaaagaacactatattttgggagttacccttttaggaattcttggacgtctgccatgcaatcgacgtgatgcacctcactaagaacctttgcgtaaaccttcttggtttcctaggtgtatatggaaagtcgaaagatacactagaagcacgtaatgatctgaagcatatggaacaacgcagcgaccttcacccggaaccaaaggagaaaggaagccattacttgagtccagccagctatactcttagcaaggcagagaaggaaagtatgtttgaatgcttggagagcatagaggtaccgtctggatactccacgaatataaagcgaataataagcacgaaggagaagaagttcacaaacctaaagtctcctgactgtcacgtgttgatgacacaactgctaccagttgtaataaggggtatccttccagacaatgtccgggcaacaataacaaagctatgtgctttcatgaaagcaaatttgcagaaggtcatcgatccggatagattagaagcccttcagaatgatgtggtgcaatgtcttgtcagttttgagttgatatttccaccttcatttttcaatataatgacgcatctgctttgtcaccttgtcaaagagatcggtattctcgggcctgtgtacctacataacatgtttcctttcgagaggtacataggcgttctgaagaaatatgttcgtaaccgtgctcgtccagaggcaagcatcgccaaggggtatggaacagaggaggtcatcgaactctgcgtagaatttattgaagaccttcgcccaatcggggtacctgaatcatgccatgaagggagactacggggaaaggtggttctcggaaggaaagcaagaatgacggtagacaacaatttattccgtaaagcccatttcacggttctgcaacaatcttcattggtggctccttacatcgaggagcacttggctctagttcgcgccagaaacatcggtaagtccgatgcatggattacacggcatcacattgatactttccccgcgtggctacgacaacatctcatgggtaacgagacgattaaccaacaactggccttcctggcgagaggaccatctggctcgatcgcgacattctagggatatgagatcaatgggtacacattctacacgagagccaaagacatgaagagcacgaaccaaaacagcgttgttcgtatcgatgccatgggacacgatggaacaactggcacgtattacggtgccatcgaggacatatgggaagttgactatggtccactcaaggtccctctattcaggtgccaatagattaggttgactggtggaggcgtaacgattgatgacagtgggatgacaacggttgaccttaacaaggttggatactcggacgaaccttttgtccttgccaatcatgtaacgcaagtcttttacgtgaaggacatgtctagcaaaggaaagaagggcaaagggcctgacgagccgaagcgccacatggttttcccaggtgttaacaaccaaaattggtaatgtcagcatcggaaaggaggattagatcgaagtggagtcgaaggcggagatcgattcgagaacagagcaagaatcggctggagtccagatcggctatgatcaggatcggctgggtccgagtcagactaggtgagctgatacagccgattctgacaacacgacttggtgtacaacatcgggttgagtcgatatgtttcaagatgattgccgcacatggatagagtcctgagaagtcaattgtatctattaattaggatgttttatgtaattttcttagagatatatttagggcaaaagtctgccgcaaagacttatggtatcttagagtttgttagagataagagtcgtgtccgatatggacatagtttgtaattttcgggtataaatagacctcgaaactcatgtaaacaattaacacatatgttcaatacaatttggcgcatcgccaccttttaccttttccactttattttatcatccggcgggacttggcacctgacgcggggctgcatctgtgttcgatctccgactaaggggtaagtccaatgttccgccggcccgggcaattgtatcgtctacgtcggtgtcgttcaaggctgcatcagtacattcgacctcttggattgctctggtttagatgatatatttgtctacctatttatcatatgtctctattaatctagtcttagcatatcaatttagctctatcggctgcttctcgctttagggtttctgccggtatcggctaaatcgcgttgctagattagattagcctaggcatctaccaccctgaaaactcagtcaacggcttgattgtctagatattgtgtttcttttcatacttagtgctgcatcagttaagtttgatctactaagtcgtgcttagaaccatattctctagcctgcttcttgattgccaataagggtttcatcggggtttcagccggtgagttatctggacgttgcatcggctcataaggattgcatatacatataagttggatttagccgatgacaacaaaggtttcactgtttaatctaatcttgtagatttcatgacatcggacctccagccgatgtatgctttaaccttcggatcgatgcttatttatcatatcattatttgtcgattggtttatattagattatattgttatttcattacatcgttatcagccgattgccttcatatcattatctacattggacatatagccgattacttaaaccctattgctatcggctggtatcgacatcgactattatcggctatcggctggaactactccatcggcttgtcaaccgatcggctgttttgatctactatttgcatatcttgttagttgcaggatcaaactgattggcacgctcgcatctcatcaagatttggacctgcacaagagctaagcagatctcccaggccagtgtgtgtttttcgcatcaacaccaggcaaaagaaaaatcgttggagtagaggacaagactgacgaggattacaatcagttggatgggcaaccccctttcacggtgacgattgaccctagcatcctcctatcaaatgaagacaccccttactcacgtagcgatcacaaggaaggaacaatagtgaggagaaagtacgtgcggtcaaccgtcaccgccgatgtattgccataattattgtgtacacgatgtaaactattttggatgtattgaatatccatataaatcaattgttgtatggcatatgttaattatgcatgattattagaatttttaacaattttaaatcatgtgtgtgttagttatatgctagttatatgctagaatttttaaaaatcatgcatatgctaattatatataattattagaatttttaacaagtttagatcattcatgtggtatttatatatgttaattagaatttataacaattttaaatcatgcatatgctaattatatatgattattagaatttttattaattttaaatcatgcatgtggtatttacatatgttaattagaatttttaacaatttaatatcatgcatatgctaattatatatgattattagaatttttaacaagtttaaatctttcatgtgcttattacgtattatccacttaatttactacagacaacaagaatttttcgaagtaattgtcattaatttttcgtctttaaataattttaatgcattatttactattttagaaacacatatgtaatgaaattcaatattcagtgctattatctgtagtcccggttcttaaccctaaccgggtttaaaaagaatttggaaatagcgggaaaatatctttagtcccggttgttctcaccaaccgggactaaagaactaggagtatatatattcccgatgcgcaccctcgtattctccaccaacacttagaagttttttccccgatctcgatcggcttctccttcgccgccactgcctagggcatccccgcgccgacgccgccgtcgtatctcgccgtcgtctcgcaagcgtcatcgtcgccgcctcctccgccgccgcatctctatggtgagagccgccgccgccttcctctctctctcgacctcgacctctctctctctctccaaaccgccgccacctcgttgccgacgccgctgcctctccccgagggggatcgagcccggggtgttgcggcggctgccccctcccagcttggggttgggccgcccccaaacccacgtggctacccccgaggggggtcgagcccagggtggcgcggcggctgccccctccaagctagagggaggaggccgccctcgcttggggtcgagctgccccgaccccctccacgtatcagcccacgtgtacagggcctaacgcccacctaactgcatttaaagcggtctatgcaaccgtgccatgccgcatttaatgcggcgtgctgtgcatatgaccggtctgtgaccggtggaatgaccgatgggacggcgactgtgtaccccggccctgtcagtgtgtcacgcggcgagcggcgtgcttcgtcccgtcgcatcataatgatgaggggcttcacagcctcttacccgggtcagagctggtccaaccactctgaactaacccgggttcccattttctggtgtgaacgagaacccggaagttctcatccattaaatggcgaatgacaagggcgccttgcatgatttgatgggccccgcgcagtaaccgacgtgcagatagcttctgggctaaggcacaagacatgtaatgaatatagagaatattttcccttctccctaggtagcactcgcagcacatgtggtatccccttagagtataaaagttggaccatgcctagcgaggaagggggatcggactgaggatccctgagccaaagcttgtctaaccctagcttgcataccagggattcagggactttttaagcacagaagaatcatacacacaggagtagggtattacgcttcgtagcggcccgaacctgtataaacctcttttgtttcatcgtcttggaggagcctccaagatcaagatcacacacagtttcgctcaccaaatcctcgaatctcacccgctacccccggccgaactctcaaagggggggcctcacagcctcccgctagagagggtcaccccttgacacgaggggacaagtgcggcggccagcgagccgcgagggaattgtggtcatgcatgctttatggatggaatgatggatcaatatgtgttcttactgaaatttttatgatgctattctaagtattcatgctattttttatggtacatataatatttgttcttgctgaattgatgattgtcttgtatttttggtgcagattggatggagatgctacctaatgtgggtccccggaagggtcggggacaggggcctgatttggccccacatctccagtcaggaccgggggtagggagtgaagtcgggggtcggggcggggccgttccagcccaacctgaccccgttgccaacccgaagtgtgttgccctctagtgtttggaatgacttagagttccagtatgagtagtagtttacccgttggggccggatccccgcctcaacggagcaggggcaaaatcttccccatgggtaatgcggggcagggcccaaacttcatgccggggatagggaagcatctccacctatggggaccctgtggggccctaaaggtctactattagatgaaggtggcctataccaaatcaaacccgcacctagcgtccacattaatgaggatatatcaagagaaatccggaccttatcctcaatgtccatggacccgatccatccgttccattacagccacaaccctcgtacctcaacctgtgctaaaggccccaaacatcggcacatcgggcactcgtgttatattgagcgctgccatgcttcttctctctcacacaccttgctgtgggccatggacgacctttgcctcgaaccatgccaccaaccgccggaacagaatgtcgccgggcatcggcctcaattatgcaccaggccagtagcttctttctctccatcaccacatcatttctggtcccgcacctcgtcttcgtccgctggtttccctccgcatggggcctgctgtggccggagccggggctgggtgaggcagccgggggttggggattgaggccattcttgcccaacctgtcccgtcgtaaactctatatgttctagtgagtacatactgaataatgcctttccaatggcaattggcaaagtagtgatgcgtctggcggtgaactgttcgtttaaatttgtctaattcagctttaagaaagtaccactacaatttggaacgggtctacacggccgggctactagcacattccttttaatgaatcatgactacgatttgttacgagtaattaagctataacacgtccaagtcggctttaaactatgtagtgactatatatccaggagtagaattacatgactcatatttaattaatcaagttgcataagagacgataaccacacccagtctacctgataaggcgaagaaaacacgatgacacgagcactgggcggccattggggcaacttgatgtaaagaagtcgcttgtcagctttcgtcgtcgcgtctctgtctagatttcaccaatatataatatttctcataacctattgtcaacaggaaactttaattacatagtatatagtactgactaaatacaaagtaacaacgtttccagcttgttgtcttctgtcggtacagtctgtacagatctaactagaatttgaccttgattgcacttcaagtttcaacttatttgcaagatttgtgagcacattgaaatatgagcgggtgctgatcgattttgaataccggcttagggaattttttttatcggtatcaccatatatcacacctacagttcgaatccaaaatgttgaattgaaggaaagggatcctctgacttaactgctgtgcagttgagtcactgacatgtgggccatagtaaagtgggacccacatgtttgcatgtgcattttaagttagaggatctgcttcttgaattgaaaagccggtcgatcgatggcctgaatttttaattttgtcgtggctaaagtgtagttttttatttgatctgacgactataaaatattaatacatcgtatatatattataaatgataaaatgtagtcatgcgtactagtacgtgcaactaattaatatataataatacacaatagacagtcataaactgtggtaatagcatagtcaacactaagaaataataatataatgttccacaacaaatgataattcatcctaacctatcacaaacactagggttgcgaactgggtgttcgtttattcattcataaatatgagtgtgcacgtatatatgagcaccgctgtatgtattgtatttcataaaagaaacaaaacgaattattgcacaattatttcaaattttaaaattcatatctgaatagtatgttgttaccaaatgggtattaacatgccaacattaaggtttcgattacccatctgtacctttcttttagattatggagaagtaagttttggtctatgcatcaatatgttggaattaatgaatgggtctcaacccattcgaagatttttttctttgaaaaatcataaaagcctacatcataagatggcatacatggcgagtttagtacaccttgtctattctaggagaaggagacctccctataagaaaggatactctcttagacactgaggcatgtgaggttgacagaaaaaggggaacacacgcacgctcttacacgcctggactggcctggcggcgcgtgtgcacaacatacgcatcaaattatctctatataagtcgagccgccgcctccacacaacacatgcgaaatcaaatttagggtttgccccctctatactatgtcgtcgctcgtagtctacaccatcccgctcgctagcgtgcactggcgatcgggagagcaggtctctataaccttcgcctttgacattctgcactgggaaaaggcggtaataagatttttgagaagcgctgtgtttctgtcatttttgcagcgggcatggctagcaaaggcctaaggctagccaaaaaacaatttttttttgtggattatactcatctgtgacgggccataacttaatgcccgattgagatgatggtcatctgtgacgggctgtagctaatgcccaattgagatgacagtcatctgtgacgggctatagtttaggcccgattgagattagtattatctgtgacgtgctctagtttaggcccgattgaggttagtagtcatctgtgacgggctctatttgtggcccgattgagataggtcatctgtgacgggctatagtttgactggtagtctgggtcaaagctatcggtgacaggctttaattagggcccgattgagataggtttatcagtgacggccgtttgcccaattgagattacttttcacatcagtgacttctagcctgtgatggacgccgtgcccgattgagatggggcttactgcccgtttgagatgagggtatccgttccagtgattgcttgatttccttcacttttttttaccaatatatatagttgattggaactatatatatttttgatttcttatctatacaaataatacaattgcagctaactccaatattcggtgtttaatcgaaatgattggatagactgtcatactcggcttctaattagaataaaggttgttgccagttctatacttctattccattatttcctcaaactaacgagaaaattgaaattcccatgctctaaccagcgaaaatgcacaccatcctcctagttagtccaagtaaagttacacgagcattttcagcaaaataacaagaaactaatgaagtcaactccagcttgcgtaacgtagcatgctaataatgcacgcgaaatttcagactccagttgttaattttggttgtttaattaccaaagcgaccgggcatgaagttgacttggaaagtcggaaacaatgtgtcagctcgttggcacacttatctatatccttctcagataagtacggcatattctgtccttttcatgcctctcgtccgttcttttgtcgtacgtaactcacggtagtcatgtgacatttcttcttaaactccgttgcattgccatcaaagcatgactatttctagtgtcagactttgtcaaccgtgggtgtggtgtgtggtctgctcacggagttaatttctcacttctcgcttgtactcctacaacagatggaaccaaggccacacgaagcaatatatgcattttccagggaacttttactatacctccagtggaggtgataatattaatagtgtggtagaaattggtgccggttctttataggtggcggttcttaccatccctccaaccgtttctgtatccattgagtaaaaaccaacacctatgttttaagttctggtttgaaaggatgttcgtacaggactataggtgttgggttcttcatcaaaaccgacacctacaataccatctataaagctgacaccgatgactttagtgtcgaccaattgatgccgacaccaaaagtaacacctacgtgaccttccgaaccggcacctataatacttcatatagtagtgaagtcctggtgcgctctcgtcagccgcccactacgccagattctcacacctgtgacgggcataagtattggtcagtgataagggtcacctttgacgggtcctacgggatcccatcatcggtgagccatccggcggcgacccatcacagttaactaatcacctgtgacgcgccaaaaatggaac

SEQ ID NO: 4360 - DNA, 97752 bp, Oryza sativa
gacatcggacctccagccgatgtatgctttaaccttcgaatcgatgcttatttatcatatcattatttgtcagttagtttatattagattatattgttatttcattacatcgttatcagccgattgccttcatatcattatctacattggacatatagccgattgcttaaaccctatcgctatcggctggtatcgacatcgactattatcggctatcggctggaactactccatcggcttgtcagccgatcgactgttttgatctactatttgcatatcttgtcagttgcaggaacaaactgactggcacactcgcatctcatcaagatttggacctgcacaggagctaagcagatctcccaggccagtgtgtgttttttgcatcaacacaaattggcatgcccgatgggacacattagaagtcagcaagcggtttcttcatggtcgagaaaccaccatcatcaccgtcctcggctagcccaggttctattaaagagaagatccagaagttaggtttgtcagaggttaatgaagggaacattgtgaccatcgatccagagaagttcacacctgatcaaaagaatgattttgaagcgatgatgtagcaagcacgagaacagttcttgaactcgttcatgcagacccgcaagggagcacttgttcagaagtataaaataaaggtggttcctgatgaccccgggactagttcttccaaggatgacgaagggaaacaagctccagatggctcggctcaaccgagtgacaaaggttctacagatggttttccagcaaatcaaggtgacaacttgcaaggagtgcacggggttcaaggcgatggttctcaaggtgttcaaggtgatggtgttcaaggtggaggtgttaatcaagacggcaatgcagcacagttgcagttcaacaactttcaagattaggttgactatgctgtacaccatgctttaatcaatcaatttgggatattaactaatactttggcaaacatggtgaagtcaatggttgatggttcaatggccgagtatcaagctacaggactagtgtacttaccaggaggggtattccctaattatcggccattaatcaccgataatcaaccagtcatccagtcgattcctcttaatgcaccatcggctcagccggcagcactggtgtcgcttcctgcacctgctccaccaccttcggctccaggccaaagaataaatccctggttgttggtaagggaacagccacagcatgctggacagaatgtgaatcggctaacgcaagaccaggttgcatctatgttcttacctcctcagcacaccattgatcaaacccagcagcagccgattcaataaacaccgccaaggcagcaggttgttcaaccagttcagtcaacactcccaatccaacaggttgtgcaaccagttcaacagacaccacccagacgacaggtcttgcagccaattcagcaaacgccattaaggcagcaggttgttcagccgattcagcagcaaggctctatgaatgcattggctgggtttgcaacactgggtggtcagcctgggcagcatgctgcaaatcaagttattccagagcacttggttcatcacgtacaaccagatggcacagtgattcctcaagttattcctgagcatttggtgcacaatattcagccggatcttcaaaattactagggggcaatttgaattatcagtatcagccgccatcaccccaagttcagtatcagcaggcatgatcagctcaaccccaatttgttcctcaatacaaccaattcgagcctatgacacagcaatctcaaggaacacctcaacaacaacaatgggccgatttgattgcagatgtcatgaaggagctgtttgggcttaggccgaaagatgctggaaatttgtaccgacaaccctatcctgagtggtttgagagggttcctttgcccaatcggtttaaggtaccggacttttcgaaattttcagggcaagatagtacatcgacttgtgagcacattagccgatttttagcccagtgtggtgaagcatcggctgtggatgccttgaaggttaggttgttccagttatctttgtctggatcggcctttacttggttttcttctttaccatatggatcaattaacagttgggccgatttagaaaaacagtttcacaactatttttatagtttggttcatgagatgaaagtgtccgatctgacatcgatcaagcaaagacataatgagcctgtgcatgagtacattcagagattcagagagatgaggaataagtgctacagcttaagtttgactgatgcccagttagccgatttggcttttcagggtatgattgctccaatcagggagaaattctcatctgaggattttgacagcttgtcccatctcgcacaaaaggtgaccttgcatgaacaaaggtctgtccttatatgtatgggtcggatgatgaggatgatgattctgagatagctgtggccgaatgggtaaggagcaaaaaggttataccgtgccaatgggtaaagaacacaggaaaagaggagaggtatgactttgatatcaccaaggctgacaagatttttgacttactactccgggagaagcaaattcaacttcctactggtcacacaattccatcggctgaggaattgggcaagaaaaggtattgcaagtggcataattctgggtctcatacgactaatgattacaaggtcttcaggcaacaaatccaagaggctattgaaggaggcaaaatcaaatttgatgacactaagaggccgatgaaggttgatggcaatcattttcctgttaatatggtgcatacagctggccgaacagccgatgggggccgtgtaagaggttttcaggtaaattcgactaagattatcaacaaatatcaaaggaagtacgacaagcaacaggaaaagcattgtgaagaagatgatgatggctttaatcctcattagggctgtgagttctttagattttgttggaatgaaggcatgaggctgccatctattgaggactgtcctgggtgcagtgatgttggagagagctcgagccgatcatatagtaggggcaatcggctaaggcagatgagaattcctattcatcaaagattgggtccagtaaaccaagatcgtggataagaggacaatgaaaacatgaagactcaatggtgtccttctggtatctttatgaagaatcaaaagaaaagggttcaaagattgaggaacagagagcgcttttaggaagtcgagcaggaaatcaaccatcggatgaagaaaacaaagccgaggcaggagtggcgtgctaagaatcaagttctggtggccgatgaagccacagccgatgaagcaaaaaggttggctaaaggaaacagcgttgtaactgcttcggtcaacatggttttcacgttgcctaccgagtttgggatcaagcaagccgatatcgatgaagttgaagaagaatcggctaaattgattttgtcgccagagcaggtagtttttgagaagccagaggggacggagaatcggcatcttaagccattgtatataaatggttaagtcaatgggaagccgatgtccaagatgatggtcgatggtgggcctgcagtaaatttgatgccttacactacattcaggaagttgggcagaaacgctgaagatctcatcaagacaaacatggtgctcaaagattttggcgacaatccatcagaaaccaatggagttttgaatgtggagctgacagtcggcaacaaaactgtccctacaacgttttttgtcatcgatgggaagggttcttatagcttgttgcttggaagggattggattcatgctaattgttgtattccttcaaccatgcatcaatgcctgattcagtggcaaggcgacaagattgaaattgtgccagccgacaggtcagtcaatgttgccagtgccgatttagctctttgggagacggatggtcttgattgtttatctggaaaagattggggtggagattttctaaaagtgtccgattctgatatacagccaattgaaggagaacccaagctattattttgagggcgtcgtggagggttcagatgtctacaacaaggacacagtagatgatctcgatgacaaacaaggacagggttttatgtcggccgatgatttggaagaaattgatataggtccaggtgatcgaccaaggccgacatttattagtaagaatttgtctgcagaatttagaaccaagttgatagagctgttgaaagaattcagagattgcttcgcttgggagtattatgagatgcctggacttagccgatcgattgttgaacatcggctacctatcaaactaggggttaggccacatcaacaaactccgaggagatgcaaagccgacatgcttgaacctgtcaaggctgagattaaacaattatacgatgttggttttattcgtccttgccgatatgctgagtgggtttctagtatagttcctgttattaagaaaaacggcaaggttagggtgtgcattgatttccgagacctaaataaagctaccccgaatgacgaatatccaatgccggtggccgatcagctgattgatgttgcgtcagggcacaaaactttgagttttatggatggaaatgcgggatataattagatttttatggccgaagaggatattcataagacggcttttaggtgccctggtgcaattggcttgtttgaatgggttgtgatgactttcggcttgaagagtactggagctacatatcaaagagctatgaattacatataccatgatctaatcggctggttggttgaagtctacattgatgatgtggttgttaagtctaaggagatagaggaccacatagccgatttgaggaaagtttttgagagaactagaaaatatggcccgaagatgaacccatgcgttcaatacaatttcggcgagccccccaggtccgaaatatttggtaatgtttcgaatttgctgtatatcgactccgagcaagttttgcactttaccgttttccgaccgttacacccgtgctttaaatactaaccgtcaccctcgagaaatctttaccccgttacttccgtcttcaccgccgaagccaaccttctcctttctctctccggcgattcctccgacgctcgaggcgatccccaagcgacttcgtctccggttagatctccgcctgcgacgatgtcgtcttcctccagcccgtctaccgcgccatcagccgagtatgctgaggtaagttctcatcggctagatcccttttcctcgcataaaatcgattcctccttttctcattgtgttttcctcttcccaatttctttggatttgcagcacatttccaacctagttgcgatccccagcctgtcgcacgaaaaccactattttcttggcccaatcggcaatcttgaccccactgattttatcatcggtgaaaccaacagaatcccctttagactagccaaccctaatctaggtcactggaagaatactttcaaatcttggtcatctcttgagaaaaccacccctgagaagagttggaccacatggtaccagtgcatatcggctagtaagaaggttcattggaatgagatcgggatcggccaagcgcttgctctcaccatagccaaatctgctaaggacgaacctctgatggctgccgccacctatttctggtccaacaccatcaatgctttcttgttcaaccgagggccgatgactccaactttgatcgacattaccatgatcactggtttagatgtgacttcatcggctaatcctatgagcatgaacacaaaaaatcagttttattttagaactaaaagcataggtggctggtctggctatgtggcagcatatacgggccaagggtctgttacttctcgagagcatgtagctttcttgctaatgtggctagaaaagttctcttctgtggatccagctgtggccctacaaccaattggcaatttgtagctgaagccctagaatcaaagaaacaatttcctttgggcaaaatcctccttggctatctgtaccaaatgttgaacaatgtgtcggccaagatagccgtcggctcagtagttggtgcaggtggaccatggtggctgctgtaaacttggctgaatctgatggtcatgaaagttgtcaatctgccatctgtgacagaagctaaatttccattaccagagccgattgtggaaaatgatggagaagaacgcactcatcgcagatgcatgtcatacggagaatatgcatccacaccaattgatgctggagcaaaactatcggttgagctgctcaaagactggttctgcagcttctatgagggctttcagaaagatgcactggtttggttcccttatgaagattcagcagatcttgaacttccatcagactttagatttgaagacatcaattatgaaagatacaaaaagccagggaagttctcacagctgcaatcagcccatgcatcttacccgtaggcattcaccagggaagaaacatccaagtctcttacgagttttaccacccaatgagctcggctagacaacttggactgggccaactcccaatcggcttattctttgtcgacaagatccagtgccgaggagaaatttcatcaaccttaatgatggatcggctgctcaatctccaaggacctcctctaggcagtattgaaaatattgagctggcaggtttcaagagcagaaactttgacagatggtggggcgaatggaagctgcatttatttcaccaatcggcctcaatgtacatgacagatctattccctgatgttataccccaggtaaattttgtcattactaaactgcataacggttagccaattcattacttgactaatcttttgttcctgttttgcagacaacagagtcctcccctccacatcaaagcaataatggtagggacattgaatatgccccaggactaattccaaatggaggtggaccatcccctcctgtcattggctatgatgcccccaagaccttaactcttcttcaaggactcatcagagaaccagccgatacaggtaagaaaagaagaaccaggtcatcggcagcagatacattaactgtagctccaaagaagaaagccaaactcaagaaacataaaccaaccgatgatctgcctgtcctggatccatctattgagcaagctctggatgaagaagacattgatgatgatgttgatcaggctgcagccgaagtaagcgatacagaaaagacaccatcggcttcgcctaagcaaacacctccaactccttctgcccctactcacttcttaagagtaagcagctctctttgatcctttttgtaatcacctcattttcagccgatgaatcacagactttatagttgcagaaaaagaaagctgctgtgaagaagaaatcggcaacaacaattcgcaaaccggttccaccagcaagttatttaactctcttattaattaatcccagccgattttgtctaacacttgtctcttttacagcctcctcctcctccttctcctcatgtacagcaatcgtcaagtgaccgaactccatcggctgtaggaagtcatcatattgagggagaagaacaaccagctgctcctgctatcccagtaagttttccccttgatgcaagaaattagatcggctatatttacttagctctcaatcttcctaaaattgtccctgcaggttttagctgatctcttctcttttgacatcagagattatctcgatgaagcagaagaagatactttgagcaaagctctagcccccttacccgatgatgtgaagaaaacacttgaagatatctctcatcggctagaggcctcctctttagatagcttggtggtgaactgttagccaattaggactcggctacatgagatccaagctctaatcccagatgagcttgccgatatccttactctagcggtctatcttgaacaacatcaattcaagctagaaaaagccaagttaagactagccgaacgtcgggagcgcaaggatatcaaagctacaatccaaaccaatcgacagcttgttcatgaagagaaaaccaaacttgatcagctatctgagggcccgatcaagtccaatattgatcggctcgaagctcgcaagattgagctcttggcacaacttgaagaatgcaacgacgagctaggtatggaacataaaaagctggccgatctcccgaagtccatcgaagagcagaaagcaagactcaaataggctatcaagaatgttgctgatctgaccaaatctttgaaagtcatccctggaaccgatgctcaagatgcccaagctattgaagaagtagaacaaattaggcaaagggctatttctgctatccagcaatacttgtctcgatgactttttgtgtaataggccttagaaattttttgtaatcggctaacatactttagtactttactgtcttaacaatcctttgtgttgattaatacaacttctaacttcgctcaaaaattttcattttcattttttatacatacgtgcccccctaattttacaatgtcaaaagcattgataaaattataaaaacaactaagggcgatatagtaatatcggcaaaccacaactgattacaatatgaaaaaaaaacaagggcgatataataatatcggccatctcaagacgatgaaaacacatcggctatcatgtatcggcaacatcagccgatcatgcattaacccaaacgcttgggtaatatttcttcaagtatttgccatttagtgctctgccatagacttctccatcaagtccttgcaatatgtaagctcctttggatacagctttatgaatttggaacggtccttcccaattcggcgaccacttgccgaatttgctatctcgagtcccaatcgacaaaatcaacttcaatacaagttcaccttccgaaaaatctttgggtactaccttcttgttgtaatgccgagtgtcacatcctgatttttgtttcaggatttataaattatttaataaattattaatagaatttttattaaatgttctttaatttacaagtgaagttaaatgtgggaaataaaatttcctaaatataaagcatggatgtatttaatttttattaaattctccatgattaagtcaactctctgaaattttctcggatttttcggagctcaattcctaaatgatacaaagaacagttcagtaattatttgatcaataatgatctaattataattgttaagagcttttcttgtttaaaaatccgtaaattataaattgttgtttaaaaggaattattagaaatgattttaaaagcctaaaagagaagatctaattttaatttgctaaatctcaacataaaattgggctagataaaattttgttaaatactttgcttaattctataattcctagatttttctgggatttatttgagctaaggaagtatttttaataaatggaattgcatttcatgaataatttaaatagaaaaatgtttttaaatcctccttttggctttgggccgaaagccggcccaaaacctctctctttctctctccctccccggcccagtcggcccagtccgccgagctgccgctctcctctctctctctgtcgctgacaggtgggtcccacctgtcaggttcgtcttcctcgagccgccgccgccgcccgaaaccctagccgagccgcgccgccgccgctttccaattcggccgcgcctttccttctccggccgaatagattgaggggaaataatctcctcgatctcctcttccttttctcttatagaaactccggtcaatttcctttggaaataggcggattcgagtttgattctgattcgtttttccccgacctttccttctcgtcgccggcagccgtgggccttcgccgtcgcctccgagcccccttaaaaggacccccgagctctcctctacccatcgccaccctcgccttcgcctctcgtcgtccgtagagctctagcgccgtgtagcttttgcgcaaccgtcgtcgccgccgctccagccgtccttcgccattgctccagtcgtcgccatcgctcgggaagaccgccatcgtggtcgccaagtcgtcgccgtcctcgtccgccgcttcaccatcgccgaagaccgccggagaaccgtcgccgccgtagacccgatctatgccgccgcttcttcctcgtcgccggcgctgtccgttgttcctccgccgcttctttggtcaccggtgagttcgccgcgtcgccctctacccgttggtgcccttcgttcgcgtccttgtgccgtcgttcgccggtgagcttgcgccgtccgagctgccgagccgccgtcggtgctgacgtcatcgctgatgtcacccctgacgtcatcgtcgtcgtccgtccgtgagccgcggtggatccgttcgatctcggccgtccgttttggatagggttgatctcggccgtccgttcccgtgaaccgttgccgtgcacacggttcactgtgaaaccctagccgctgacgcaataatcctccttttccttttaaaaaataattcattattgcgtcataattcaattaaaatccatataagtgttttaatccgatttaatctttaaaaattcataactaattcattgtaactcagtttaatgtggttcaagttgcaaaaattatataaaataaagatctacatattaaaattatccataaattgaattaaatttatttagttctttttaaatgggctttaaatagatttaatcttgtaaaattcataataaattcatttgaagtcagaatgaggccgttcaagtctcataattcatctaaaaatatgatctacatgtttgtttactttttatgtattgtttatttggtttttattagtctttttcttcgttttgcgtgttagcttgtcgtttccgtcgttgtgaaggttcgcgagtgcgtcggaagtgttcaagaagattaattgaagaccgaatattgcaaggcaagtcacacagatcctaaacacaatcctttgagcatgttgatcctatatttaaattctctatttatttcaactgtgcatttattttcgaatgtcactgggtggtgtgaatctattcctttgttatggcctgtttgcattgattactttaatccttgataccttgagttattataatttgaatagttgagctttatatattggttcagctagatattagatgtgattgcttagccatgcttagaaacattagcacactattgggataacttatgattcattattatttaatgatggtttattgatagttcacgatggttaatcgtgattggttaattaattacttgccaactaaaacttgataatggtgggttgtgagcacatggttttgacagtcgtgctcatgacaattaaggaccggttcgcgagctactattgtgaaacattaaccgtgccaaccacaagccagcgtgggcaacggctttaccttttgtatagcatgattcattgcggagcaccagactgagaagtggcggagataagcccacgggggtcactggggagtccatgcctctggtttttgaggggatgattatgatccaggaatggtgcactgtggtgagttgtgttatgcagagggtattgtcacagcctctattcgggtactttccagtatcgcgacgcatggtagacatgatgttgaggctgtgtcttgtgggtacagtggtacacctttggccagagtaaaactattcgaatagccgtgcccacggttatgggcgagttgagcaatgtttttcgtgattagtcccacacctctcaccgtaactatggatgttatactgggtaataatttgcttagctcctggtttggagttagatctgttcagccgggtatggttgttcagaatggttgggcctgtgcagcatgggtgtgctgttcagtgttgattaaaatttctgattaattactccactgttttacttctcttaaatgttttgctaaatgctgcttttgcaaatgagcctatattatgccatcctttggtatccttgtgcacttgcatatttgctgtgtggcttgctgagtatgtcatatgctcaccttgcaataatcaatcaacctcagttgaagaaaaaggatccagaaggagaagacgtttggcttataccccagttgagctgccagtgggagtggagccggagcttcgctagattttattttccgctgcagttttcttcatgatgaggactaagtgcctcataagtaagtatttatcgttttagttaatttgatgaatctgtatattaaattgtcagtttgtgtacctcggctgattcctggacgaggattttatgcacaaataagttcggaaattactagtgaatttccgggcgtgacaccgagcaactcattccttctctttagtaacttttgcaagggctcgcaaacgtgactgaactagatcaatacaatttcggcgcatcgccacccttttgctttagttttatttcgacgagttcttgcattcgggttgagctacatcggtttcgatcttcaacaagaggtaaaacttgttatgacagcttgcgttctcgggattagtgcttccatctttatgacactctaatcctgtttatgtaattcgtcgagttatcatatatcttacataatctttggcaatctcgctatctaacctacaatcggctaacatctatcggtagagggcagccgattaggttagacaccgaagttgacttagattatatgagatatctaccactctatgaaacttccagcggcttgattgtctagatattgttcttgtttttatacttaatgctacatcagttgagtttgatctattaagtcgtgctagaatatcaatctctagcctgccatctggctgttgattagggtaacatcagagttttagccgatcttatctgatttaactacatttactctatgtgttttattgacatgttaaatctgccatttatgtaaagatcttatttcatttaagtatattaggcttttgtttggtatattctattcgttttaatatcttaacatagagttgtatcggagtattagccgatacatgctagatctatatgatcggctatgctacgaacatatataatcctggtattaatatatatttcgatctaagtgatttatactgtctcggcatggcgaccgatctatcccaatcgcttgatttaagtatatatcgacataagaattatatatttctaatatctatagccgatcgagtagatttagttctttattacctatttacaaccgccgatcaatttacatatgacatcggctcaaagatcaatgatatgtcaatggcacttagccgatcggctatcgtttataggtttaaccgcggtttctttgttttgatatcttgttgattgcaggatcaaatcaactggcacgctaacatacccgaaggcgagttttggacctgcactggagttaagtagatctcccaggtctcgtgttttacgtcaacacgcttttggcacgcctggtgggaccacgaattttatatccacatgtctgaagaagaagtcaatgccaagatcatggtcacggtggagagtttaatggaggaacaacaatattggctcagggggcaagcgcatcagtttcagcatggtggagcacatcagtatcggctcatgaaagccgattgcaagaagcaaaggaagatcggttttggagttatcaagacaagaaattttgaagcatgaattctcatactccaaaactgctgcgcatgtgttaacagtgaaatttggtaagcccggagtagtcatcggcttagagtcagcatcggcttcgaagtcctgcgattagccgatgagagttgtcaagtcgtcagttgtgggattattgctatattcggttaaggaaattgatctactaatggaagcttatccagaagagaccgagttcaaagagaatgtggcatggcaagttatctattaattaggaatagtttgttagtatccttttatctttaggaaagtgtgtttagtgtcctataaggactttatcttttccttttatctttaggaaagcttctttcttgtccgacaaggacttgtatcaacccatgggtataaatatgtacacccggggtctatgtaatctatctccacgatcaatacaattcggcgcatcgccaccttttaccttttccactttattttatcgtccggcgggacttggcacctgacgcggggctgcatcggtgttcgatctccggctaaggggtaagtccaatgttctgccggcccaggcaattgtatagtctacatcggcgtcgttcaaggctgcatcagtacattcgacctcttggattgctctggtttggatgatatatttgcctacctatttatcatatgtctctcttaatctagtcttagcatatcaatttagctctatcggctgcttctcgctttagggtttctgccgatatcggctaaatcgtgttgctagattagattagactaggtatctaccaccctgacaactcagtcaacggcttgattgtctagatattgtgtttcttttcatacttagtgctgcattagttaagtttgatctactaagtcgtgcttagaaccataatctctagcctgcttcttgattgccaataagggtttcatcggggtttcagccggtgagttatctggacgttgcatcggctcataaggattgcatatacatataagttggatttaaccgatgacaacaaaggtttcactgtttaatctaatcttttggatttcatgacatcggacctccagccgatgtatgctttaaccttcgaatcgatgcttatttatcatatcattatttgtcagttagtttatattggattatattgttatttcattacatcgttatcagccgattgccttcatatcattatctacatagggcatatctgccgttacttaaaccctattgctatcggctggcatcgacatcgactattatcggctatcggctggaactactccatcggcttgtcaaccgatcggctgttttgatctactatttgcatatcttgttagttgcaggatcaaactgattggcacgctcgcatctcatcaagatttggacctgcacaagagctaagcagatctcccaggccagtgtgtgtttttcgcatcaacaccaggcaaaagaaaaatcgttggagtagaggacaagactgacgaggattacaatcagttggatgggcaaccccctttcacggtgacgattgaccctagcatcctcctatcaaatgaagacaccccttactcacgtagcgatcacaaggaaggaacaatagtgaggagaaagtacgtgcggtcaaccgtcaccgccgatgtattgccataattattgtgtacacgatgtaaactattttggatgtattgaatatccatataaatcaattgttgtatggcatatgttaattatgcatgattattagaatttttaacaattttaaatcatgtgtgtgttagttatatgctagttatatgctagaatttttaaaaatcatgcatatgctaattatatataattattagaatttttaacaagtttagatcattcatgtggtatttatatatgttaattagaatttataacaattttaaatcatgcatatgctaattatatatgattattagaatttttattaattttaaatcatgcatgtggtatttacatatgttaattagaatttttaacaatttaatatcatgcatatgctaattatatatgattattagaatttttaacaagtttaaatctttcatgtgcttattacgtattatccacttaatttactacagacaacaagaatttttcgaagtaattgtcattaatttttcgtctttaaataattttaatgcattatttactattttagaaacacatatgtaatgaaattcaatattcagtgctattatctgtagtcccggttcttaaccctaaccgggtttaaaaagaatttggaaatagcgggaaaatatctttagtcccggttggtaagaacaaccgggactaaagaactaggagtatatatattcccgatgcgcaccctcgtattctccaccaacacttagaagttttttccccgatctcgatcggcttctccttcgccgccactgcctagggcatccccgcgccgacgccgccgtcgtatctcgccgtcgtctcgcaagcgtcatcgtcgccgcctcctccgccgccgcatctctatggtgagagccgccgccgccttcctctctctctcgacctcgacctctctctctctctccaaaccgccgccacctcgttgccgacgccgctgcctctccccgagggggatcgagcccggggtgttgcggcggctgccccctcccagcttggggttgggccgcccccaaacccacgtggctacccccgaggggggtcgagcccagggtggcgcggcggctgccccctccaagctagagggaggaggccgccctcgcttggggtcgagctgccccgaccccctccacgtatcagcccacgtgtacagggcctaacgcccacctaactgcatttaaagcggtctatgcaaccgtgccatgccgcatttaatgcggcgtgctgtgcatatgaccggtctgtgaccggtggaatgaccgatgggacggcgactgtgtaccccggccctgtcagtgtgtcacgcggcgagcggcgtgcttcgtcccgtcgcatcataatgatgaggggcttcacagcctcttacccgggtcagagctggtccaaccactctgaactaacccgggttcccattttctggtgtgaacgagaacccggaagttctcatccattaaatggcgaatgacaagggcgccttgcatgatttgatgggccccgcgcagtaaccgacgtgcagatagcttctgggctaaggcacaagacatgtaatgaatatagagaatattttcccttctccctaggtagcactcgcagcacatgtggtatccccttagagtataaaagttggaccatgcctagcgaggaagggggatcggactgaggatccctgagccaaagcttgtctaaccctagcttgcataccagggattcagggactttttaagcacagaagaatcatacacacaggagtagggtattacgcttcgtagcggcccgaacctgtataaacctcttttgtttcatcgtcttggaggagcctccaagatcaagatcacacacagtttcgctcaccaaatcctcgaatctcacccgctacccccggccgaactctcaaagggggggcctcacagcctcccgctagagagggtcaccccttgacacgaggggacaagtgcggcggccagcgagccgcgagggaattgtggtcatgcatgctttatggatggaatgatggatcaatatgtgttcttactgaaatttttatgatgctattctaagtattcatgctattttttatggtacatataatatttgttcttgctgaattgatgattgtcttgtatttttggtgcagattggatggagatgctacctaatgtgggtccccggaagggtcggggacaggggcctgatttggccccacatctccagtcaggaccgggggtagggagtgaagtcgggggtcggggcggggccgttccagcccaacctgaccccgttgccaacccgaagtgtgttgccctcctagtgtttggaatgacttagagttccagtatgagtagtagtttacccgttggggccggatccccgcctcaacggagcaggggcaaaatcttccccatgggtaatgcggggcagggcccaaacttcatgccggggatagggaagcatctccacctatggggaccctgtggggccctaaaggtctactattagatgaaggtggcctatacaaataaacccaccaggtccaattaatgaggatatatcaagagaaatccggaccttatcctcaatgtccatggacccgatccatccgttccattacagccacaaccctcgtacctcaacctgtgctaaaggccccaaacatcggcacatcgggcactcgtgttatattgagcgctgccatgcttcttctctctcacacaccttgctgtgggccatggacgacctttgcctcgaaccatgccaccaaccgccggaacagaatgtcgccgggcatcggcctcaattatgcaccaggccagtagcttctttctctccatcaccacatcatttctggtcccgcacctcgtcttcgtccgctggtttccctccgcatggggcctgctgtggccggagccggggctgggtgaggcagccgggggttggggattgaggccattcttgcccaacctgtcccgtcgtaaactctatatgttctagtgagtacatactgaataatgcctttccaatggcaattggcaaagtagtgatgcgtctggcggtgaactgttcgtttaaatttgtctaattcagctttaagaaagtaccactacaatttggaacgggtctacacggccgggctactagcacattccttttaatgaatcatgactacgatttgttacgagtaattaagctataacacgtccaagtcggctttaaactatgtagtgactatatatccaggagtagaattacatgactcatatttaattaatcaagttgcataagagacgataaccacacccagtctacctgataaggcgaagaaaacacgatgacacgagcactgggcggccattggggcaacttgatgtaaagaagtcgcttgtcagctttcgtcgtcgcgtctctgtctagatttcaccaatatataatatttctcataacctattgtcaacaggaaactttaattacatagtatatagtactgactaaatacaaagtaacaacgtttccagcttgttgtcttctgtcggtacagtctgtacagatctaactagaatttgaccttgattgcacttcaagtttcaacttatttgcaagatttgtgagcacattgaaatatgagcgggtgctgatcgattttgaataccggcttagggaattttttttatcggtatcaccatatatcacacctacagttcgaatccaaaatgttgaattgaaggaaagggatcctctgacttaactgctgtgcagttgagtcactgacatgtgggccatagtaaagtgggacccacatgtttgcatgtgcattttaagttagaggatctgcttcttgaattgaaaagccggtcgatcgatggcctgaatttttaattttgtcgtggctaaagtgtagttttttatttgatctgacgactataaaatattaatacatcgtatatatattataaatgataaaatgtagtcatgcgtactagtacgtgcaactaattaatatataataatacacaatagacagtcataaactgtggtaatagcatagtcaacactaagaaataataatataatgttccacaacaaatgataattcatcctaacctatcacaaacactagggttgcgaactgggtgttcgtttattcattcataaatatgagtgtgcacgtatatatgagcaccgctgtatgtattgtatttcataaaagaaacaaaacgaattattgcacaattatttcaaattttaaaattcatatctgaatagtatgttgttaccaaatgggtattaacatgccaacattaaggtttcgattacccatctgtacctttcttttagattatggagaagtaagttttggtctatgcatcaatatgttggaattaatgaatgggtctcaacccattcgaagatttttttctttgaaaaatcataaaagcctacatcataagatggcatacatggcgagtttagtacaccttgtctattctaggagaaggagacctccctataagaaaggatactctcttagacactgaggcatgtgaggttgacagaaaaaggggaacacacgcacgctcttacacgcctggactggcctggcggcgcgtgtgcacaacatacgcatcaaattatctctatataagtcgagccgccgcctccacacaacacatgcgaaatcaaatttagggtttgccccctctatactatgtcgtcgctcgtagtctacaccatcccgctcgctagcgtgcactggcgatcgggagagcaggtctctataaccttcgcctttgacattctgcactgggaaaaggcggtaataagatttttgagaagcgctgtgtttctgtcatttttgcagcgggcatggctagcaaaggcctaaggctagccaaaaaacaatttttttttgtggattatactcatctgtgacgggccataacttaatgcccgattgagatgatggtcatctgtgacgggctgtagctaatgcccaattgagatgacagtcatctgtgacgggctatagtttaggcccgattgagattagtattatctgtgacgtgctctagtttaggcccgattgaggttagtagtcatctgtgacgggctctatttgtggcccgattgagataggtcatctgtgacgggctatagtttgactggtagtctgggtcaaagctatcggtgacaggctttaattagggcccgattgagataggtttatcagtgacggccgtttgcccaattgagattacttttcacatcagtgacttctagcctgtgatggacgccgtgcccgattgagatggggcttactgcccgtttgagatgagggtatccgttccagtgattgcttgatttccttcacttttttttaccaatatatatagttgattggaactatatatatttttgatttcttatctatacaaataatacaattgcagctaactccaatattcggtgtttaatcgaaatgattggatagactgtcatactcggcttctaattagaataaaggttgttgccagttctatacttctattccattatttcctcaaactaacgagaaaattgaaattcccatgctctaaccagcgaaaatgcacaccatcctcctagttagtccaagtaaagttacacgagcattttcagcaaaataacaagaaactaatgaagtcaactccagcttgcgtaacgtagcatgctaataatgcacgcgaaatttcagactccagttgttaattttggttgtttaattaccaaagcgaccgggcatgaagttgacttggaaagtcggaaacaatgtgtcagctcgttggcacacttatctatatccttctcagataagtacggcatattctgtccttttcatgcctctcgtccgttcttttgtcgtacgtaactcacggtagtcatgtgacatttcttcttaaactccgttgcattgccatcaaagcatgactatttctagtgtcagactttgtcaaccgtgggtgtggtgtgtggtctgctcacggagttaatttctcacttctcgcttgtactcctacaacagatggaaccaaggccacacgaagcaatatatgcattttccagggaacttttactatacctccagtggaggtgataatattaatagtgtggtagaaattggtgccggttctttataggtggcggttcttaccatccctccaaccgtttctgtatccattgagtaaaaaccaacacctatgttttaagttctggtttgaaaggatgttcgtacaggactataggtgttgggttcttcatcaaaaccgacacctacaataccatctataaagctgacaccgatgactttagtgtcgaccaattgatgccgacaccaaaagtaacacctacgtgaccttccgaaccggcacctataatacttcatatagtagtgaagtcctggtgcgctctcgtcagccgcccactacgccagattctcacacctgtgacgggcataagtattggtcagtgataagggtcacctttgacgggtcctacgggatcccatcatcggtgagccatccggcggcgacccatcacagttaactaatcacctgtgacgggccaaaaatggaacatgtcaaaggtgaggtaaagtcaaatatttggcctgactttacctcacctttgacgggtttgactttacctcacctttgacgggttccaatttttgtcctgtcaaaggtgactagttacctgtcacatatgaggtatacacctgtgatgtgagtaacatttatgtgcccgtcaaagatgataaaaaaaatctctctcataaccctcccctctcctcccggctcatcgatccatcattctcctctctctctctgtccctctcaaccctttctctctttatcgatctagttgtgtgtgggtcggaggcggaggcggcaccggtgggtctgcgggctggagggggaggcgacaccagcgggtgtgggggttggagacggagatggcactgacgggtgcgcgggccggaggcggaggctgcacgggcaggtacgggggccggatgcggaggcgcgcggcaccggcgggtgctggggccggatgcggaggcggcaccagcgggtgcggaggcggcaccggcgtcggcgccagttggaggcgaaggcagaggaggtgggagattggggtcggtgatgaaggccgcctctttaggtcccaactccgtccgcccctccgcctctagatccggcctaccggaggtcggtggtcaccggatcggaccgcccctgactaatgaaccctgagcttcactcgagacactcaaggcggttattggcccgatatttcggtgagttgtagataactacgatttgggagaaacgttgacgacccgattacaaccgtactagacattgttgtgttgcgccttagagatcgatacacctctccatgggttgttgatcttgccggtgcagatcatccttattcctgcaagcaaatcgaagaaacaagcaagaataagataaaagcaacctgaattacatataccaataataagttggggttctgtaacgagcaaaccagcgatctaaccgatcacgggattacacggcaaagtagcaaagctaaactttaatctaaacaaaacccaagaaatcctgaaggggtaccaagctatttatggagatgggaggaccctaggtcgtcctccacctggttggggcacaccccacatgggacccacttgggctagggtcctagacgaagttataagcccatatgcccattaaaggtgatgcagcactttgtttcctcaattgcggctcaatgagatggaatttcacaatgagtttgatccattggaaagaagactccgagagctttccatcaagtactacggaccgaaaacggatgtcgtatgcagattcagtggccctttgaagtcagcagtgtagcaagtggccgaatcagattccatcacttgggcatcttgatcttgatgtgagcaatggttgtatcaatggtagccttggtcacatcatcctccccttcttcagggaaaaccgtctcggtttttccatatggtgctcttcgcatagtccatttaaaacaacatgtttcttccaatgaaaacaagacactcgagataatatgattagcaataatatgtatctctagcttgtatattttatccacattgatgggaggttctaaatctgaacagatgtgaaaaactctatggaccaaatatattcctctatcatcagattcgccaaatatatgaaaaatagcactagttggatatgtcaaattagacttagcaaataatttctccttcaaattatcgagctcacaaaaatcatcaaactaaacatagcccaaagtatttaaagaagatgtcaattttcgttcctcaacttcagtagcaatgtgaacaacatgcttagaatcagcacataacgaaatattataaatagcatgttcattcactagttgtggcatggatataaatgaaacattatcacacaactcttctttatcacaaggaacagcaagtaattcaagttgtgacaaaggcatctcaacaattggttctactaatggttgctcttctctagcatgaaaagtggacatgttcaattcattaacggcacactcaccttgattaattgcagcaccattaatattacctgtggttctctcttcggatgatgtaggtgcatcagtcttctcttcttccttcgtgagcgatggagatggcatctcgatcatatttctcttctcctcacggtgaatgttctgagctccctacagaatgtcagtaataggaggcacaagcatagcttgtttctcccttgggttctttaacatattgctctcaacactgcaagcaagtatgaacaagtggcctatatgattatatgtcatgttaataagcccagcttgaatatcggaattaagccctctaaaaaaatctagtcattgtgttctcattgctttcttttaaaccactataagagatacaaattttaaagttatgaaagtactcccgcacggttttgtcaccttattttagatgttctaatttctcaaggagagtacgtttataatatgaaaacacaattttttttcctcatcattgttttgcattcatcccttcaagcttatggccaacagtataccaccaaaaagacgtagaaccggtacacttattactagcagccttaaccatttcagcattagagaaatcatactcatcaaattgtttgtctactgctagctcctaattaacataagcggcggaatcatacttacaatcactggcaaattagatcctacccttgcaagatcattatcatgtacctcatatacaatgcgtaaagaagtcgctatatctcgttgatggtgaagaagtcaatgttgagcatgaccatcttgtttctgcttgctcaatcctaccatggttagtagcaaacaagaaacatacaaatgaatatgcacgctcctatcaactactaggtagtggcagctgaaatatcacacactcaagcttttcaccaagctcttacaagttcttaccaaagcaagcggaatggtgacgtacacggacctcaaccaagcacctcaatggagtttggatgtatcgataccttggcaaacacttgctgtacggctgcaatcaaatccgtggagctttgggtaggcttaaatatgtagcaaaggaatagcaaatgctcaaatcagagaatgcaaagttgaataatcgttcaaagtcatgtaccgtgctggtcctaggctagaacgtactagagacgcgaccctagacacaaacgataccacaagatagcacaagaaacaacttaagcacactctaatatatgacaatctcaaggatacaactaatgttctctttttttctttctttctttttcttctttctttttttcttttctttttcttcttttttctttttcttttttttgtgcgactttttgtttctttcagcacctttgtgccttttctcactttttttatttttttagaaaaaaacgactcaaggatcttaaagcaagattacagggactcaaatgtaaatataaaaattacagggactcaaatgcaaaaatgcaaaccctaaaactcaaattatacaaaaatggaatgtggaatttatgcccgttccgttttttcaaattgatctcgaaaccgacaccaaacaaaaattcaccaagctatctagcaaatcacgttacccattgaaactgagacgagatgagagggagggagtacgactctcctagtcacggtggtggtgggtgcggggtggaaccatacgctaggtgggatggttcggcctttagatggaaacggggatggtccggcctttagatggaaaccgaataggtgttaatcaggaaaccgataccaataaaaaaggctttccccttcctccttcctcacgtatggaaaccgaatctaatctacaaaaaatctctcaaccttccttcttggtagcgcacacattcacggcaaaaaaaacacacgcagtatttgcaaacactagatgcaactcaactccaaaactaaccgacagaaacttctgaaaactacaaaaatagaaccgtggcaacgagccgattccgttttcgtaggtcacaacagagacttgggggcagcgacaactgtggtacaaaacgtgaccagaactcaaaactctaaacgaactagacgctaagaccagcaacacgatgtgacaatgcaacacaaaattcaacaaagcaaaaactgaaaacaaacaatgcaatggcacaatatggctaggtaaatgatacaaattttttttgtccagctattttttggttatgggtagaaaaaaaaaactcaccgagcaacgaaagctctgataccacctaatgaaccctgagctccactcgagacactcaagacggttgttggctcgatctttcggtgagttgtagataactatgatttgggagaaacgttgacgacccaactacaactgtactagacgttgttgtgttgcgccttagcgatcgatacacctctccgtgggttgttgaccttaccagtgcatatcaaccttattcctgcaagcaaatcgaagaaacaagcaagtacaagataaaagcaatctgaattgcagataggaattcaatatcataagttggggttccgtaacgagcaaaccggcgatctaaccgatcacgggattacatggcaaagtagtaaagctaaactttaatctaaacaaaacccaagaaaccctcaaggggtaacaagctatttatggagatgggaggtccctaggttgtcctccacctagttggggcgcaccccacatgggctccacttgggccggggtcccagatcaagttacaagcccataggcccattacaggtgacgcaacatcttgtttcttcaattgccgctcactgagatggaatttcgcaagaccgaaaacggatgtcgtacgcagattcggcggccgtttgaagtcatcagtttagcaagtggccgaattagattccagcacttgggcatcttgatcttgatgtgtagcgcccgttccgtcgtggcgcctagcgggaaaactatctcttaaaaaccctagttgcgaaatctgtttctttgcttattgtctagtgtccatgccatctcagatctcaaatctccgatctatcgtcgagttcaatcccgaatccaaatccttcccaaatcaaatccctccgcaaaagtctattttgcctccctcgggttcgatgggctgaatccctctcggcccatcgcccctgcgtgcgcggctctctctctctctctccccgctctgccgtgagccgcgccgagccctccctcccgctctcgctgccattcccgccgatgccgcccaaatcgccgcgccgcccgcgcgcgcgcgcgccgtgggggccgactggctagtcgccgccgccgtcagcgcctgccaagcctgccccgcgtctgccgcccgtgtcgccgctccactccaaaccggtccaccgtcatcgccgtcgtcatcgacccggccccgccaccgccgcgcgctagcttacaagggacggaggctgagccccgcccccccctctgccgcatcgctccctctgcctcctccttttcgccaaagtggcaaggaggcaagccccctttctctccccctttttcccttttccctcccgccggcgtcatccttcccccccctgtcgccgttttggccgcgaccgccgagcgcgagctccctcccttgaccgcccaaggtcggtttccaaaccgacatcgccgccctataaacccaggcgccctcccttccttttcccctcccaatcttcccctttttcgcccgcaccattgccgtcccctctgtctcgccgatcgccgaccgccgccgtcacgtgtgccaaaggagtcggtgcgcgttaggacgcggaaggggactccggacgcaccctctccttcctcttccccggcccgaggccggagagatcgctcccgtgccgtcgacccatcgtcactgcgccccgtccgcacggtagtgcatctccccgttctccctcctcaatccatctcttccccttagttttcgatagtagcatgtgtagcctccccgtagctagccggcgccgccccgactgctgccgtcgctcaccgtgtgctcgccgccgtcgccgcccgagctcggaagcgcctctcgtcgccggcctccctcgatgcgattcctcctaatccggcgcaaggggtgggttcccgtagctgcgtagacgctctcgccgccgggaatcggcccctcgtgacctcattgccgtttcccccttctcccgccgccggttgccgccgccgcaatccgccgccgtcgagcatcccccggcgaatccgagccattggctcgtctcccctcgtcctgtgcaacatcccggtgtgctcgccttcgcctgtatcgccatggttcgctccccgctcgccgccgtcgtccgccgtccgttccggccggcgtcgtcgtctacctcccgccggcccgcgtggcagccacgtaggcgccacgtcggcgccacctcggccgcgaccgggtcaagtagaccccggtccgccgcttccctccgccccctcgcgcgcgcggtccaccgcgagccgtgaggcagcgcgtgggcccgccgcaccgcgtcctccgcgaaccgcacgcatgcgccgcgcctccctccccaaaccctagcacgccccgcgtgcacctcgctcacggtgagccgagtcgccgacaagcgggttccacccgggaccacgcgggatgcacccggcccaccggctctctctctcccctccccgcccgcgcgcgcgccttgggccgccttcttgggtcggccggcccattaagctcggccgagccgcccctttctctcgggccgcgccctagccgcccgaggaaagtctaatttccctccctccttcttttcttttcttttctttttcaaaaaggatttaaataaatcctttttcctttagacaaaaaatccaataatcttagaaattcaatatcttcccaaccgtaagtctgtttgactccgttcaacttccaaaattcctcaaatctcgagatctatctaatggcacgcttagaggtcaataatagggctttattttcgccgtttgctgagttgtcctgtttcgcgtgtagtttcggagctcgaagacccgcagtgcgaggatttcgaggatcaagctgaagatctcgagcgaggcaagccacctttgaacatcttgagcctatatttgaacttaattatgttgcttgaaaaatattatgcattgataggatcgcacttaatctgcttatcccgtctgcaaggcagattggcggacctacctaatttgttgcatttgacccttccattgtaattgttataccatgttcccttgtacccacctagttgcgcctcggtaatcgtgcactctgcacgggtatcgacggtcgccttcaaacttaaaatctgagaaacatcttgggtaaaacttgggttttacaaaagacttggaaaacccgacacctgggttggtgcttgcgaactaaatgaatttccaaaatcgcggaccggggaacgtaccgggtgtacggtttcccactcttgcacttaaggaccgtttccttggaatttcatccgaacacatgacaagtacgaccacatgggtggaatgggacacccctggctgagtaactagcttatcgggggagccatgatgctaagagacatgtggattcaccggggtggtgtcagggaggacccctgggcttcctggcacagtatggtctgggacctaatctggtgttggtctgggacccctctcgttggcatatggtgaacctatgtcggctttcgaaatgccttgtcatgaaagccttaaggtctctagtcgtggccgttctgcacgggctggatgatccgggttagtaatgtcgtgtgggtaaagtataccccctctgcagagcttattaaaactattcgaacagtcgtgcccacggtcatgggcggatgtgaggtgattcctagcgtagttttgtttgactactgccttgtgaaatttgctgttgtggaatgggtttgatgtttggaaaatctgcggctgatgggattagccaggcccgggtggccgtttgaaagctgttggccgggtgccaatcttgatcaattcaaaagactgatacattgcacatactccgaccggacgagacgcactgtctcatccgtgtcgtttgagaagcactcacttagttatttcagaaaagagttcaaataaaatcaattgcaaaaacaacagcctttctttgaagcctgcattaaacacttatttcccatggcttgctgagtactcccgtactcacccttgctctatataaataatccccccccagttgctgaagaagatgaagcggatcccgctgacgaggagttcttccaggagcaagctggctacgatgagttttagggtttcggcctagttcccaagtcgcgcctgtgatgtttggtccaagtcttggcttccgcttcccttttgtaatgcagttgcgagctcgggatctgtctgcagcccaacatgactgtactcctactctataataaagagacctctgttgctgtgatattttgtcttcctgtgataccagcactgtttcctaggactggtatcgattaacaggttaatttagagcgtcacgggctagttccgctcgggactagttcggggcgtgacaagagatggtatcagagcacaggcttggccctagggcgaaacccgacgtttaggatgaccctaaggatactaagttcaaaactacttgcgaaaagctaaggcttcttttggtttctttattttcaatagtttgttgctaaaatggttagtgatcttttctccctctttcaaaattgtagatggcagtgaacgccagcttcagttcccacggttttggtgagggtcaccacgtcgctcagcttcgtgacctcgcccgcttccttggcttctcgtgtcccgagtacatggggtactccgtggacgtgttccccctcgctgtgagctctctgtgtacctttaccctcgcggaggtatacacggagctggccttcgcccacaccacttcactgtggctaggcccaccctccagatcgcgtaccaggacctctcctggactgcgcttcgtcgcttggcccacgactacagccaccgtctcgggggctctgccttccggcagctcccacgtcttccttctggctacgcagatgccaggtacccttgtccgtacagcgagtcttagccagtgctgactcgcatggttgagctttcggaggctcaggccactcagcacgacctactccttcaggcttaccgctcccttgcccgccgctacgctactctggaggcccgtctggccgaggagggtgtcacctcagttgacactgtctcttgggactcaggccgcctctgccacgccagccacctgtcctcccacagctcccgcggctctgctcgcactcctagtggcccgcgctcccccagctcgcgtgcgccgtactcaccagtgtactccccctacccacacccagttagcccctcctacacccccggacacaccccagttgcttcctcccgccgtggcgcacgctttatccgcactgtgcggaagcgtgttgttggttcttccaccgtgttccgcttcgactacccagctcccccaccgccagcggcccgtgctgctgccggccctcgacaggttccgccggtcccttcgcgtcagccgatcgacgtttcttcgactgatgagccgactacagcaggcagccaggcaggcgaggagtagaggaggcagtcttcagcagccgtccgtgtgttaggcccttttgttccaccgccaactcttttggagtcgtggcgaggtagtgcgtgcgtgtgttgacgtgggtgttgtttggtagtctggttctcctaggtggtgtgcgtacagtcaagctcggcgtagctctgtgacttgtccacacccgttgtatcaggtgtttttatgatttgagaaaaaaatccagtttatgcctagtgcgtgctatctgagttgttatttactttgctccttgcccttctaagtgcttatctgattcttacctcgccctcttctaggagtttagatgcctagccgcccccgccgtgctgctcatgcaccagcccgcttcagttttgaggaaggtagagttgagccagaagcaaatcatgagtcagctaatgagcagtctcaccacagcatccgttcgcaccatactgcttcccgcaatgcagaagttgagcaaccccaccgcagcaatcgctcgcatcacacagcttcccgtaatgcagaagtggaacaatctcaccgctctcaccgcactgccagtcacaattctggagaagaacgcatcccttccccacctcatgtggaaaacaacatgcagcacttaatgacagttcagacacaaatcttgcaaggattagccgcagccatagccggctttcagcataatgcccatggaaatggccaccctcacatgggcaacaatagatccaagctgacagactttctgaggtctcgtccgccagagttctctcagaccgtcgagcccgtcgaggctgacgattggctgaaagatgttgatagaaaactcaacttagtgcagtgtactcctgttgagaagatgctctacgcctctcaccagctaagaggacatgctgcagattggtgggagaattactgcaatgcacaccctgaacccactaacattgcttgggatgagtttgctacggctttccgtggagctcatgtgcctgaaagcaccattgatacgaagaaagaggaatttaacaggcttaagcaaggcaacaacagtgtcaatgagtacctaagtcagttcaacaagttggctcggtacgcccctaaggaagtggacacagacaagaagaaaatcaggaagttcttgaagggaatcgcagttggaatgagactccagttgcttgctcatgacttccccacttttcaacatatgatcaacaaggcacttctacttgaggatgccagaaaagaggctaccgaagaatacaagaaacgcaagtttaaccatcaggggaattcttcccgaggcgcacctcgccctcgctatggtcaacccatgcaatatcaccaatcggtcactcaggctaaccgccagccaggctacgcccctcgtcctcagatgaaccgtccggcacctcagccacagcagcatgccccaagtggcaatactgcgccaaatagtgttacctctttcaagtcaccactaggactatcagcagttcagtgtttccggtgcaaccagatgggtcactatgccagacagtgccctcagaatcctaccaacaccaactcagggcatgctaatggcagcactgccagaactcctactccagcggcagctcagtctcgtcctagctctcaggcaagtggacaaggttctcgtgcttccaacaactttggtcgaggccgggtgaaccacattcaagctgagaccgctcaggatgctccagacgttgtgatgggtatgttctctgtgaactccgtacccgcaatagttttgtttgattcaggagcttcccattctttcatatcacaagcttttgtgaagaaatggttggaaaacccaaaatttacgtgtaccaatgatagtacattcccctgggaggaatataagggcaacccaaatatgcccggaagttaaccttagaattgaggaagttgacttcctagccaaaccgatagtcctagactcgcaaagcttggacatcatcctagggatggattggttggctaagcacaaaggacagatagattatgccgaaaggtccatcaccttgcaaggacctagaggaaagcaagtctgcttcaccactaacacccctaccgcaagtcggtctatcctaacctatttacaagtcacctccttggagtcggtgcccatagtctgtgaatatcccgacgtatttcccgaagaattaacaagtatgccaccagaccgagagattgagttcgccatagaactggcaccaggcaccgcaccaattgcaaaaagaccctaccaaatggcagctaatgagttagcagaagtcaaaagacaaatcgaagaattggagagtaaaggttatgtgcgacctagctcatccccttggggagccccagtgctcctggttaagaaaaaggatggctctgagagaatggtaatcgactatagagccctgaatgaagtaactataaagaacaagtacgcattgccacggattgacgatttgttcgatcaacttaaaggagcaagagttttctctaaaattgacttgagatcaggttaccaccaattgaaaattagatctgaagatatcccgaagaccgctttctcaacgcgttatggtctatatgagttcacagtgatgtccttcggaatcaccaatgctccagcattcttcatgaacttaatgaacaagatcttcatggaatacctggaccagtttgtcgtggtattcatcgatgacatcctgatatactccaagaatgaggaagaacatgctgaacacctgaggctgataatggggaagctcagggatcatcaactattcgctaaattctcgaaatgcgaattctggttggaccgagtagcatttcttggacacgtgatctccttcaacggtgtcgaagtagatcccagcaaggttggagctgtacttgcttggaacccgcccaagaatgtgtcagagatccacagcttccttggcttagctggatattatcgaagatttattgaaggattctctaagctagccagacctatgaccgagctgttaaagaatgaaaagaaatttcaatggtctacagcctgtgaagacagctttcaagaaatgaagaaaaggttgaccaccgccccagttctcaccttgccagatatccgaaaggatttcgagatcttctgtgatgcatcaagacaaggcgtaggatgtgtcctaatgcaagaacgaaaggttgtggcctatgcatccaggcagctcaggcctcatgaagtcaactatcccacccatgatctcgagttggcagccgtggttcatgctcttaagatctggaggcactatttaatcgggaacagatgtgaagtatacaccgatcacaaaagtcttaagtacatcttcacccagaccgagttaaatatgaggcagagaagatggttggaactaatcaaggattacgatcttggaattcattaccatcccggtaaagctaatgtggtcgctgatgcgctaagtcgcaagacctactacaatgtagctcaaatatggccagaccaagatcgcctgtgcggagaattggagaagttaaggctgaccgtggtacagtcaggtgtccctgccagcttgaccgtgcagcctaccctagagtcgcaaatccgggaagctcagaaagatgatgaagggataaaagaattaataaaaagaatacaggagaagaaggacaccgatttctcaaatagacgatcaaggcacagtttggtgcggtccacacatctgtgtaccggccaagaaggagttaagagatcccatcctaaaggaagctcatgagtccgcctactccattcatccaggaagtacgaagatgtaccaggatatcaaggcatatttctggtgggctggaatgaagcgagatgtcgcagaatacgtggcgttgtgtaacatttgccaaagagtcaaggcagagaatcagaggccagcgggtctgctgcaacccctaccgattcccgagtggaaatgggaagagatcggaatggatttcatcaccggtttgccaagaacccctagcgggtacgactccatctgggtaatcgtggaccgactcacgaaatcagctcatttcgtgccagtgaaaaccacctttgatggaaagaaactagcagaactctacatgacccatgtcgtgtgtagatttggctgtcccaagaagattgtgtcagaccgaggcactcagttcacctcaaggttctggaagcagttgcatgaagctctcggaaccgatctaaattttagtacagcttaccatccgcagaccgatggtcaaacagaaagggtaaaccaaatcctagaagacatgctacgtgcgtgtgccctggatttcgaaggcacttgggcaagctggctacgatgagttttagggtttcggcctagttcccaagtcgcgcctgtgatgtttggtccaagtcttggcttccgcttcccttttgtaatgcagttgtgagctcgggatttgtccgcagcccaacatgactgtactcctactctataataaagagacctctgttgctgtgatattctgtcttcctgtgataccaatactgtttcctaggactggtatcgattaacaggttaattggaacgtcacgggctagttccgctcgggactagttcggggcgtgacatgatttgagcaatggttgtatcaatggtagccttggtcacatcactgacctcgcggcagtcggatcttgtcaccggccttggtctagtcgccgcatccgcccacgcccccgcctccgtgtccaactccgtcggtccaagcaagctccagaatggctctttgaggtcagaggtcaccacctccttcgccgatccatcgctttacccccttccccttcagatccatcgctgccacctctcagtgccgccagatctggcctatttgaggtcagaagctgcggtggggactacaaagtcgttagcaattttgatgaaggtctgatgatccattcggcagtgacatcgttaacaattttgtgaagtccaacgataggggaattgatccattctgtttgtgaatgtgattctgttttgtgcgattgtgaatgtgaatgtcattttgctctttggctagatgaatgtgattgtgatgttttttgtgattctgttttgtgcctaaatgattgtgaatgtgaatgatgagtatttttgtgatttatgaatgtctaatgaaggtctgcgactagctaggctcacatcattatatttcttttgccccatttttcaggtctgtgacgggtttcaattaggacccgttacagataaagatcgccactaacgagtcaaaatatttacccgtcacagatgaatgttacctgtgacggatttaagttgcagaccgtcaaaggtaactcttacctttgacgggtctttactcgtcagagttgactccgagtcgtcagtgaccactaatctctgaccagggccatatccgtcaaaggtgagggtttgcgcccatcacagataatgtgatccagtgtaatggccagccctccctgcacgagccattgctcatggagtcgtcgatgcctctgcatttgatgtggaggcacaccgtcggcttgatcacccgtggacctaccggcccgtgaatacattctacttatattaatttaagatgtgcaaccatactagtataattagtgcggcactttgattgacagaggtaatctgcattagtaatagttttggcactgttttctacgtagtaactaatcgaggaacaccggtagaggaactgcagggaccgacgatagagcatagcatccctcattgttagcactgaaaatggactaggtccggccaatcttcattgacggctagccgctctcttccgtcgtcattgttttgtgcttaatttctcccctaaatctaaggttgccggatctgacctcgatggccatggtgacagtaggcttgggtgggtcgggtatatcgcttattaacggcaacctatggccaaaaggatagaggtgtccttcattttctattttctttccatgaaccactatttgccttaaataaagtactatagatatcaatttatttcaggcgctcatactcttggtccccgcccgcgtcgctcaagggttgggcgacacgggcgtcgcctccctccccagccgacccatcatctcctcccacctctacctcattgccgcccaagcaagccaccagaaaaccgtgcctttcttctcctccctgaaagtcttgagactagagcccgtggcccgatccacgatggggcagccgccgcgacatagggtggaaagccggtggcgtagttttagagagggcaccggtgaccagcggcacgcgcgtaggagcctgagggtggcctccatgcaggcggagaggaggtgtgactagatctggcgtctcctgccagatctggtcggagaactggcgacaatgaccacgatcgacgacatgtgaggccacgggcggtggcacatgagtaatgcacgtccatggccgacggagcacgtccaacgcggcgtgaggccgtggccggcagtgtgaggaggaagtcaacaatggtctacgtgagaaggaggttggtggtggcctcatgaggaggaggccggcgagggtcgagcatggacgccctagcttgcgtgagaaggaccaaagtggcagcgtgggtcgcctgcggtggtggttggcctctagtagtgacctcgacagcttatgacagcaaacatggaagtagttaggcagtagagaggtcttcttctctgttgccggctaagcatcctcttctccatagcgctcctcccctttagtcgtggggagctccggtaaaaggggaggcactggcttttgcaacaagcggtggcggtggcactagttgatccgagcaaccctgcgagccagcttgagctgcggggtggtgacctcggcttgcgcgctaaaggaatgtcgtggtggtccggtgacggtcattgtgcaggatatttgtgtgggcttttgaacaggaattgctagtgaaaaccttgataagccttggcccgacttgacgacgacaccgacgccattaggagccgttctcctccttgtaggtgtcgttatggcactgacccctttttccccaacaccaactgcgtgcaacagtggccattggtggactcctgcaatggtgcagaagctctataggcttagggtgtttcttgctttgcggtgagtgaccatcatttttctttggttgttgttgggtagagttggagctgctttgttgttggggtgtaatgaagcttggcaacgatttttggctagctgtgtgcaggaagtggctccttggtagcttgggccaatgtcctttgtgggttgtcaaacttgtttgtttgttttggcgttagggcatcttcgcagcgaagtcggaactattatgtcgcttgtggaaagcttggtaacgataacacatgtgagcggctgtgtcactactatggcaagcttggtgctaatgtctcacgatgggctccgtcgtggtagcttaggttagattagttggtgtgttgttgtagttgtgtttttcgcttagtttccctaattaactgagaaatgtaagatatggtccctttttaaaaaaaaattgggcaccatcttttttatataactagcaaatatgagcatgcgttgcaccgggtgaatatcaaacaaatatggatggttaagattgcttgtgtacttataacacatgtgcacaaaaatattgaatttggaagcgtacagatcagaaaaatatgcaattaattaaaatacaaatccattgaaatatctggtatttttaagtaggtatgtgtataattaaataaatttaaaagtaaagcaaatgtgagaaataaaataacatggttaaatttaatgttattaaattctccatgattagttacgctctttagaattttattggaattttcagagcttaattgctaattttaataatacaaacatcatttaacaattatttaattggaaaaagaaacaaaatgcttcattttaggtttgattcgaaataaacacattcaacttcttctctttttcttctgcctgatggacctaaaataggctattggtgcatctttctcacccggcccgagatgggtgttgaaggctagacttcttttcggcccttgccggtcggcccacggccttttgcacatgtgcgggcgcacttcccctccccaggccgcaacctgggcttgggccggaaaagtggccttgctctcgatccctcttgggccgatttcggctcgaccgacgccggccgtccgatctctagggtttcgatcaaacagccgggcgtcgagatcggggaaacaaaaccccctccttctcctcagccgccaaaaaccctagcccatttccttctctcccttctctctcttcgccgccctcccctccgcgcccccgatgctcctgtgcccaagtggaggcggcggcgcctctccccccgagcccaagcggcggcggtggcaccctccccccgagtgacggcagcggcggcgccctcccccaagcagcggcggcgggggcggcgcctctctcgccgagcccaagcggcggcggtggtgccctcccccacaagcggtgacggcggctcccccaccactggcggcgcggccacgtcctcccccaccaccggtagcgcggcggcgtcctcccccaccaccggcggcggccggggcagcggcgcctgtggaggcgtcggcggcccgccggcgtcctagcggcggcggcacccctcccctccgccggatccagcggaaggggagctgcggcgcctggtgtccctgtgatggcggcggttgctcgacggcaacctcccctttgatctttttttttggatatatttgtgtgtatagtgcttcctccgattttattttatttgtgtgattgattgaattctgattgggtattttttttaggtgggggtgatggaattcttactgggatttggggggaggcaagggtgacgaaaaaatcaccgcacctatcaggcaacgaatggaaaaatacgaatatttatattagttatagaaatgtcggcaacaacctaaccatcgaaaagaaataaagtactataaacctccctaggcttgtaaagacctaaaaactactaggccacttaggctgagttcggcacttcatgttcacaaacccacctctttcgtttttcgtgcgtacacttttcaaattactaaacggtgcgttttttaaaaaaaaattatatacgaaagttgctttaaaaagtcatattgattcatttttgaaataaattagctaatattaaattaattacgtgctaatagaccattccattttagtgcaggagggtttagttccaatcctgcactacctaacacagccttaattggtttcttccatcctttgtgagagcaagtttaatagtatagcccactgctatctccaaatcatctataaacaacgtaatagtcaattcatacaatagttgcttgctatattattaatatctggtcccacctgtctatacacattacgtcttgaagttcgtgctgcagcgggctacagatcatacacattacatcttggagtccgtactgcaactggctacagatctatagcccgctgcttttctctctttttaaaatggtaaaattggttatataatatcgaaagtatatttatagttggtttgtacatgctttgagcagctcgaactcgatatggatcattgagaccagtcgtcatgttgggacattgtaaatgccctcgcactatactggagaatctagaacggacggtagggccttcctcgcactgacgcacgaaccgacaaaggtgtggttttattctggttatcaggtgttaccaccacgtcaagatgactggacggatgagatggccccgccaccaccgcctgcggcccaagtcgtccgtccgttccgcccgcgttttctcaagtttccccccctcctttccacatttatctcacccagaccagacgtgccgtgcttctcgtctcgcattcaatgcccctaaccccactccgctgcctattgtcaacgcccacgcatcacttatacacgcgcaccatccatctctttcccattgtccccgtccgtatactagaggtacttgttcttttccttcttcgcgaagcagggatgaagctggtgtggtgcccggagatggcgtccaaggcgtacatcgacggcgtcagggcgctggccggccacgacctggccggcgccgcggcggacgtggcggagctcgtgtcggccatggccggcggctggaacgcgcggctcatcgtcgaggcgccggactccgcggctccggcggcagccgccacgagcctcgcgctggccgcagccgcgcggcgcacgggcgggcgctacgccctcgtgctgccggaccgggatgctgcggcggcctcggcggcggaaacggccgaagtcgttgtcggggaggcggacgaggcgatggcggggctacacggcgtggacctcctggtggtcgacgcgcggaggagggacgcggcggcggtgctcagggcagccaggcccggggccagaggtatggtggtggtgcgccacggcgacgggaggcagcgcggcgccaaggacctggcggcgtccatggcggcggggacgcgggtcgtgcgctccgtctacctgccgatcggcaagggcgtcgaggtcctgcacgtcggcgtcggcaaggggcccagcctgcagaaccaccgtgaccgccggagcaccagccggtggatccgccacgtcgaccacgacaccggcgaggagcacgtcttccggcggcagtgatcagtcgtcgtctgttattccgtccaggtgaattaaatcggatgtaccacggggagggtagttaattaggtgtagcgtgtgttgtccagattcgttgaatctgcccgttaataccatgatgatgtataatcatcggatgggtggaaagtgtgacgaatcacgaacaatgtaaatacctcaaacttgtagctcctcatatctcttccttctacctactgtgaaagctttcttttgagttgatctgctagttcattctttaatttcctttttctttttttttttgctgtgcagagtgcctttgataattaactcagaaaaaaatatgttcaatagatattcattatctataggaaaaatatgtagtgaaaactgaaaaccacatatatagcgaaaacatgtaaacaaccgttggatataaaaatagaccattgctcttgttacctagagtaacatttttttagttaattgctcttaaagccacgtattattaccaaagtttcactttgttctaggctattgatgtttttacttttgatcgggatttcttaccttctattacacattggatcattattgtattccttgcctttaatatactttcctgccactcactccttgatttccttagctcaccagcaactaaacgcatacatcaatactctatcctgatcatctagtaccttgattttctttttggctcttttttcccaccaaaatcatgtgagccgagaaaaatcagttgattgtgagctcacaacaaaagttgctgcagcgagcagccctgtggcttgattttgtgatttgagatcaggaacggatccgagtgaaggaatcgtagtcatgtgattatttgggttaatccatgccaacatctcaatggaaaaaatacaagcaccttgattttctttttagctcatttgttataaaatcggcttgaaatcatcatcagaaaccaaacacggaaaaaacgatataagagatccaaacacgatgacgataccgaggcataatatttattaacgaagttcagccgaaacctacatctctaggacactgattatgggtgctcatccccgatccaacatattacaatgtatcaaagttacaatgaccctcggccggatgccgccggcagtcactacctctcacctatgctaagtcgtcatatgtgattacaatatgtacatccctctatttaagagagggcctaggatagagtccgactcttactctattcttataccatataactccaagtcttaaattgtagctaactacgtatacatattcgacacacaaactctatcaaactccaccttggtgaatatgccacgccaatctgaattcattatttacacgaacttctgtgcattcagaattgagtttattccttttttttcccataaacaagagactccgtaatccctgtaacatcttcctcttgactctacctgcaacagtactccaccttctctcttatgataataattgtcttaccaagcgaaattggatccttcctagctgtcaatccatagattctctaaagaccatgttcatctaaattttatgtcttaaatttgccttgatctaaccaaataaccgatgtaatcaccacatagataaaattcaactcaccatatatgaagagaacactttcttccttatcgtcatatggactgagctaacaaatccaacattcacacttctcgtatcccactactacaaaaatgattttcttggacgaacccatcgttagattccaaacggtcaataactgaccgcgtatggaaaaatcgtcctcccattcttgcttgcggatccttaagaggtccgcacgcaaaaataagactatttttacgtgcgaacccttaataggcccgcatgtgaaaatcctctccctagattttgaaaaaaaaacttctctaaaatgatccaattgttttaaaaattgcctccacaacctactaatcagttggacaaaaaggattgttccatgccatgtaagcaatacaaaaatatattcataaacattgaatcattccatacattcatcgcatcattcattcctcgtgatatcatagcatacattcatgccattttttaaaaaaattattgctatacatgccatcaagcaacctgcttatctttaaattagtaaccttcgtgcttgctgtccagaatttttaaacttttgtaaatgtgggttcaactaagattgatcattggccatttgatcattggccatatatagatcccaaatatatataccataatgtatcttgttagaaccaacttctctagttccactttttggtcatctaccaaagccttcgtaaaccacaactgactaaaacctgccacccatctactaaatagaagtcaagtctataatacaacttaagaaagttactaccactcgtcaatcctcaagatatagtcatgacttaagctaacctcacccacaggagattaggtagaaccttttgttagagatataatgtggtatgtttgaaagaggcttaggaaaaataattaaatcagatactattgtgttatcagaaagcatcatgcaagtaaaacttttagtaggtctttcgatcatcagtcaaggttaggattataatccattcataactttaacaaaaattaaacggagttcgacagtaagaaccacactaagaagagtaggattcttaggaagccaacacattgatcaacgtaaccactacaaccctacccaaatctcggggacgagatttatttaaggaggataggttgtaacatacccgaatttcaggatgaagaaattttcgtcaaaattagttgaaaggaaagttcttcaattttgtgaaccaaaaatttccattttaaaacctaggggaagttgacctaactcatgtaactaaataaaatttgagagcaaattaaaactttttcggaccattcgacgcgtacgtcgtgcacgcgcgccgcctgcccggcccggcccggcccggcgagcgagcgcgcgcgtgtgtttcccctcttctctccaccacacatgcttcaagcgactaggagggcatcctcccttttaaggaggtccccctctcctagaataagcaaggtggtactaaactccacatgcatgccatcccatgaggtgggcttttgtgattttccaaagaattaatcttcgagtgggctaaggcccattcattaattccaacaatcccccaccaaatctcaaaatcccactgagatttgccttttccaatgtactgtttatataccagcggttcgatggagaccaattaaggttgaacatccacctagaactccaagctacacttactcacaacttgaacaatggactacgccttgaattgcaagtcttgtgcaagcaagtttcactcaaagtcttatctagtactagaccgtctgtagactacccctcgggtggagcgtataagtcatactcctaggtctttagtaagcttcctagaagattcacccaaaatcttcatagactgcgaccaacagtcaagctcacaaaggtgagttctttcaagaatgctctgcaggacaacatctttgctaattaaagccaacagaactcattaaggcatagccaacctgccttgcagctcatgagagtatatgcatctttacttggagagggtatatatattggtactctcctctagtttattaatggtttgttcttcccaggatctaattcacgggatctccgatcacatagactgggttaccaccatagtataactcacatgggtctcaaacccatctccttcgatgcattgtctatcacatttcgtgatagtcccttcgtgaagggatctgccaggtttctcgctgtttggatgtaatccaacgttataagtccggagtttcttaatttcctgacagacttcaatcgtcttttcacatgtctagaagatttcatattatccttagaactattcactttgacaattatcgtttgattgtcacagttcataaggatagccggcaccggtttttcaacaacaggcagatccattaatagatcacgcagccattctgcctcaacagtagcagtatccagtgccgttagctctgcttccatggttgacctcgtcaaaattgtctgtttgcaagacctccatgaaacagcaccaccacccagtgtgaaaacatatccactagtggctttgatctcatccacatcagagatccagttagaatcactataaccctccagtaccgcaggatacccagtatagtgaagccccaattccacagtacctttcagatagcgcattactcgctcaagcgcacgccagtgatcatctcccggattagaggtaaatcggctcaacttgctcacagcaaaggatatatcaggcctagttgcactagccaggtacatcaacgagccaatgatttgggagtattccagttgattcctagcaattctcttgttcttgcgaagcaacaatctaggatcataaggtgttggagaaggcttactatcaatgtagccaaagcgattcaagatcttctccatataatgggactgcaagagtgtaatcccattctcacctctaattagcttaatgtttaagataacatcagctactcccaaatctttcatatcaaaattttgagacaagaatgatttaacctcatttatcacctcaaggtttgtcccaaatatcagtatgtcgtcaacatacaagcacaaaataactccctcacccccaccatggcgatagtacacacatttatctgcctcattgactccaaagcctgcagatgtcaatgttttgtcaaatttctcatgccattgcttaggagcttgtttcagaccatacaaagacttcaacaatttgcacactttgccttcttgaccttcaactacaaacccatcaggttgatccatatagatctcctcatccagctctccattaagaaaagctgtcttaacgtccatttgatgaacgagaagaccatgtgaggctgctagggaaagtagcacacgaattgtggtcaatctagcaacaggtgagtaagtgtcaaagaaatcttcgccttctttctgagtatagcccttagcaacaagccgagccttgtacttttcaatagtaccgtcaggcctaagcttcttcttgaacacccacttgcaccccacaggtttacacccatagggtcgctctgtcacctcccaagtcccgttagcgataatggaatccatttcactacggacagcctccttccagtagtctgcatcaggagatgcatatgcttctgaaattgacttaggagtgtcatccacgaggtacacagtgaaatcatcaccaaaagacttagccgtcctttgtctcttactccttcgaggagcttcactgacatcctcctcagagacaagttcatgtgtatattcagtttgttctggtggtgtgattgaactgggaattatttcagagggttggttcgaaccactatgtgtatccttcattgggaaaaagctctcaaagaaggtagcatcacgagactccataattgtaccaacatgcatgtccggtacctcggatttaactattaaaaatctataggcaatgctatgatgagcatatcccagaaaaacacagtccacagtcttaggtccaagtttgcgcttcttcgttattggtacattgactttcaccaagcacccccatgtgcgcaaataagaaagtgatggttttctaccaatccatatctcatatggtgttttgtccttatttctgttaggaactctgtttaacacatgatttgaggtcaacaatgcctccccccaccatgccttaggcagtcccgcagtgtccaacatggcattcaccaagtcagtcagtgtgcggttcttcctttcagcaatcccattagactcgggagaatagggaggcgtcctctcatgtatgatgccatgttcctcacagaataagtcaaactcgttcgagaaaaactctccaccacgatcagacctaagcctttttatctttctgtcaagttgattttcaacttctgccttataaattttaaaatagtctagagcctcgtctttcgttttcaacaagtacacatagcaaaatctagtagcatcatcaatcaatgtcatgaaatatcgttttccacccttcgtcaacaccccattcatttcacaaagatctgaatgtaggagttctagtggtgccaagtttctctcctcggcagccttgtgaggcttgcgaggttgcttcgattgcacacaactatggcacttagaacctttgacaatggaaaacttaggaattaaacacatgctggaaagccgagacatcaagccaaaattaatatgacataaacgtgaatgccaaacattagcctcatcatccacactgccacaagtatggttcacagacttattgcagaaatcagaaagggaaaagcggaacaggcctccgcactcataacctttaccaataaaatatccatgtttagacacgactactttattagactcaaaaaccaacttaaatccgtctctagtcagacgggagccactaataagattcctgtcgatagaagggacatgctgcacgttcttcagctgtacgatctttcccgaagtaaacttcagatctaccgtgccaacaccatgaacagaagcatgtgacccattccccattaggacggtggaaccccgtgcgacctgataagaagaaaacaatgagatgtcagcacaaacatgtacattggccccagtatcaacccaccaattagtagattgattaactgaaaaaacagtaggtaaattaccatacccgcttccatctccagtgttgccaatggtcacattagcagacttagaagtctgctctgcaggtgccttcatccccttgcgctgtggacacttcctagctagatgaccaacttggccacacacaaagcaagtcctctcatcctgattaggattgttgttgttcttcttctgcttcttgaagttggtggtctgctgagctttgtatttccccttgctcttgttctgggccttgtgcacaacattggcactggactgcccaccatcgcccttagacgcggcatctttttcccgagctttctcctcaacatcaagagacgcaatcaacccctcaacggagtattcctgtctcttgtgtttgagtgcagtaccgaaactcctccaagatggaggtagttttgcaataatgcacccggccacaaatttgtcgggtaagacacacttaaggagttcgagttccttagccatggtttgtatctcatgagcctgttcgactacagaatggttgtcagccattttgtagtcatgaaactgctccatgatatacagatcattgctagcatcagtagcaccgaatttagtattcagtgcatcccacaactccttagcgtcgatcatatgcatatacacctcgaccagacgatcgccaagaacgctaagaatgcatcccacaaagagagtagtggcttcctcgaattgcttctgctgttcagcagtaagaactccttcaggtttgccagtactcacccagaagcatttcatagctgtcagccacagagtgaccctgatctgccatctcttaaaatgcacaccggtgaatttatccggcctcagtgcatcggcaaaaccagccatagtaaaatcacagtgcctataataagttttttggattgttgagattatagatatataatgatttaatctattccataaataaatcatgacattacagatgaaaactagcatgaacgcatcattagatctacacatgtaaactacacagtataacatgaacagatcaaatatgcgcaacatattgaacacgtaccgaggtgacggaaagaccggctgcttggtcgaaacttttcgcaagtgtctacgaaggcacgaaacacgcgagcgaagaggaaggcgagccgtcgcgaacgaacagggagcagtcgcgcgaagcgcttcccaaaaaccttattgccgccttctcccggtgcagaacgtcgaaggcagaggttccggagacctgctctcccgatcgccggtgcacgccggcgagcgggatagagtagtctacgagcgacggcgcagtacagagtaggaagcaaacccaagattgatttttttgtatgtcgcttgatcagggcgcccgcacgatctctactgcgcgtaaccgaaccggataagtcgcgcgtaacttatccggactccacgccgtttgcacgcaccggatctttcggaacgtttccaaaacaaaaacgaatccgaatttgcaacaaaacaaaactgcaaaaggaggctgcatctgcgcaagggtgtggagccaatttttcggaccattcgacgcgtacgtcgtgcacgcgcgccgccggcctggcccggcgaggcgagcgagcgcgcgtgtgttttccctcttctctccaccacacatgcttcaagcgactaggagggcatcctcccttttaaggaggtccccctctcctagaataagcaaggtggtactaaactccacatgcatgccatcccatgaggtgggcttttgtgattttccaaagaattaatcttcgagtggctaaggcccattcattaattccaacattttatagccccattacaggttcttactactagggtttagattatacaggggaatttacatgattacccttatgaaagggacatttacaagggtacatgatgatataggggctcatgggcccttgatgggccatctggcgatcgccggccctattgcccctaggcttgatgggccggaaaggcttcttcggccctcgcgggggcgaacttgccaaggcgaagtcgtcttccttcggcagatagtcttcgccttgcacccttcgcctgagacgcctctggcctggcaaggcactcgcacgactcttcgcctcacgccattcttgctccatagtcttcgccatgggtttcggcagatttggtcgaagggcctcatgccatccgccaacaagcccctcacgggcaagggtgagattggagcttcggccgagaccgtgcaaaccatgtggtatggtatgcggcgccccctttcgaccgatgctcctgccgaaacctacattattcttgcgaatgaagtttgttatttgtgcggctggtattattttgccgtgcttcttctcctgcgtttggttgcatattcatatatatattatacacatttttttatatattttcttttctcgggccgaaaggaacagtattgggctttcccttcgtgggctttttactgtgccgctcggacggtgggaagttaccgttttgcctacccttgcgacacgtggcgctttattactggtgggtaggcgaacggtcgcccgggtgagctatatattcctaccgaccttttcttttcaccaccacacttgccattttaccgcgtgcgctctcttcctccgtttctttcttccacagcatctctcgacccctcaagcgtttcgcccattctctttcttcgccaccgcaaatgcaccgttcgccatggaccctcgcaagccaaaccctgcttcggcgaaagggccggatcccggccgagtcgatgacgacaacatcgcctttctgggggtctctcttgtggacgacgtcgagctggcgaagctggtccgctctggggtgttggtcgaggggcaggctttcgccccagggaaatccgtggtgccgaaacctatcgacaatcggacggtggtattcaccgtcttttttgaggcagggctatggttcacctgcaacatgttgttgccggagatccttcgcctcttccaggtggaacttccacagctgagcccgtcggcgcttgttcgggtcgctatctttgactgggcgtgccggacttccgggtttgagcctaacgccgagctcttcagcgccatatttttcgccaccgtgaacttgaagacggtgattatcccggctggaacgaagaagacagtgttcgggagcgtgaactttaatgttcgtcccgagcggtccgatctctggccggtgaacgctgccatgtcgaagtgggaccgccattggatggctaggtggttctatcacaccatccccttcgaggctggcactgacttggcgaaagccctccgttgccggcgtggacggcgctatggaggcgcggttcgttctgctgcgaaaggtttgctcccgccttagctgccatgacttggtggaggaattctgtatgcttcgcatctttcccctctcccagtcatggcaagtcacagttgatcaaggcgaagaggttgacggtttgccgaacctggttcttcctgagggtacggacagtaagattgttctcttgctatacactgctgtgctttattatcttgccttgtctgactgttaacatagctacacactttacttttgcagcgttgaccctcgaccaggctgaaaatgaggcccgcaggatgatcggcgacgtgccggtcgtcgagtatagccagttgctaacacgacaagcggctgggcgggcgaaccgggtttacaacggcgaattgcctcctcgggcaaacccccacaaagctgacgacgatgcaggggcttcgcgaaagcgaatgcgcggacaagtgaagcttgcccctaggaagcgaagggttcctgcttcgccggactccgacgccgacgacgaggatgatgccgaagaacgcgacggcgaggaggaaggagaggagaaagaggaggccatggccgataaggccgcgaacgaggcgatcgaagaccgcgtcgacacccccgactacactcctaccccaagtcccggtcacaacgagaccggggtggagtcgaacagctccccccttcgacggaaggatttggaaggggcgaaggccctagttgcattctcctcgggcaaggcggcgaagggaggtccggtgcagaagatctctaaaaagaaaggactcgtcgacatcgcccacgttttcagcgacgacgaatcttctaacgggactccaacttcgcctgctggccgcagtttagacctttcgactgctcccctcactccactcggcgttgctggggcaggcggtaacgtcgccgccggggcttcagcctccgccgaacgaattgtgtcggctgcggcgagggttttcgggagccctctgcgtgagccagctatttcgccgctagtcaaggcgaaggggaagtgtgcggccgccgaagcatctgcctctgagtattcccttgcggcgccccacttcgcccctggtgatttcgagactcgggcggaccttattccctttgtggagggagtgagcaaccttgtcttgcccgccggcaccccgagcttgttcaccgaacttaatgagttcgacgaggggtgttccgccattaaaagcctggcagttcgggtatgccttttcttccttcttcgttttcctcttcgtccccccctttttttttacgtctgacaattaaccttttgttcttttggcccgctcctatctttcatctagattcttgcggcactgttcgacggagcgaaccgtacgggcccgttttgacggttttaagagccatcttcgggccaaggacgacgaaataagccgcaagaacttggaggtggaggccctggccaacaccctcaaggaggcgaaaactgaagtcaaacgccttcagtctgagctagataaggggaaagaggccagggccgaggttgatcgcctcaaggccgaactggagaaggagaaggcccattcggcggtgctgattgactactacaaccttactgagccgaagatggaggctcttcgcctgaaggctagtagggccgaagcgagcgccgcggaggagtcgcagcggttttcacaggagatggcgaagaccaccgaatccgcgagaacggcttgccaaacgctccgcctcacccttaccgacatgggcgcgaaagtgcggggggtccctgccgaggatgcatcagccttcgacttctccgagtggacccagcaggctgacggatcggtttcggactgcgccaccgcgtacggcgattgctgcgcgcgtgtatcggcggccttcaccttaggccttttgcaacagttcggctgcgagcacgtcgccgagttccctacctatgcgaagggggactaggagattagtgcgcagaacatctcgcctgctcttcgcgcgtggcgaaaacagttttggcagaaagatggctggtccgctgccaaagtgcgccttctggagcaactagcgaaggcggaggcggcagatcggggcgaaggagagggcgcggcaggcgaagaggttggaggcgatgcccaggatcacccagaggtgtgaggccctccgccctttccttagatttttgtagttttcctccctcttttgtgtttgcctggagaggcgaatgatgtacattcgtcaggctgtcgccaaaccttaaaaaaggctttttttgtacatttggaatatatgacacaatcttaattactttttgatgatcgaagtctttagcatatttgttatttcgctcatctcgtattatgccatacctcccccttcttacgtctattcttactatgtaagctgtgttttgctttttctgcactgtccatcagggggttcaccgaaagtcgtgcatccggcccccttccgggagctggcgaagtcaaaatgagaaatttgtggcagtgaagggtctgccgaaggtgcgatgtccatttcggcctgtttatcgtgaaatggagataaacggtcgcaactataaggttttcaaggttgccgactggctgcgggtgcaccccgggcgaaccttagaagattacgatcttgttcattctagacgtttgcaggatatggctcgcttttggcgaaaccatcagaagactgaatgtcaggaaacgatctttcagcgtcgttatagtttagtatgtgcttcaccccctactcctcttaaggttgtgtacgatattagtagtgatgacgaacctagttcgcctgatcattccttagggagggatagtgattatggggacgaacatgtaatttacttgtaaggtgaattgtatcgtgttgtgaaacttctattcttcgattatttttttcaaagttaataaagacgtgttttatttccttttcgctattgtttgcatcgtcacattttgtgcttttgttaggtcagaacatgccggcccctttgcatatatgagcgaaataggtgtactgacttttcagcttttcgtcgttcgttttcgatctgtagcgttctgtgccgaaagaaacgcttttgcttttatgctgatcggacgtaacgtcgttcggccatttaatttccgagacaagctgttgcggtttcaacgttcggcgagcgatgcttcggccgattcgtttcgcccccctggcctttttcgctgatcgagcatttgccttgggatttttccacaaattatcaatcacacgaaaaaaataaaaagaaggcggaggacacagagattttatactggttcgggcctccatggtggataatagccctacatccagttttttcttcttttttctctctttcttcttttttttttcttgccgaaaggctttcatagtgctgaagggcttacatagtgccgaagggcttacatgacagtatgtacatttttacaagttggtgatttgggtgccaccctttctagacatagaagcgcttgagagaggcggcattccaggaatggtcgaactcctcgccttcgagtgtcgctaggcgaaaagatcccgtcctggacttgtgtttgatgaggtattgtccttcccactttgattcaagcttgccaaccgctactggttcaccttcttccttaggacgagatgaccaggcatcagctccgtgggtcgaacttttttgttgtaagttgccgaagtgcttgtggcgtacttgtgtatgtgctcgagcgcttcgactcttactccttccaagagttcgagcgatacttcgcgtccctcttcacccccagagaacatcacccttggtgagttagcccctagctttgctggggtcattgcctcatcgccataaagaagcataaacgggctaaacttggttggtcttgtgggggtcgtccgaagggcccagagaaccgatagcaattcctctggccatttgcctttcgctgccccctcgagtcttttctttagtgcttctaggatcttgccatttgtacgttcagccgccccatttgactgcgggtgtgcgaccaacgcgaacctgatttccaggttaagcccttcgcacatttctctgaacttatcagagtcaaactgcttgccgttgtcagtaatgaactcttttggcacttcgaaacggcaaacaatgtttttccatacaaacttctgtactgctgccgaagttattgccccaaggggttcggcttcaatccatcgagagaaatattccacagctacaattgcgaatttatacccgtttcgcgccaccaggaacggcccaatgatgtccagtccccatctggcgaagggccatattggcgcaatgggctgcagatcatactggggcgcggcttggcttcggccatgacgctggcaacttttgcacttattgatttgctcaacacagactttcaacacaatgggccaataaactccttgtctaaatactttggaggccactgttcttgtagcctggtgcgcgccacatagcccctggtgtatctcctttgccatttcttcgccttcggcaaaagagatgcaacgaagtaagggttgaagtaccccggagcggtaaagctaacccgagaccatcttatacttcatggctctgagttgcaaacgcttcgcttctgcttcgtctaccggaagccagccagtttcaaggtgttttacaaatggggttcgccagtcatatgggtcttcgcccagtttctcctggttgattgccatgacttccgagctgtccgtgggcacacttggagcatgtaagacttcgaaaaagatgccaggcgaatgtgggccaccacaagcagcggatttcgccaaggcgtctacttccttgttctggtctctaggcaagtgttcgaccgttatgccggtgaagcatttttccatggaccgaacagcctccagatacctcttcattccctcttcttttgcctcgaaggatttgtcaacatggcctgctaccaacttggagtcagttcgaattagtaggcgccggactcccagtgctttcgcctttcttaggcccaggagaacggcttcttattctgctgcattgttggttgtgtcgatctgcagtcttgctgcgtaccgaatcggcacaccatttggcgaaaataggactgccgcaatgcctgctcccttgtgcgaccacgagccgtcagagcacatcacccagaattgttcggcgggctcggggtcgggggcaagtactggtgtccattcagctacgaagtcggctagcacttgagacttgatagcagagcatgcaacaaaatgtaagtcgaacggggatagctctgccgcccacttgctgagccagccagtgacttccttgcctcggagtatttcgcccaaggggtactgtgatggcactatgactttgtgggcctggaagtagtgcttaagcttgcgtgaagccatcactagggcgtaagcgagcttttccatttcaatgtaccttgtcttcgctccttgcagtgcttcggagacgaagtagaccggtttttgtccgaactctgtttcttggacgagggcagcactgactgccaccggcgaagctgctaagtataatagcagtttgcttcctggggttggccttatcagagctggtgggctttgcaagtattgctttagctcgtcgaatgctacttggcactctggtgtccaattaaactttcctgcgccccggagggtcttgaagaagggcaaacctctttcggctgcctttgagaggaatcgactgagtgccgcattcggccagcaagcttttgtacttcatgtacgcttgatggaggcttcatttgctggatagcatcgattttctcgggattcgcctcgatgcctctttcggaaacaaggaaacccaacaacttgcctgcgcggacgccgaaaacgcacttctccagattcagccttatgcctgctgtgcgcaagctgtcgaatgtctcctgcaggtcgatcgcatggtcgaaagccttgcggctttttacgacaatgtcgtcgacgtaagcttccacattccgccccaactgcttgccaaggaccttgtacaccagcctagcgaaagttgctcctgcgttccttaagccgaaaggcatcctgaggtgacaaaatgtgccgaatggagtgatgaaggatgttttggggacgtcgagcaggttcatgtgaatctagtggtaaccggaatatgcatctaggaaactcatgagcttgcatccagctgttgaatccacgagctggtcgattcgtggcaaggggaagtcgtctttcggacatgctttgttcaggtctatgaaatcgacacacatgcgccatttgccgtttgacttccgcaccagcactggattcaccaaccactccggatggtcaatctcttggataacccccaccctgagcaatttttgtacttcagctttcgccgcttcttggcgatcggcagacatcttacgcaacttctgttttcttggcttaatgtccggcttgaatgctaggtgatgcataatgagatccgccgggacaccccccacctcgtcagggcaccaggcaaagatatcgatgttttttttaagcacctgtaggatactctcaacttcttcttcgcccatgtcgccccccagtgatacgagctttgtggggtcggcatcatcaatctgcacttttgttatcttgccgtgaggggtgggctttggcgtgtgcttcggccgttcatgcggttcggtctcaacactgttcactgctctgttgattatggctagatcaccttttgaagcggccgaaggctgaagccccttgactactatcacccctgtcgggccgggcatcttgagcttgagataattgtggtgggaaatggcttcaaacttgttcagggttgcacggccgaagatggcgttgtagttgtacgggatgtcgacgacgtcgaatagtatttgctcttcgcgtctgttctccccctagccaaaggctatcagcaaaagtgcttggccaagaacttgaactgcttctccgccgaatccgcggagcgatgctggtgctggggtaagggcttgggtaggcaaccccatcttggcatatgcttcggcgaagataacatcggccgaactccctccgtcgaccaagattcgtcggacttcgaaaccagctatctcagctgagattaccaggggatcttgatgcgggaacataactccttctgcgtcttccggcctaaaagaaattagctggttcagatactgcggcgctccttcacccgccgaagtgatgctgtggaccatacggatctgcatcttcttctgccgtttggacaactggcttggcgggtcagcccttgtaatcacttggattacccttcgctgtacatcttggcgttgttcggctgggggtgtttgctcctgaactgcttcgcggggtgcttcaacagttgttccctgctgcggccttgggtcttgcgcgttgccacgttgcctaatgtttcggcattgctccgtggtgtgcgaagagcgtccgtgaaaggcgcagtagaggtcttttcggaccttcttgcgggctggctgctgatggttgctcgcttgctgggcatcgaactccttgcggagggcttgcacttcttcgaccgccatcacagctttgcccgcacggcctgttctaaactttctccaagttatgggggcttggccttgccttggcggctgtccttggatcgccggctgagactggcgaacgaagaggggaggtggttcggcaacttgaacttgtgcttgagcttgaacagcggcgacggaggctttgtcgtactcagcttgtatagcttgccgtcgcttggaatcctcctcgccccttgcgaacccgtcaatgatgcgaagtaggtgctcgagcgtctgaggctccatgttggcgatttttcttgtgagttcgccctcgagcagaccggccgaagcggcgtttataactgacgcctcggttatgtcttgaacttggcaccgggcttgcgagaagcgacgcatgtactcccttatcgactccccttgcctttggcgaatgccgagtaggtgttgttgcgtcttcggctcctcgtaggtgcctcgaaagttaaggaaaaaaacatcgcgcaattgctcccatgagtaaatgctattggctggtaaattgaaataccaagaacggccgatgccgtctagagcgagatgtattaccttcgctttggtagtttcgtcaccatgagccgcttcgatcgctgactcgtagatggagaggaactccttcgggtcagtttcgcctgaatagcgcgggacgggtgggaacttgaactggggtggaattggacgagtcttgattcccccacttagcggtagccccttttcgcctcccgccctgtttaccgcaccctgctgcgggtacggtgtggcgaagggcgaaatcgcagcttgtgcgcaaggttgggccatagcattcggctgcccggctccaactggaggtacttgctgagccgccatggatgggtcaaaaattggctgtgaccacgtcatggtagcttggattggtgcttggtttgttccgaagcctggagttggagcttgctgctgaacggttggcgcctgagcagcgttgacgaagtcgaactgcggtccttgattccacagcgaaactcccaggcccggctgaatcggtggcaaccaattaggcgcaccttgacttgtattcccctccgggtgggccgatggggttgtacttgaaatgcagtggggttggttgagttgctgaaggaaagcttggagttgcgcctgcagagccgaagccccttccaccattgtttgtggcgcttggccgggtggttgatggtgtacttgggcagcgactgcggccgattgctacccggcgaagtacattggcgcttgtgcgacttgaggtggaaagggctgggtcgtcacttgcggatggacttgaggcgggacataacctgccgaatactgaaggattggagccgacgtgaccttggtccgccttgccgcctcgtatgcttgttgttgttcttgcatttggcgaagcatgtcttggagccgtgccatgttttgtcgcatggcttctatgtcggcttcggcttgtgtttcggggtcagggctgacttgggcctgcacagcggcgagcgcagtcggggccgctgccggctgcgatggagcggcttggggcaccaccagttggcttgtcgaaaggatctccgccctggtctggagtgcccttgccaccgcagccgccttcgccacgtcggccgcgttcggcacttgcacagaggtggcgggggccgaaggcggttgtgatggcgcagatgtggaagcgaatggtcctcctccatcttcggccacgggcaccgaaggctctgctccctcctcggcggccatgtccggtgcggcgttgctttccttccgccttgcaaccttctccttcatgaccttcttcggtggcattccctctcagtggtttcgctcggaggtccccacggtcggcgccagctgttgtcggaatgacaactgcatacgtcgaaagacgtggttactcaacagtggtaggaagaagacgaagtgtattaaattttgagtttcccttcttttttctccccccattacatggccctaggggactattttatagccccattacaggttcttactactagggtttaggttatataggggaatttacatgattacccttatgaaagggacatttacaggggtacatgatgatataggggctcatgggcccctgatgggctgtctggcgatcgccggccctattgcccctaggcttgatgggctggaaaggcttttttggccctcgcggaggcgaacttgccaaggcgaagtcatcttcctttggcagatagtcttcaccttgcaccctttgcctgagacgcctctggcctggcaaggcactcgcacgactcttcgcctcacgccgttcttgctccacagtcttcgccatgggtttcggcagatttggtcgaagggcctcatgccatccgccaacacattagaagagccctatttggtaaactacattaacattagagagggacatataccacatttgggtccatcatgtgtggactaagaattcttaactactattcttagtatatctcatttagggtcattttttaaagagtaaagtgcacgggtggtccttaaacttgtagaggtgtgtcatctagatccctaaactctcaaaatgcatattcaagtcccagaacttgtcatagtgtgtcatctaagtcccaaatcgccacagccccttcaagttcctacgtggcactgatgtggcatgccacacgaacatgatatgtcatcattttgactgacaaataggactcatttaattttttttctttttttcttatctttttcttctctttcttttttcctttcttctcctttctctgtgacccgagcaaaagaaagggaaaaaataagaatgagaagaaaacaaaaaagaaaagaagaaaaaaaggacacgtcgcgtccatgtggcatgccacattggcgccacgtaggatcctagaggggctgtgttgatttgggacctagatgatacactttgacaagttctgggatctggatcagcattttgagagtttggggacctagatgacacaaccctacaagtttaaggaccgcctgtgcactttactcttttttaaaggcatcatttcatagaccctcttacgcacagagagtgacagatatttaaacaaatttggcccttaggagaaatttgagattatgcctattatcgattaatatcctgacaacagtatcatgaatacctaaggtcgttcatgtcaaggattcctaaacccacatatccaaaaaaaaaaaaaagccgaatgtttttttattggtccaagccaccctacatcatttttttttctaataggaactctccaccatattttgctttgtatatatgtggatgtgtacatgatacaagatatatggaggggaagctctagtctaaatctaagaaactgtctcgtcgggatcctcaaattagaaactagtagctagttgtgtcatgatcggcgacttggtttcttggcaccagttgtcttgtttaggcttgtgttggcttttcgccacttgggttggcttgaactgatctcaataggtttgccttgggtctgcctacaccaaggttcctaggttcccccttgtcctagaaggacatataacttgatttggatattaccttgagcagtactggttggccctaagtaggataatgtctttctttcctagctggaggactctttccatatcagctcaagactatccttatcttggaattgtttccatagaggagttagtcgtggtatttctggaatggtacgtgcatatatggtatcctatatttagtacaccaacaatggcataaaaagagggtttcactagaatgcaatctcttaactgggatcgatctcaacaccgagttggttgggctcgaatcgatcgtgccacactaacccatcagctcctccacattgcatcgccgcgccagcctgggcacccatatgatattttgatggacatatttcaacggctgcagctgtgcgctgcagcttggaccaccagcaaagggcgcggttgacagctcaatgcaagcacgactgaacatgggtttagattgatcctgcttagttcagcatagccccaagggcattttggtccctttactacgtgagaaagggaaaaaaacactaataggaatttgagaatggcattctagtgcgcatcctctatttgagaatggcatttttgcaaagcttaattgaggtctggaattttggcgaaacctgttttcgatgattgaataatttgaaaattttcccttgagggtaatagccctatgtcatgctcagtttgtatatacttgaacatatataatacaatatttggatggggagctcttgtctagacctaatagactatcttgctggggtcaacaatcagggtgttttcgtaaagctctcatggtcattaacgaaataaaattatatattcaaccgaaggacttcaacttctatgcaacacttgtccaacatgaatatcaaagaagacaacttctcttctctaatctgctttcttcttcatctgcttgattgctcggcaagggcgcaaggcataactagagcctaaccagcttggtcccgtggtgagcagcatcattctcatggacggatgccgggagagtgtgaggttgagactgtgctaagctgctgctattgattattgattatcagtaagggagattgaaagtaacagaagcaataactaaccattctaacagttcaccattagtcaccatctaattgtatcctagcaggcgttcctggaagtggcctgacattggcaggtgccaccacatccacggtggtcatgtctagctctgtcttgccgagcggaggaagaatatattgggggattagagagaagagagaggttgcctactttgatattcgtattggtcacatgtagcacaggggggcaaagcccttcagatgaaggaaggacttcagtcatgtataattttctattgtcattaactcaagttcttgtgagttgtttggcttgattggcttgactcacatggccttgtggcctctctatatttctatcattgtgcttccccatatttgttttgtttcataaattaatttgttcacgtcacattatatacagttgtatagcattacattttcccatagtagtgctgtcaaagttacgcgatttccctgtatccaccaatagacttcacagataacaatctaaaacaggttgtcaatactagtaccaccaaaataagcacgaaataaatatattttgataagtggaaataaatccagcaaaatgccaggttgtactttgtttctactatagctcctagtgggaacgcgttcgtccaactctcctatatatcacaacaccatggacatcaaattcgcactaatcctcccccttcatcccgtgtcacaaagccacaaagaagtttagcaggtcctccatggcagcctctctgccactgtcagctgccatcgttggagccgaagagtcggttgacaaggaggtcttggagatggagtacctctttgagaagtttttgatgccaagtgacttgtgcagcaatactgaatggcttgggatcccagaagaacatgttaggaaatttggcatgatgttggaggacagggacggttactccgtcattttctttcaggacggtgtggtgcctgggaagttgtggtgctttaggtactggaaaagcaatggagtccatggcttgaccaagggctggaggtgctttgttagggagaagggcctcaaagccggagacaccatctccttcttccgaggatctgcatgtggccgtctcttcatctgctgcaggttaggcacccatgcaacctttgcgtcatcctccaccttgcatcatggcttttctatgcccccaccacctgcccgcccgctggtgggtcttcaatctggcatgttggcaagagatgtcccatcattaggacaagctaggttgcatgatggaaatcaagatggaggcggtgcaccatcaagacatgttccatcctcaggacgacgtgtggaggcacagctatcacgtgtgtcgtcgcgccgtcaacgccgtactatgaagcactcgataccagagcccacgatagagacgccaccaattcttgagtcgatgttcctcatagccgcaccaccggcagtgaagtgcttacggctttttggcgtcaacatctatgtgttgcctgtgtcctctagtggccagccaaaacaagaatccagcccataataccaggcaccataattatggacaccccattgaagaggatcagagcgtgttggaggcgacaaatgttcctcaattgtatcgtttggttctacatcattcttagatcattgtggtttcaattattgtaattcttagtttgttatgattggttttctattggcaattattgtctttttggcagttattttagcataagaaattattttgtaccatcttcatttattaatttcttttgtttcattcccatcatgtttggggtatttgaatactttaacttccctactatccattttcttaatatataaaaagtaatcctatcattaatcatagtaattaagcaatatcgggccaattactgtattccttttttggcataatattcaacaaaatgtatggttgcttttcatatttctacattattgcaaattggatcaattcatcattgctccttatgatttaatgttgtttgatatttgtgcacacagatacaaagtgtatgactacatggtggtggcttccccaaactagataacaatatataaatctatttgaactccaacttcttgtcccgtggtacccttgcctatcccaccaagcgatgccgcttaactctttctagtaatcacgcactttctaactactacaagaacagaaccatgggtcactaccacaaaacatctaaggtttccattttacaccacctataaacatacttataaacataaaaggaaatcaactgtttataattaggggtacaacctatcgtccaaataaagaatagtcaagcgttttggtcggttccctaagaactatttcatcaatggaaaaatgaagtgtgaggtgattcaatatcaggtgaactgctggtcaagaggagtggaatgacatgtgggatcacaaatatggaatgaggcaacaacgctggatggtatggtgtgttcgccatacaaaaacgatgtctaaactgtattatatgacaaaaaaaaaacttggtctttaagaattatcataccgttgggttcattccattcaatgtcaaatggaaaattactcaatagctcatatggtttaatgccaaaaaaaaattggcaggctgttggtatttcttacgatcacagataaatccgcaagcgcacgaaacaccgttgtagtacttccccttagagtattccaaccgtatcgaacacgaggaacatgtgtgtattatctactgccaagattcgattgaaggacaacaacccaagataaattagctagagaggattcctatgtcttttagttagttacttaagttacttaaaggtaagactctaacaaatattcgggaaccggccctcccctggtctactaggataagtccgggcttgagctctatgatgtacctgaacgtggatgaatacagaggataaacttggctgtcaccacctgccccctacctcactttccgtgggcacacaacaaacgaaggtaatttctaacctagacaccacacctaagttattaattactactctagccttgcacgggaacttccttctttatccagagttctaatactagagcactcaagtgcacactaagcgatgaacccgcaccgataaaaatgtatcacttaaataaactaattaaataacataaagaaactcgaatacttaattaaataatggaagcatccgacaaggtacaagcgatagagcaaaggcgacaatcccgtcatctatcaaattgccaaaatttcagttgtcacgtcatctatcagatgggccatactagtatcagaaatttcctcagaaaactatgacaccacattatccattgtttaccttttattaccacaggattgtccattagttactctctctgttcctttatgttaatcaccaagcaatattcatattcaaacttccaccattcgtcttctttacagaaaaaatctaaatacttaaatagaccaaattaatacgacttaactagccatatagcagccttgtacttaggctgagtttgaaggagtatttgggcggaattttgtcctcatttaccttgagcacactttcaaaaatactaaatggtgtttttcatataaaaattgtctatataaaagtttgtttaagaaattatattaatacattttccaagtttgcatgtcacagctagcatttccattggcacgtctagcatgagaaggagcttaatcggggggaggtgcgcagtaaattcgccacattcaacagaaataggcaaatagctacgccatcaagagaatccgaaattaaacttctatgatcgtctggcatttgtgttctccttatttacgccctgccttaaaataattttcatgcatatcacgtacgctatctacagttgtccggcattaaggttttccacggtagtagtccaaaatcacgcatttttcctggagtcctgaagaggattatttacagttgacaatcgtgcatatgccaatgtgaatgactagtgctgccaaaataagagagaaatgaacatgtcctgataaataagtagtagataataagccagcagtaatctcacgattactagctccagcaaaatgccaggcttgcactccatatttgcactgtagcctccagtgggaatgcatttcattcctaaaccccaattaaaaaaaaaaaaaaaaggtgcttggacctcccctatatatgtgcccgtaccatgggcctcaaacacttgacctgctccttcgatcgtccaatcctacgaaaccacagagagaatctcagagcggagtactccgatccatggcggcttctccgccactgcctacttccatcgatggtggtcaagtgctagatgacatggaggtcgtggagatgaagtacctgtttggcaaggtcctgatgccaagcgacgtgtcctgggacaccgaacagctcgtgatcccggacgagcacgtcgggaaactactggacatggtggtgatgaaccggccggaagggggcttcttcgtcgtcgtcgtcgaggatggcgaggtgactgggaagctgtggcttttcaggtactggaaacgcgacgacgtccactgcctcaccaagggctggggttgctacgccagggagaagggcctcagagccggagacaccgtctccttcttccacagcaccgcgtgcggtcgcttcttcatctgctgcaggtgcacctgcatgagtttcttgtcactacccacaacatcgcatcgcattcacggctcgtctgtactgccgcaaccgcgggctgcccaggaggcgcaccatccattctcaggacacgccacattgtgtctcggcaacaaagctagtgatcacagcgcgccggcaaggcatgccactgcctccttagggtgtgcggcggcgcagcctccgcaggtgccgccgacgccgacgccgcgtcgtcgacggcgcagtatgatggttcacccagaaccaccggagcacacaacggacggcatgcctgtgattctcgagtcgatggcactcgtatccaccccgcccgtggcgaaacgcgtgcgcctttttggagtctacatcgacgttcctccactgcgcccaggcggcgaggcaacacaagatttcaacccatgatgatggcgtgccatccgtggacaggaacgccctcaagaggaggcgagctgctgcggacaattaacgcctcctgatcgaattgtatcgtttagattgcaagttctgcgtcattctcgcggctttgattattgaattcttaatttgttaggactttggctcctgaacaattctttggtgaatattatgttttttggcaacatgtatggcagcagaaatgtttttcatcatcttttatattaaaattttgtttcattcttccatgcaggtcaatggtgttcaaatactttaactttcccaatttccatttccaaatcagtagcttctttttaaaaaaaaaaactaaaacactaatttcttggtcatataagtataatcctttcatgaaacccgataattattacaattagctgcccaattagtgcattccgttcgagatatgaacaaattcaaggttttcttttcacatttctacattattgcaattgaatcgattcatacagacataatgttgttcggtattcgttcatatacacacaaagacgatgttttcctgtatatatgtcatggtatttccattccggatacatggtgatgggtcccccacgtaacagtgaatctagctagtacaactccaagtgataaggcaccatttcattcgacttagctgatctactctcttgttttcagtttcttgtgagcacactcttcgaagtgctaaatgttgtatttgttttaaaaactttcttttgtagaagtttctttctaaaaaaataaaataaaatatttatttaaatttataatacttaattaatcatgtactaaggatatgctttgtttcacgtgtggctgattaggcagcctatataactctgccaaactcgacctaatctacttgtcttgcttgtcccgtgaagagaatctctctagctctttctaattcatatactcctcccgtcctaaaatataataacttttagccattaaaatttttcccaaaatataataatttctccactaacattctctttctaaccaatcacaaccctccaccattcacttttcctaactacctccactactcaaccaatcacaaccctctatcattcatttctacctactttcttgataaccgtgtccacctctaaaaatacttatattatggaacggaggaacgtagtagtatttatgcccttcctaatttgtggtgatgaaggccatgggcataggcggccctaccagatcaaccggccttgtgactcgtgccactggaagacaaccattaaagaggagcagatgggcaaccagccatccatcttgtaggtgcagccaatgtgaacgtgtcccgatagcccagcagcccattaggccccatctacagttctacactctctccaccttatctctagtcttcctagcgttatattgagcgcgaactacggaatgagcggcccttcggctttggcgatgggagcaggagtgggctacacgttgacgatggcatcgcaacgacggcctctccccggtgagctccctccgctctccctccagtgcgaagtctagatcgaggtcagcttcgattccttgcctcctctgccactggcgcaaccccgcccggtcggcctccacccactccccttcgtcttgctttgcccccgccaccaccagctatcgatcctacaactccggcggcgccaccgccgcctcgccacctgcctttgtccgcctcccaccaacggttcatcacctcataggccatccccctaaacccgatgccccacttcccccttcccattgccaccctcctctcacttgatcaagacatggtcccgatctcccggtaggtatcaataagtcgattgaggataactcaacgcgggtgatctaaaggctccgacctgaattattgaacccctcataatcactacaccactgctctgttggttatcaattgtgccgaaacacattagaacccaccaagaaggctatttcctagcgaatcaatagtacaagcaagagggttgcagaagtaatctgaatattacaaatatacgatgaatctcccaagtttgtgttccacaaaccgaactagtggcaaaattggatttcgcaaaataatgtcagcaaaatccgacatgagaacggctattgaataaatatgattaaaaacatcctagggttagccttaagtccaaaaattgtttcgaactagataaggtacgtggattgcgtttacaattctggacaactcggaaggaattttgacatgaggcaaataatgtatgaaagtggactcataagttctataacaaatacacataggctctaagagaacttctggatcagcagatatgtatgtttaaagttgatattgtcagaagacccgaactcacgaacaaaatttatctcttgtctattatagttaaaaaatgatgatgaagcatgagaggagaatagggcaaggcctgatgttggtccccgatccacctcagtgaccatgcgaacattccctgcacatgttccactttgcttcacccatacgagtacttctgcaacacacaactcaatgtgtagcatccttcgttcaaatgcatgtctaccataataaacatgcaccttgagttcattgatgatgtgtaacataaatatggtcatatccgagcagatgatgtattgatcacaaccctatcctcgaatccaaacccgagcgcttatcgtgccaccatcggaatgtatttgcgagaatcccatcacgcacatgttcacaaattaagttttacatcatgtcgtactttactcttgatgcttttctataaataccctgctagagtggaggaaatcgtgatgatgtgaaccaccaacttgtccatccactggcaccgatcaatgatcatctactagtcagtttgaaggatgccaactgatgaaacccgttacaaaagaaaaaaagaaagaccataattttcaaaaaaaaaaaacaaagaaagaccatgctcagccttgggtacctgatctaaaggaaaaattaggcgcccattatccattgttgggcacacgctctctgctaggagcatgtttggttgcttgactacactcagcctagtgcaggcaactaaacaggcatgccccctctttgtttctctatgctacaatttaaaaggacactacttgtgtagttagctagtttctcatcttgtatcttcctcactttaaatggtttttctcccaaaccacctatcctatttacgatctaattataataaatatttgttttgatttaatatttataataagatcaaacacgactatattctgataaaaaatatatgttttaactgttaaaatttgatgcttcatttataagaaacaaatgttttaactagaatttaattatgttgcacatttaagttttttgttacaagaattttttcaatgttgcacatggtattgttttaatgtgtcatttaatgtttacaaatataacagatttgtatttttttaattgtttcagcaaatagattggaatgtatcaatatttacaactccatgtttcacgtatgatataaaaaaatgtttcaattaggaatatattatcacatatatttttttcatcagaaatataatcatgtaaaatcttgttgtaaaggtttagttacaatgaattcaacggtgcaattagattgtatatcgaataaattatttaggagaaaaaattatttaaaatttgataaagaaagttgttttttgttgagagaaaattgatgttgtgtagcacatcatgcatggaaaggttaaggtaacaatgagatgtttttttcttcgatatgttaaaatcgggcagggtactaagacaaattcatccaagaaccacatttggcacttttatcaggttagtatatgcccttcgatttattcgcagaaagaagggcttactggttcaaaccaaaatataagttaaaaggaccaatatccttctttgcttatatgaattgcagtcaagtaccgtagcagagattttctttacagtaaacaccacaatattacagcagcaaaatatggatttccaaattctttgctaggacaattagtttggtgctacaacaaaaactgctccagtagcgcaagctcgggagaacgagtaaatataacttgttatataacatacaaaaactgtataagtaattaaagaagcgcatatgaaccaacaatttaaagtctcaaggcagcaattgcttcaggcctgaagtcaatccgaagccctaacaccctcctaacctctgctggtgtcaaaagccatgtcagatgcccggcattgtcaccccagaaatccagtatctccgatacccgctcaaaattcagaattgttgacatctgggaaagtcttgagaacttgtctcggactggtctctgtgacatttccgagaaatggttgatcagggagcgtacctccttgtcgagctggagcccaccaagctggctgaacctcttctgcatcattatcacttcaagcctcttgacaatgaagtcgatgattaagtgcacaaaggaatcatagttgtttgatgtcatcacgggctggagccatgcaacattagtattaactgtaaggagaagcttctgcacccatggatcattcacctcattttctccatattcggcatcatccagctcataactgacagtggcaacagtgtccagaacaggacgaacacggggtgccacagatgccactaaatgctccagtccagaatgaaggatcttcttgaaggaagcactgatctcacctagctcagataaacaggatttgattttctctcggtcagcaggagcatgaaaagcctgttgaacaacaggaatagtcagtacagctgggttgtcaacacgaaaatactatgctacgaacaaagtgattttatcagataagagtgaaactattagttgtttttggtgtaattaaggtattttgaaagctcattgtaaagttttaatttgccagcaggtttctcccacattcctaattcatttttgacatgcgcatggtctccaatacatacatttgacaattaaactttctcaatgaatgttatcagcattataatatctacaaaattcctctttcaaatataatatggttggatttatcatgtgacatgtctgtgtgttcctcaccttatcatgtctattttgcagtaaaaccatgtgtcactaacttatttcagtcaatcaaatgcactacaattcagggttgtaagcacaaatgaaccaactaggtaacaagtaacatggagtccctaagtccatcgcaaacacagtaataagatgtgtgcatgatttatgttccatacttatttcatagctaagaaatttagaacgaagcactcagctagtcagcttccaatcaggtacgcagcatcccagctccacaaccccaacagggcagtcaaattcctccatggaatgaagcagctggaggtagccaagttttactagggagttcagtgcttcaatgaggcagtagcaatgcacttaaaatattgttggtgacgactggccacaagaccacgctgtggcaggccttgtgcaatgggtgtcaaaaatgttagacatcaaaacatgtttgttgctacaaatatgttatccttttgcaatttgttctctaaagtgttgcaattgcaactattccttctcaatgatacaatgttgcccagtagatattagctagactttttacatttgttgaaccaagggggcattttgctgcaattttgttatataaatgttgccgttcaatgatttagaggcacacagtaggatgcctaagactaaatcactcaggggacgatgcgacaggaacaacttccttcagacatttgtcaagtccttctagttccaatgtaggaaaaaagctaagaggaatcaaggtcaaccatgagcatcggatttaatcttctggaaataaaactatgactacatttcctacccatctgcaggcttgccaaaaaaaattactaccattttttccctttatttcatggttgtgcagaaagatgcactttccggtgacagcaggtcatttgttttcaggaagcagcagcatgtatttgacaaatctcttcaaaggcagcaaccattctgctaccctccaagcatgcaatcatcacatccaaatatattcaactagcttagggggtcactggtggaaacctgggagcgttggtttgcaaatgcatctgtatgacaacatgcatgcaacatttgatcgttttgggtcaatggtgagtgggtaagagcacagatacagttcttgctcttgaaaaggctccttagagacgtactagttcaaatagctgcatgctaacattgattttttgtggatgagtgagcacaatcactacaaaacattgtgcaggtgtgacagatgcagcaaactgtttcaatttccttagcaaaagttagcctggtaaagtgaacattataatttgacagatattatgtactagacaacaatgttgatcagatacataaaaataggttacaaattcaagtgaaccgtggagggagcgaacaaaatgaactgttattataatgaaaaagaaaaggtgagattgcacaatttgtagcttttatctccatccaacaggagatagatttagcaaatagcagtggaccgttattgaaaacaaattgcaccataattgtaggaagttcctaaagatttatctacaggttacagcatagctaaatatatcctaactaagagactatttattcaaggaagacacatataacccttttacatatgtgatgctgttttggtgccactcataaggtgtgacaacatgatattatcaactactttctagaggcttctttcactaaacaaattacaagaactggacaaaagcaccgatatcttaaattgtaataactgagagactacttgattaatcatgatatcttaaatcccaaatgaatgcaagttatgaagagaagaaaaggttaacactgacctctgaacagagctcctcaatctcatgacggagcttcaggacatactctgagctaacatccatgttgttcagcgcagttgcaatctcctcaccagtcttctgaacaccaacaccaccaagaaagagctttgcacccaagtttggttccctcatcctccattgcagtgcttcctggtactcattgctcagtaggctcgccgccccaccaagcactgcaaaaattgagtttatacttgcagtggatgctgctcttcggcagcaactctgcagtacgaagaacacatcatccaccattgatgttgtgagaccatcaggcactggttcatcaatccggatggctttccttacattctcaaccatgaagaattcttccaggatcacataaaacccagttaaatcctgcaccattttattgaagctaccattccggaaggacttcatcgcttgtggtcccagctcaggtttgacatctcgcaatccacgaatcttattcaccataaattcagtatagtcttcaccaagctgtgtcagtgacagaatctcctcaagatagagctcgacctccctggggtcaggcccttcattgccccctgcagcattggccacagaactcaccacagagaggaggttcttggtatatgagtttatatccgaggcaagacgtgcaagtttcctgtaatcagcatatcggcgcagtatctgtgtgccccgggaatcacactcctcctgcagctcaatgatggcataggcaacaccatcctcacctctgagttcacgaagcacagcatcattctcctcaacggccaggacaatgtccttgaagagacgggtaaggcagccaacaaaatcaggccgctctgaagtaggctgtgttgcagaggttaactcagctaggtgctcgaagtcggcacgagcgcgcagggcgacgaccttcttgaggtaggcgacatagacctgcaatccctcatcagcgagagcgaggagagggaagaggcggacgaggcggagaacggcgggatggttcagcgcgtccacagcatccgccagccttcggcgcgcgagcccctccagcctgcgcttgatgtccagaaggtcgcggcggaggtcgtcatcggtggggaaccgggcgtcgatggcgaggaagtcgtgcgcggcggtggcagcggccgtgagatcatccgccgccagagcacggcgtgcggcgtcgagcgcgcgggacctatcgagcgccgcctcggcgcgcgcgagggcggcctccgccctggagtgcgcggcgtcgaggtggcgcacgcgggaggagagcgcctcggccagcgcggcggtggaggaggaggagtccctgagcgcggcggcgtcggaggcggcgagcgagaggagcggcggggcggagcggagaagggaggcggcggcgcggtcgaggtcggggcggcgggcgaggagcgcgtcgaggcgggcgtcgagggcgcgctggtaggcgacgcactcgtggaggaggcgggtggcggcgccggcgtcggtgagggcgcggagggcgacgacggaggccgggtcgccgaagtcgagggacggggcggtgtcggtggaggcgtcggggggcagcgcggcatcggggcgtggggagcgcgggatgggcaaggggtaggacgccacagccatgccggccagccgcggcgccggggatcgccgagatctcggtgggtaattcgcgggatctgggtgctctcctctcggtgctctctactgtggcctgcctgtgggaggcctaggggggtagtttgccgggctgcgggtgaagggcatttctgcggggaaaattaatttgctttcgaatgtttcattgttaagcaaactgtttttatttaaatctaggttgcgagctattatattccacattgtgagagcatctctagcaggggtactaaacacagcccctaaagaaattttgagaggtaagacaaaaaaatttagatccaacaaagcccctactaaaggccctaaaataggaaggcctccaaattatcccctcaagcccccaggcctacgggccttctccctggcccctattccacgcgcgggagagaaatcccacagccgccgagccgcgcgctctttttttttcgcgcgaaaacttctgctagcgccgccgctaaatcctctcttccgcatgcgcaccgcctggatcagcgccgtcctctccaactggccaactccttcctcgccgcactcctccctggcggatcatctccctggccggcaacctcctccctggcggcctcctgccctaccggccacctccctgcccggcggcctcctccctggcgccctccctctcggctgccagcccgcccgacgccctcctccccggcagaccacctccacgtcctgcgcccttctccccgtccgacaatagtcgaaggtattttttttctttttccaattgatttatggatgcaattagataagacttgttctttggtgagatttagcttgccagggcgataaaatggatgtgtgtatttagaaatctatggttggagcaagtattttaatctgttcacttgttcagagataagcatgcaaaaatttatgttcttttcagatattagtaggggaaattaattggtgagaaagaatctggtggtgatcactttgttgtattttagtgatctaaaaaaaatcgataataccacaactcagtaggcagggggaatgataaattgggtcgagctaatatggttttgggcaaagctccttccctttctattactgaaaaaatgaatagttcttaatgcactctgtaaataaatagttcttccgtgcactgaaatatctagactacttacattgcacctgttctgcaacagtgcatatgcatgactttaagacactgtgccacctgaaatcttgtgatcgtattctagttatatgcaggttcttcgagcaggctgttacaaaaagagaaaaaaaaaagctgctctgggtgctatatggttttctttttaattcaattttgtagagctctaccataatctgttctaaattctaatgattggaaaaatttgctaccattatgcattctaccaacatatattagctagtatctgccatttttcctgagattgattagagaagttgttaatttatctacttattgcagtgactagattgtgatggcaagtgaatgtgattcctttgtgcgcacgatgtccgaagagacccatgttgaggcatattccttgccaatgcaaaatgaagaccttcatacttcaacaaatggtgcaaaaggaagagccaaaagatcaagcaactttaatcgtaaggaggacattcaactatgcatttcatggcaaagcattagctcggatcctattattggcaatgagcaaccagggaaggcatattggcaaaggattgcagagcactaccatgctaaccgtgattttgagtctgataggaatacattctctcttgagcaccgttggggtaacattcagaaggaagtaagcaagtttcagggctgctacgaacaaattgagcgtcgacatccaagtggcataccacatcaagagcttgtaagttaaattttttattcattattattaataacaatcttgtatgtatgtgaactagcacttgaattttgctataggttcttgaagccgaggcattgtactcatccaatgcaccaaagaatagggcatttcagtttaatcattgttggctcaagttgaggaattctccaaagtttcaaactctaaaatcccacaagaggccaaggtctaggaagtcttcgaccccaattgagagtgctggtgaagaagatgaagaaggtgatgatgctaggaagagtacaactcctgatttatcacagccaagtgctaaaaagagaccaatgggtaggaaggaagcaaaggagaagttgaagaatggaggagaagatggaccatacaaggaggcgatgaaagatttgcttgacgccaaagagaaagaagctaaagtgaaagaagagagatggaaggaaactaaggagattcaagagcacaagctcttatttgctgagcgtaagttagtgtgggatcaagaacagaagatcatgttttgtgatgtttccaccttggaaccagatgtgagaacatatgtgttggctatgagggcacaaattgcagcttcaaaggtggctgccctcaatggtggatttgatggtagtagtggctttggaggtgagtttggtggtggtaattgagaagtttgagcacttcgatggaataagttggatcatattggatgatccacatgtcctttgctagtaggatatgtcatttccacgattggttcttggagtccttttgtgttaatttttgcaattatctaagtgtcatttgctagtaggatatatattacttttagatttgttatttttatgatcgaaccattcattctttcttgtaggatgtgttatttttaaattatataatgcatctccgcaaaataaaaataatgcatcactgggttcacatagcatattgtggtgatatggagacagacaatgacatgttggtgagcaatttttgttttcattggtgaattataaatcttggttgcgtgttgttgtatatggcattgtgcctacaccatatttacatgtttgaaaattttgattttcgatttgaattgtggtgtttgaaattgtaaatttaactatggttaaattatgcgcgttagaaatatttatgtttaattattgtggtgttaaacatagtgtaaaaagggattgcatgctaaaataaaagagaaacaatagtaggggctaagaaataggggctattgctagagttggaggtattttttgggtccttgggagatgggggcagccctcatttaacttttaggggctttaaaataaggcctattgctggagatgctctaatgttatgaatatagaactaaccatctacgactccctgttaggatgtatgagtaatttttaaggcctcctttaaattatatgaataaagaaagcaaagaaatagaaaaaacgcagtattctaactagaatagaagtgttaaactgatgattgcaaaacatataaaaacacaggaatgaccgcttgattggaccgtaggaaaaacataagaatcggatgagagagatacactcaaagtaaattttccaagagctttgagctcttgctgagtttctttcaaaatctctataggattattcattccataggaatttcaaatgattagaaatgattcaatccgttaattaaaaggcatttatagaaatttttcctatagaattgaaatcatcccaaaattcctatatatttcctccaaatcaaagggaccctaagtgagtaccatttacaaccaactccctctatttcatattataagtcgtttgacctttttcttagtcaaaattctttagctttgaccaaatttataggaaacaaattagcaacatccacgacatgaaattaattttattaaatttaatattaaatatattttgataatatgtttgttttgtattggaaatattagtatgtttttctacaaacttggttaaactttaagaagtttgactaagaataaaatcaaacggcttataatacgaaacgaagggggtactcaaataaaaacagtttgcttaacacttactccctccatcccataaaaaccaacctataattgaatgggacattattgacggttattaagtactagtttcaaccgccaactagcacaactaataaagggaaccttagggcctgtttgggggagcttcttgctgctgcaacttctatcaaaatcagaagctcccccaaacagtccagcttttggtccagattctgagaagctgtagttgtagaatctagaaaatgaactagaatccagaagctggaaaatccagcttttccaaattctcagaagctgactaccaaccagctgcttctcagaatcttaagctcccccaaataggcccttagcatgtcttacacgcataccaataataaataatgtagttgtattaggattggaaaattaatgtggatgcatgaattatacgccaaagtgaaggagaaattaagccggcatgcaaagaaaaacacctccagtgaatcacgtgcaaccacacggatttaggggccctcaagtcagctcaaaccgactcaaagtgggaccaaacacccgggtaccttcataggggcccacatgtcagtccctcaccaaagttggtgagcagagtggttgaatgggttcggccgaaccaatcttggtgcacctgacacccatcttccacgtggcgactcctcagcgctccccaatgacggttatgcgcagttagcggcccctaactgccatacaaccgtcattacaaggctataaatagagcttctctccctcacatgcaacacacacctcatggagcaattcactctttcgctttatattctctatagtttttagtaggaattaagcttaggagtttcgatcctatagtcttcttggagttctggatatgtctctagtactctcttctttgtgtaagattatagtcgaattaatagtattatattctttatttatatatgctcatattttattttatataattctttattgagtatatttcctatgagtagtatatactttgtatatttgtttcatcctaggctagttgatccatgctaaagtaacggtccaatgaccttcataggttgctctagctctaacttgttcatcccctagggaagatagtgatattgtttactagcataaacgtggtgtttaggctagataaatatcgttggatgtgggtgtatcccacggaaagtgaggtaggcggcaagtggtgatagccatgtccatcctttgtattcctccatgttcgggtatgacataagagtgcataaatgccataactacgttggcaaactagcagtgagtggtttctctatagtacctgggcgcctggaactatatcctacattgtaagtatgtatatgttaagtatatgcgacacgattagttttgaagtacaattgtatcgtaatatccttaggctattcctactagacaatctttagagatgaatctcttgtgtgtgtacctatcaaaccttatcataacccctgtctagattgcagaaatataaatacaatacccttgggaatactcatgggtgaaatgctacaacgatatctgtgcacttgcggatttatctgtgataataagaaatatcaatagacatatctagtacaacggatatggacatactcctgtccagattcgctgtactaaatatgtcccatccaatactaggttggtttttttatgggatggagggagtatattaatttgtagtggtatacccacaaagtaaaatttataactctaacatgtaatatattatagtacgctacttgcacatgaattataacacaagttagataacataatctaatcttaggatgtgtttggttggaaggatataattaaataaaaatgtccatgcaacttttatatgtgtttggtaagagtgaatgggatggtcaggagagctaaagagctaaaattggattattctatgaagatgttggaattcattcgataaaattgactcgatatccacgtcctagggtctgtttggcacagctccagctctacctctcctagatcccagccaaacagtttcaactccacctaaaatgggagcggagctaggtggagcgctctcataaaatgaggctgttatacaactccaccctagacttaactcctgaaactaaatttaggagttagagttctaccaacaggcccctaattttgattattaataatggggcaattgcaaatttaccactactttgaatcattattgcaaaactgccactagaaaattgcaaaaatgccactagaactgtcattcgagtggtatccttgcaatattcaaaaaaccggtggcaaatttgcaaatgccccattaataattgattaataataagtattacatgttgttagttaataattaacttgtgaaaattaatgtcgattagacataattagtcaattttattattaactagtatagattatggcaagaataattataattaacatagaataattagtagtttatgttttcattcaatccgtcctcttctaaaaaaatgaatggccatatccaccctatcaaaagaaaaaaaagattactatatcccttataatatggatgcccatatcctatctacaatcttgatcatgaaccaaagacacccttttatactctttgcatttcaaaatatggttctctaatgtttgttgcaagaaatagatatgtaaattttgtgaacaatgttactatcactttgtcggatgaagaaatgaccaaaataaaagttgtatgtcttgatgagttctacagcttttatgttcatgactttttcagctaaaattatttactacaaaatatcatttgaagttttgaaattcaaattttagttgataaaacaaattcacaagaaaaaatgaccaaaataatagcagaaaaaacacaataaaatgatagagcatgattttagaaacatttaggaaaaagaatcatccaatttagagttcatatgagtgagataaactaatttcaaattttaaaattttattttcgcatacggctccttaatacacccgtatggaaaaattgatttttctatgtgggctcttaagtggtccgcatgcaaaaatgagcttattttggcgtcttaaggagtcgtatgcgaaaacaccgacgcagcaagttgtggtccgtttgcaaaaatcatagggtctcatacacaaaaatcttttgtgtagtagtgatgggtttttatattccgattaatattcatcaccgtattcgtttcgcttattcgcttcgtatttctattcgataatattcgatttcgttttcatatccgggttttcgattccgaaaaaaattatgaaaacgagtatggtaaagctagtttttgaccgtattcaatccattttcatccctatatattatgttatattattacttgcatgtggcagcccttagtttagttgagtttgtttcctctttttgcagcaattcaatttagaaactcctgtcttttagtcaagccacatacgcgtaaagcaaatcctaaactccctcctatcctaccaaaactttagtttcatgcttcgcactaacatgatatcattttttgaacttatctgacatgacaacaatatttccatcactcttactgtaggctaacaaaaaatgcactttacaaagtttaaaaagggatatctatgtattggacaacccaccaaccacataaaaccaaattaaagatgctccacatgtactttattgcatcatcttgctaaaagaaatagatatacctcatgactctaattaaacacgtcattctgcatagatagataaggtaatattttccttttttatatattctcctttgttttgggtatataaaccctcctcctcctacatagctagtcatcagtagagagaagctagcaggtgactaccatggcatccatgtctaccattgtaccactatgtctaagcctcctcctcttctttcaagtatcgatcgcacaattttcatttggtggaggcccactatatagctcacgtgggtttaggggtgactcagtgagccaacaccaatgtcgttttgagcatctcgccgctctaaaggtgactcaccgagacagatctgaagccgactttattgagtactacaacaccgaggtacgcaacgagttccgttgtgctggagtgagtgtgaggcgcttggtcattgagagtaggggcttggctctgcctgtgtatgccaatgctcacaagcttctctacatcatccaaggtctgtataccatagtccaacatattatgtatgtacacacgactagttgttttcgaactacattattgttcacaacatgtgaggttttttaattgtgtgagtacatgttgtaggtcatggagtgtttgggatggcactaccaggctgcccggagacatttcaatcggtgcagtatgcatttgagcagtctagcacccaaaaattgagcgatgagcaccagcagcttcacaagttccgccaaggggatgtcattgcagtgccagctggagtggcccattggttgtacaacaacggtgattctcctatggttgcttttttggtcatcgactttggaaacaatgctaaccagcttgatccaataccaagggtatgcccatatatacatctcacaagcataattaatactattccatatttctaactttagtttaatgagtggtaccactaatacatattatataatgcaactcaatatattgagtaggaatttttcttggccggaaagcctacgagctggcagcaagagcagtattcgtaccaggctgaacaacaaagcgacaatcaaaacatctttgctggattcaatccagatttacttggtgaggccctaggcgtgagtaggcaaaccgccatgaggctccaagaactgaatgaccaaagaggggtgattatcagagttgcgcaaggtctccaagcactacatccttctttccaaactgagcaggtccaagaggaacagtcccaagaacagcaacagcaaccaacctggtcaggcagaggttgtgcgcaaaacaatggtctagacgagattatgtgtgcttttaagctgagcaagaacatcaataatgcacaatccaccgacatcttcaacccccgcggtggaaggatcacaagggccaatagctagaattttccagttctcaacatcatccagatgagtgccacaagaactgtgctccagagtgtgagtataaaccatgacaaagttaataagatttttatgcacaaaataatgtaggcatagtacttattgcactgatctattttcctcttctttgtagaatgctttgctcactccacattggacagtgaacgcgcatatagtgatgtatgtgactgctggtcaagggcgcatccaggtggttgatcaccgtggtaggactgtctttgatggtgagcttcgccaacaacaaatcctgctaatcccacagaactttgcagttgcagtgaaggcacgccaggaaggattttcctgggtgtccttcaagactagccacaatgccatagacagtcagatcgctggaaagagatccattcttcgtgctttgccagttgatgtggtcgctaaagcctacctactttcaagggaggagtctaggagcttgaagttcaatcgtggtgatgagatggctgtcttttcaccaaggcttcaccaacaattgtacgctgagtggcagaacagcaaataattaaccaaatatgtattctatcctatgttagtgatttgaataaagtaaaggagggatcaacacctctttttcaataaaaaaatatcaaccaagaatcggaaagaattttatagtgtaattgcgtttttaatctaggacctcttgagaactcaacagcaactagcaatcttaacccttagattatccgggagtcgccaccaccactatgaaatttgtagactcgccaccaccactatgaaatttgtaagtagtagagaaatggaaatgggatcagatgctgaattgaggaaaccccacgaacgccacgaaatcagtaatcaacgctccaactcagttcttgctccaattccctcttttgtgcaaaagctccaacttatccggactagtcaacagttttacctgaggctgagggagataaacgttcaaatgttatacagaggctgactgcattactcgagagatgcatttaaagaatcacttagcaccaccaaaatttatatttagtcttatctgtgagggactaaacagagttcaaaacaagtgagtccagcaggttatatacactcatcttcagaaagaactaaccaaaattcgtataaaatggtaatgaattagtcttgaaatattatgttagcatcagttgcaatggcagatcgacggagtttgacatccacaaacattttagcacggctataaaaatatgttatccagcttggccactacgcccaatggatggttaacacttctcaaagctgggattgcaagaacatggctccataacaaagctcattaaccccacagaaagaaagctcaccaaggaaccttctatttgtcctgaaaagacaaacgtcgcagtgtaaatacaagataatgaaaaaacggcagacactacattttagccatatgtacttacagaccaccaagagcaccttgaatctgttgtgttaaaattagaccacctagagaaccttgaatctgttgtgttcaaatttgtgattttcattgtaagctatactcagtgcacagctctaaaagtgtatttgcaatctagaattgggttgtacaggtaccactggtgcaatcttcttatgatgattgaactccaaattacaacccacaacagaactcagcaaaatgttttcatttactcacctcaagctctggaaggtctaaacattaaatgttgagctcccagcaggtggaacagcaacaacttttcctacagcaactgtcttacctgcaacaatttaagataaaacgtgcttcatggagtcggaatatattgaacttactaagacggagagaaacaacaacatactttatggtcggattacttggacttggtgaaaaaacatgcatagaaaacctaagtacaactttcaatagggtgaaaagcagccaaagagaaggaaacagagtatttgatgactgcttggtgcttgcccattttgcctgactagctatggttaaattttgcagccaactgcacttgcattaccttaaagtaatatattattgaatttgcgagaaataaactaacagagattctgattatatagaattagtgaatgatattaaataggttcatttaaatgagcattagataccttaggaaaaataataacagcagaaagagtatatcatcacaatccttcttataataatttcgataggcaaacacactcaaaatcatgacttatctgtgtccgattagacgtaattcctatgttatataattttaatgtcacatttagaaaagaagacttggtgctacaggtaaaaataaaaacatctttggtacatcagtgttgcatgatttaaacagagccaaacattgatttcagaaaaggatgtatatccttgccttcagtccggagcgtaaatcttccaagctgaggaaactcagagaagttctcgatacaaatcaaattattgacctaatataaaacagaggtgattagaaaatgtagccctcagactttaatgccagagcgatggatccatatggtatctgagcagttcactgaggaagtttcaaggataacctgaacacggcaaacgacgacagctccattcttcacaaaaagaggtttcctctttgacttctttttttttatgtcaccttctttcctcctcttcaaatcaatttcttctatgagttcaacaatctcacattcctcaactacagagtggatatgcagcactgccttgtaaccagcagtaaaaattgcctagtacatcaaacatcacattcataagaaattcgaatacacaagaagtcagtccagagttaagacaccctggatttggaatttaaaaagaacaagaaggctcataagacccttgcaatattttttgtagtaattatattaatgctatctagatgttcaaatatcaaagaaacttcatctggtataaaccgttccgaacgggagtgattattgaattactaatatccatgtgacaataatttcaatctaaataattttggtttctgagctcccaaaacaaaattaaccaaataggagacataaactggagtttatttaccaaataatatcagtcagttaacctgatgcattgaccaaataattgtggcttactccaatgtatattgatcaatatactaaaatttgtaaacttgaatccactgtggaatatacagtatagaacatacacataatgcaggaaaatttgtaaaactattggtttcggaaaaaggaaatcatgtataatcatattgagccctatcagttgataaaataggatgaactaacagtctaaaaagatgtcttaacttataacagggctatgaagtaagaaatattttaaattctcatgttttatttttcacttaaaactataagccaaaaaatgccattccataaaagtacagtttttattttatttttttacaaattgtcaacatccaaaacaaaaatatctatatccatgtccaacacattcccaaattcatgctcgaaagaccagatcaccagttctagtattttatactttccttttccaaacatatgttttcgtaaataaactatgcaggacaaagaaaatcagctgtgattctatctaagagaagattgcaaactaagcaaggcactcctggcaaatcatagtaggccttgcaggaaccagcattcaaaccaaggtattgaacacagagaactaacaaatgtcaagtgagaatagtcaagcatgaaatatcctatgctatcgtctgtaagtgttacttacattgtcaagcaactccaatatctgtagttgagcacgaaattcagatatagcactaacaggattttctgcaagaacaacgttgccaagaatcagtatactgaaaaacaacttccagtgcttgaaaaatgtccaaggtaaacaaacacctagaccatagtcaccagttcatgaatagctaattatttcagaaagctcaacagtaaacatgtgcagaaaataatccacccagggactgtttgcaaaccagctcttttttttttctgagctaggctcaaaaaaggcacttcggtgggatagtaaaccactaaatttagccaggtttgagcagatccaaccagaaaaaaaaatctggtccagacacaagtttaaaattctccagaggcacatctcgtctgcacattggttaattaaacccttctacgtacatttgggtgaataaaaactgctatatcaccatgtaagaaaatgcaattttttataaataatgtaatcttccatggtaaaaacttagtaagaataaaataaatggtaaaatgaatgaagaatttcctctacttttctgcttcaggaaacaaacaaaaaggcatcatcaaagtatcaaacaaacaaaagaattcaaagacaaatggagcacggatagacaggatccctttcaacttgcaaaaatagtgatatatcctagaacctaaatgcatcacttttaactagagcaatatataatcaagtgttcagaatgcacaaagttcagccagaatcagtaccacttatcaaggagagtactaaagaaagcagcaccaacaaagtaattatcttgctgctcccgactacttggaaaagacacttactaatgcttgatagcacaaaaccagcagtgatgtcatcctcttcaattcctgacagtttgactcggacattctcaccaggtgcagcacttctcactctatcttcatcacagtgtacactaatgactttcacgttggcctgtgagcaaaatagaatgtgcaccaagatcagatttataattccagcaaaagctgatgcacttgctacttgaaaacatcaacaataaaagatgttaccttgtttggcataaccaacatgttatcaccctccgagatagttcctgattcaatttttcccatgaccactgtgcccatgtctttgtatttatcaatgattggcatcctgcatatatatgtgccttactgttattagttaaactatccatcataattattcaagtaagaaaatgcaatctgaacagaaaggaaataaaagtttttctcctaaagaaatgccatttcatcttatgaaaccaaggttcggtaagtaccacctgacatgaacaggggttttcttagtccatttaaattgtacttgacaagctaagaaacctggtcgtctaaccttactggaccttttggatctcgtaaagggacttgaatgcaatctagaacttcgaaaagacatggaccactccaccagctacaattgcttttatccattcttgtcttcatattagtccccaaaagaccagagattggcaagaagtggacatctgaaaagaatgccagaaaaagcaaggtaaaagtaatgtattgtggataattccatcattatcataaccacagatcatcacatcattgttattaccacactcagttgagcaagggctccattcaacaagtgctggatataatatatgacgctatgtcaacacccaaaagccaatctctaactagtaaccacacgaataccaaaaagcttattttgtttggacaaagaaaacatatgagtttcttttgattattatatgtaacatttgcaggacacaggaaacatcataaaaagcatatcatatactccaaatgtatccaaaaatagtgcttcgtgaataaactcccagcatttttagtataattagggctaaattaggaacaatcacaaagctaaacaatctaaaccaggaagtcaccaaataatgggaaggaaaactatggaatgttacttactaaactttttgcagatggcataataggcaacaataaagaataatattcctgtcttagaaggaaataaccatgtagatgaaagatgtcttaccatgcttagaaaaagaagatgtgaagcttcaactttgtgataagctaaggcatcaaagatttaacaagcaatgaagcaaaccacaacagaactgtctaataccccatcctatttgatcttttgatttctacaaaactagccaaatacccatgcgcttcaatgtctacaatgtgttccatagattctaaacttggaaaatgtatatatttttcatttgaacatcaatcactaaataattctattacaaatgacatgcgcaaagacataacttttcagagaagattcttggattaataaagcataggtgcagcgcggaccgtggatggtagactcatgaccaccactaacttctttcataatagaatagaaatttcaaattaaattgagaaaaatgaacagattttgtgaagagatatctccaacctaaaattaacgcatagagaaaagagtgaaagatgatcccattcataattatatacctttcttaacattgtaccctgatgatttaagaaaaggaaccatttttccttctatttcatcatatctgaaaccacataagtgaaataatgatttttctttacccaacatgcttatttaagaggaacaaattcttctcagtggatttgttatcaatgtatataccgttctttcgaccagccaacagtagattcatccatcttatttatgaccacaaccaacttagaaacacccaaagtttttgccagaagcacatgttcgcgagtctgcccgcctctttcatacccagtttcaaattcacctttccgagcagatatcacctgagggaaacaatgatacattcatattatatcccagcagaaaagacggtaaatatgatttcgaaagattgcgccactgcttacaagaacaccaatgtctgcttgagatgcaccgcttatcatgtttggaacataacttttgtggccctgtatgtcagaaatatattgaatacaacattatataaaagaacacagaaaccattataaaatggatcaaataatcatcagaaagtagcatgtcttgtaataaggtgtaatgacttggttagcaaaaacaccctgaattgttgctactttgctacacaaaggtgacactcaaaaatgagctgtacaagcatgaatgaagacatagtttcagtcaaacaaacagagcaacaaacacatacaatccctataaatcaatcctaagaccagtttgagacggacgtaaggtaccaaggcagttgttgcttccacatgaacgattccaattatttcaaaagggggaaaggaaatacatcaccattttatgtttaagtcttctgcttatctaagttttacgttcaagttatttaaatgtatgaaactatcttaaaatatgatagaatcacaacagttgctccataaagcaacacaaaatctgtttcaaaatattgaaatataaaactatgaccttgcattactatggtatatgtaaataagtacagtatatgaggcaaaaaaaaaatttaccggtgcatctaaaatggtaaatcttgtagtttctgtctcaaagtgtgctctcccaacttcaactgtcttcccctgaatagattcaaaataacacattgtaagtacaataagtgatatttgacagaattattcaagccacgacaaaaatcaaatttcatgaattagaagtatgatgacctagaagcaggattggagctggagtatccatagacaccatttaaactttgttggattcggaaatgtttggattttagttatgtaacaggcaggccatgaccattgatttgcatggttcatattactggtctatccaatgatccaagaaaaacaggtgcaatgatgttacccaataatccaaacccaaccatcagaatataagcaagcagatggcagcaaactcttgaaggcagtagagagatgaccacacaagtaatctcaagatatcacatgctcatcactgtcgaaacaggatgtgggagtggccatcaaggatcatcagtactggaactagaacaaaccttaggttccattttgatggataagtctttgtggtccttggtcatggttctttattttgcttttgggtagtttcacctttttcaggacagcatcactccttaagcatattttcagttgctaggacagctgcagttagtaggacagcagcagttagcatctcctttatatctcctttatgctttattaagtttggatgccctctaggacagcatcccattcaaattttgaattttagactaggagggtgcagcaataggcttgcagccagctatggctatatatatgtatccaacctccctcgggttggtatggctttgagtttgcgaatggaagaaaactagaaaaattgccccatcttgagtgccatcctcttatcaatgagagtaaccattgaaattctaacatctggtatcagagccacactttcctgtaggctaaacatctactgttccaccccttcccaagctcggttgagctctcagccagcagcagcagcagcaccggctgctcttccttcccctttcccttccccctctccacgcagcagccccccggaggcgcgccatgtccgatgttcggtctcggcgttcggtcgcctcgagcactcggcgtaagcaggacgccaagctcgccgcagcagaagagcacaggcgagcaacggctcagaccgctgcagcagcagcgagggcggccagactggcggcagtggagttggcagcagccagggcagaggcggaagcagaggcggcggaagatgcggcacgtgcggcggaggtagaggttgagaccttgcgcagcaacatcaacggctccatcggcgacatcaccgccgacagggagcttgaggagctagcaagagggagggcgcgggagcgggcagagcgtgctgcccacccccacggcggcggcggcccaagggaccgcgcgcccgccgatgggaacccagacgggcacgggtgtgccggcggcagcccggagcgcgcgcgcggcggcggcgctccgagtggaggtggctggttcgacagagagcgtggccctcgcaggcagcgcggctctccctcccctgaccggcgccatggccaccacggcgtccagacggtggtcagggactttggtcccggcggttggtggcctaccctcaccaaaaccaactatatcgagtgggccgcggtgatgagggtgaggctccaggtgcggcacatgtgggaggcagtccggtacggcgacgtcgactacgacgagaatcgacgggcgctggatgcccccatcgctgcagtcccgcccgagatgcagttctcgctttcccaaaagcggactgccaaggaggcctggcaagtccacactgcaggcactccgcaaggagtgggagaacctggctttcaagccaggtgaggatgttgatgactttgccctccgtcgcaacactcttttgcagaagatggtgcagtacggcgacaacctatgatgaggagagagccgtcgagaagctgttccgctgcgtcccagagaagtatgggcagatcgctcgctcgatcgagtctctgctggatctctccacgatgtcgatcaaggaggcgataggtcgcctcaaggtcatcgacggccatgagccacagcctctctcggggcctatcaccattggcgggaagctccatctcactcggga

SEQ ID NO: 4361 - DNA, 15978 bp, Oryza sativa
gcatgaacatgcctgtgggccgtgtaaaggtactaatccctgggttggcacctagtgagatgctcaaggcagagttttcttgactcccaaccgatcacatggtgtctttctccacctcaattaagaggttggtggggagtttgagagcaacggagaaaaatctccacgagagtccacgatggccttttggcctctaccgttgctcagctgcgcactgagaacaggaggctaaaggacaccttgcccaaggacaaggtcgagctcgatgagcttagagttgaccttgcgtccctccgtcgtggcttttgtgccaagcattttcacttgtacaaggccgtaggaaaggaagacctctactgtgctcctatcctgataaggacacaaatagctggaatataaccatgactaccttatgtattaatcaaccaaaggttgctacacaatgagttttgtgtgtttttgtttgcagaggtacttgcttgggcaaaagaaaagagactgagtgtaaggaatgcatggatgattgaagaagttgattggggaccaagccaagaccttctccaagtcttgtttcatctcaccatgtcacttttggtccatagaagacaagagataaagttctacacgttttggattcgggttcgggcctcctaacagcatcaacttcaaacagatctagccactgatctagaaggaatttcggggcctattattacttgttcgaaagcttatggagtctactttcagatggttttggtcccatgtcaaaattcacaccgagctgccgggaaactgcaaaacaagccacgtatctcatccagtccgaatctgatttgggttttgggcattgtaattgtgtcgtgggcttagcccaatggggtgtgcgccctagggcaaccctaggatgtccctaatcatatttattcagtagccgtcaacgtttagagtcggtttttccttacattattctgttgagaacagttttgccgctagatcggtttgtaagaccccaacttgtgagcttaatcattcatccgcaattttggttgtattctatcttgttcttgtttgtgtccttcgattgacaaacagggattagccttctcgtcgaggtcatctgcgtttcgacacgggtgataaccagaggagacgtggtgctgcgattgcggggctcaagagcgtgcgcgttcaagaagctggatcgatttgtgtcgtgactccgcccaaatcgttgtttatcagaacctttcagaagatcaggaaccctagtgcatatcatatcccatagacattccctagttgttgttgatatttcttaacagcattactaaggagcttaattcatagcaatgatgctagaaatatgggcggtaattctttacgtttacaaagatgaatccacaagcgcacggatttactgatgtagtatttcacccgggagtatacccaaggcatcgtatttttaatcccaagggaagagattataagagagaactttattatttcatttcatgcctacgacagatcaaagactttgtaggggttaatgatatacatgcaaaaagggtaggttgacacatgaatcatcaagaaaaactattctgatactaaaagaaatagcttagtatagtggaaagaaactagcaaagaatcctatctgtacttcattaaaaagttgtctagtatacatttaatatgcactaatcgtacaaccaatacccttaactacgccctcctgttatgtcgagagaccacccttggttgctgagttccttatgacaactcgtcatggccatccaactggtaatgaatacagaggagtacctacaccaggaaattgtcttagtactatatacgcatgtggaggaatacccataccgagctatcaccatcagcggcctacctctactgtcccatggcatataatagcatttaatggtatccaataatctaagcatcacgcttacattactaaatactactccatccatgcatacgacatagagcaaccgaatggtcggacattaaactaataccaatgcgtatctctggtaagctacccatatgattaatacatattaaatttataccaaagcaagtaattaagctatataaatatagcataatactataactataaaaagaagaatatattattatataataaggtcttatgaaggaagagtaaactatttcaactccactctaactaaagctagaatataaactaagagagagcttcttggatttgatgcttcaaggtgtgtgttggagagagtgaggcctgctccttttatagccttccaatgacggcgattcctccgaaaagacttggagaacttcggaaccctactatttcaactccactctaactaaagctagaatataaactaagagagagcttcttggacttgatgcttcaaggtgtgtgttggagagagtgaggcctgctccttttatagccttccaatgatggtttcggcaattggaaatgtcataaacatcctccaaccgtcattgggaaatcatctgaagcgtccacgtggaaagggagcatcaacggccacgctgggggttcgacagaaccctggcctggcccaaacggcctacattttctctggtgcatctcttaatggatccttagtccagtgatatggtggttgggcctatttgaagttattttaatagatttgtaagcccatccatccataagtctgccactcgacggatttcgattgattgttcggttattctccttcatttatgagtgcttctcctacatatatgttattagtagcatagcatataatggaagtagatattttatttggaaattatgcattgcaagcataggtagtattcattaattgggtaatattgacggtcaaaattggtcgatgaccactgtcaacagttatccttagtattatgatagataagttaggtttaatttattctttcatttatttatttcgattctttcatgtaattgtggccattaataaagttgaaatagaataaatttgctgggcttcaccggatgagtacctttgctttcattttttgttgtcttttctgtctatgaagcaccccacgtacaacaacaagtgtggggttgaccttgtgctcacataatgcattcacgtaccaagatcatccacgtccgtgctaatccacgactcatgcacgttcgcgagatgagacgtagcaaccttgcatacatggctgcttatcatcacactcacatttgagcgatggtttgcacgtcatccctttatctccctaattcagttggattaattttgccatatttggaattaactcaagaatgaaaatgagtattgacataatcaactggaatatatgacttgctgcaaaatgacctacctactttttaatctttgatcatcccttgttacttgtgaaccacattcatgggaccacatgtcacctaagtgattgatgaatgagagattgcctgataataagaacctcactcttactgttggaaacttgggagttttataacaagaacaaaaataactttacatacttattgatgttttccttcctaccaacatcatatgtcagatcacattgataaaccttatacatataccacttgccatcattttgagttttgttagattcctttcatattttcacgaccaaagtcctgtgtacttatccaccaaaatatattgctctccctctatactggaggacttgcaacatatgccatccacctaccagatgctaaacttctacaccggaagtcggcatccaccatatctatccaccaaataaagacttcacatgactatgtttctccatcctcctatccatgctaaatgagacatgagctaaaaaaatgatcagtttttagaaaatcaaaatgctcaaaagagaattggccaatattctcgagcatgatgaaaaaaagaggatatagaaaatagccatgttctccaaataaagtatacacaggagaatcatataaaatgagtcataattccatttcacatcatccatctccctattccattccatccacatataagtgcataactttggtcatgttcatatgattggttatcttcttggatcctcaatttgactttataatatatctaatgcaagtctgtcatttcttactccctacccttagctccacagaagcctttagaaggtaggataagaaaaggcaatgtgaattccttggttaggaataaaaactttgagtgatttgagagaatcaattggggagtatagtacaagttatgtttttatgaacttcaaagaaaactacaatgtaatttatcggaaggagtaaaggccattccattcttcaatcagccaagatgacatagtagacacatcatgttcacaagtacagcttggaataacctatatgttgtgtcattaagcagaagtcattaccacattgatccatgagctttactcagggacgattaaagcataagcgtgggggtgttgttgacagtcgttaagtataaactttaaccgtcaactcatacataaaagatatcaaatataacatcaaaatttagtggtagggtttcactactaaccttttcaactagtcttggtaaaaatatttatgcaggtaattttgagagaaaataaacctgccatgcgacaaaatgaacctctggccaatcacacgcgagtaaaaggattggagggcccacgtgacaatggaaacaaacctaaagtggggccaaacgaacctctaccaccataggggcccacatgttagtccgaaagacggtcgagagaggcagtgccaagggttcggtcgaacctcaaacggtgcccctcatctccaccctccacgtgtggctttctagttggctcccaatgacggttgcgggagttaccgacctccccaaccatcataactccctataaaaggagcggttcactcacttccaaagcacaccaacatcaacagagtacaactcactttcgtaatttagacttcactttagtacgtgggattagtgacattgaggggaagctctgaatggagtgcccaaaagtattggagttctctccgagaatttctggaggagtgcccactactgcacaatacaccataggtaccagctagagacccattataggtgacggtttcccaactgataccaacttgagagtacctgtgcccgttggcataggtgccggttctagaaccagtacttatgaagattataggtaccagttctacatacacaactgacacttataatatttaaaaaaatcaatggctgccacgatggatacatcgcaggaacacatcatcgatggcaacggaggagtgcgacaccatgcagtgcaatgcgaaggagctagcggcacaacggagacaactaccctgttcaacaggaacacatgcagttcagaaaaaaaaatcaatctccaacagaaaaatgccgttgatctgttcatccaaaaattttagaagaagagcaaaatctccaacacatgcagttaaaaaaaatcaatatccagcgggtcaaaaaattaagcatgagcccatagcagcattggtcaaagtgtctagaggacatatgtcagtcaagaatgtgatctcataattgaaaaggttaattctaggtaaatggaaatgggaggtagaagattatggtgataactcttttcgcactattttttcttctactgctgaattaaaacgcatggtagaattgggtatagtgcatactaaggtgggagagactaaaatgtagattgtggaaagaggggttgagaatgaggttaagtatgttattccaaaagtgcctctacttcacgggcctcatctccaccgttaactacttgtgcatcgcttgcactgatttgttcgccgccgccgactggtgatctcacctctatacggaccacatcattcttctccaacgagcaactatgactgcaacagaaggacaagcaaaatgctctaagcttaccagctcaagcacgtggatcataccttcaatctggacttgttttggataaacgcaagtaatcaatcgagaagccttcgcatcgaagattgaagcactcagtagtcagtataggttatgaatcacggagaagactgcaactcgattatcaaggtctcaggggctactgtggaggagaagactgcaactcgattatcaaggtctcaggggctactgtggagaatatggatactaggtactcatacaacctccatattcgattagagataggtgataggccagatccatgtattatatagagtaggactcggttgcaatgttaccatgtgttctatggcaggacctagagtaccgagtgaggattatcatataatagattagcaaactaataccaaatccgattaggtttttcgattctctttgtaaccctatcccctacctatataaggtggatagggagccctccaagaacatatagcgagataagcactatcaaatcgttagatcaatatacaaccgatggatactatcggacttcctcaatcatgagtaaggtattacctctcatcgaaagtgtttggatctgattaaattattgtctttacatccatttaattttaggtctgccgatttccaaaatctataataataattgtgactgctgcactatacggaggctactgagatgggaaagtgttagtcacattgcctgcctatgtcgaataggatagtcatatttatacatttttttgccattcaagaatcatttgatttttcttactaatccattgtcatcagatgttgaacgggggcatagcctcaacttgcaattttttgaaaagaaaaaagaaacagcaagctttactggaagtgaagtgcaaacctttggaaaaaaaaaagctgcaactttcctgttttaaattgtgatatattttgctatcgccgcctactgtatgaatctaagggagtggcgttctgtcgaccgtctgcgagcgaatggccacggctgtgatggacagcgagttcggcagcctcgtcaaggtgtctgcggcggtgtgggcggcaatgttctacgcccgcctcgccgccgcaagccttcgccccggcgctccccgcctcgccgcgctccttcccgtagtcgcgctcttctgcgtggtccccttctccttctccaccaccactttccgcggctgctctgccttcttcctcagctggctcggcgtcttcaagctgctcctactcgccgcgggccgagggcccctcaaccccacgcatcccctccaccacttcgtcttctcggcctccctccccgtcaagctccggcacctcgcatccgccaagccggccaaaggtgtagatccagctccggccaacgagagcgcggcgggcaagatcctcgtctccggcgccgtcatccccctcatcatctacacgtaccagttcaagaacgccatgagccggtaccagctcctcatcctctacaccgggcacatctacttctccctgcagctcctcctggccgtcgtccacgggctgatccatggcgtgctcgggatggagatggagccgcaggtggaccggccgtacctggcgtcgtcgctgcgggacttctggggcaggcggtggaacctcatggtgccggccatcctccggccttcggtgtaccgcccggtgagggcgcgtctcggcgacgcggctggcgtcctcgcggcgttcctcgtctccgggctcatgcacgaggcgatgttcttctacatcatgtggcgtcccccgagcggcgaggtgaccgtgttcttcctcctgcacggcgtgtgcacggccgcggaagcgtggtgggcgcggcacgcggggtggtggcgcccgccgcgcgcggccgccgtgccgctgactctggcgttcgtggccgggacggggttctggctcttcttcccggccatgatcaaggctggcctggacgagatggtgctgcacgagtgccagggcatggtggccgtcatggagcagtccggccggtggctcgccggcgccaccaatctcaccttcgcgacacgctgaccagaggaaatgaaagaatgggacgtgagccacaccattactacgatctgacgaaacctgttgcatcgcgacgattctgacaggatgctgccgtttgtgattttttccgatttgggaaattaaatactcgagccgttcacatggccagcttggacagcactgggtgtttgcatcgtctgggggtctgggctgtgatgccagctagaattatgctagatcgatcgtgttaacaggggttaaagaagcattgattcggttggaaaatatctttaccattttttattgtacgttttcagctttgctatttatcaatccatttgattttttttcttattatcagccacctacactattagccctagttttgaacaacaaaaacctactatgttttcttgtatcaatccctgaattaaaagttggtatacacatttatagctagtagaaaatttcaaaatgaatttaggctaaaatagtttaatatctttacaaggaccaatagggtcttatcctatcagataagtagtagcggaaaccaaaatagtaataggcccaagcgacatgcccacaggcagttcattaggggcaggacctatttctcgatgagccctctgatcatctgctgagtatggcatattgttggcagagtctccctcttctactactgttatgtttaaaaagggagaaaatagctatgtgagtacatagagtacttgcaagctaccactgcaacatgattaatgcacattggatttaagaaagggcttgattcttttgctcaaaaccagctttcataaatattttaacaaacatttgacctagccattctaacaagaaaacaacggtaagttttcttgtttaaccattcactgagggttgcgtccacattcctaagtcttacttgattcggtttatccccaggcacatttatctatatttctgccattggaccctacactaaccctggctagtcccaccattcatccattcccattcacgccctaagtcaataaaaagtatataagtctagttaagaacagtacaaatgacggcgcaaatggctaaggtaccgcaatcttatggtggccataatcctctaggtctatgcccatatgcccatataggaagatacgctcgtacttagatcgtttccttcctatttttctaactcagtccttaactaaccagggtcagcactagcctttgctggaatccaaacaaatcttcttgttgtgattaagttttgtttttccataaacaacttcacatgtgtctcacaagatagtcgctaccatagcgatcttcccaaatcacattatcacatggctaggcatgtgtcaataatttgactacgggctttaatatatccatggttatcaaggtaaaggtaagcaataccaagatagggttaatcaataattaggtacgcaatttaaatatacttcctccgttttacaatgtaagactttctagcattgttcacatacatatagatgttaatgaatctaaacacatacatatgtctagattcattaacatctaaataaatgtgggcaatgctagaaagtcttacattgtaaaacggaggaagtagcatgcagtttatttgaaaacaaaatatttcgcaacataggtacaacatgtatcaatcctgattattttctatagatgttcacttttctgtagattaaccatcaaagtttgtgttctaagtgaatgtactttattttccttagcttatatctagtggccaaatctcaggttgattgtttgttgctttcataattaacaattcaatgttttatccttttgaatgatattttccatgcttatggaaggcttaatgaactgaagtttgtgttggcagtgatctccatcagatgtcctgtctcttcagcaggtcgtccacgatgcaatcagcacatgaggcaacagttccctccaacccacctgctgaaggcttggtttgcctaatttgattgctacatgcgaatgaggattacgccgtgtagattgaggtgcaggtaagctccatttcttgctgtcaattttttcatgccatttttgtgaatgctggcgatgggggatttttgttcatggagcaacaatgtttttattttccttttgtcaggccatatggagatgcagtcgttttcatttacagcaatcctcaaatccaggttaatattatgtggattttatctcttttgtatacattaaatatggcatctacagaaccaggattttacctctttttttcttgcttctgttaatgaagataagaaatatatcccatgtaatcaattggggatcaatgaggtttagtttgttgtactgctaatgaatgccatgtttaatttttgaaacgttacttgttttgttagtacacatgcatggggatgtgaaaagatgactataattgaaatgtatgtgctacgaacaactctccatcatcaccatacgtgatcactgcgaataatatcttttgataaattgatctatgaagtttggtcggttccaaacatatatattatcacaccattgatttaagttgatctatgaagaacatttctttcttgatttatttatgcttcctttcacaaatttttgaccaacatgatatgattagggaggtgataaatgctgaccaactgaaaaaatgtcactgtattctgcattttggctcagcttcatcgttgtcactgcagctcatttttcagtagatagaacatattgtcactacaaactaatgatgccgttagcgatcatccagttttgcaattcaatggtgttgttagtagtaatccattcaaagcataatgaaagaaaaaaaaatgaccatttgcataaacactaacaaacagttgcgtgaccatgacaatctgtaacttgtattttataaacaaattcactcttccgtagcttgtttcatgagtatttttgctttaagccatttttcttagagctttatccctatcactactatctaatgcttctaatcatccaatcgtaaactggaccaacaaagcaatgatctgtttgcaccaccgctaacaaatagtagcatcattttggataaatgaaaacatacctgaattccctctgcttataaaaaagagatagcgtggcttggtgccaacgtgcaagagcacacatttagcacgcaaggatggcaacgggatcgtaaacaatcctcggcgatatatatatgtttcttttttttgttactggaaagtatttgttgtatttgtcacactcacaccctttaatttgattttccaaccgaatctatttatgaactgtacagatgaagaatgtagcaaaacaattggaaggattgtgttggtatgcatttcccgtgatccactgcaccggcaccagcgacacgtgagatcctcactgctaccccaacttggaagatttgtgttttgcttcccagggttatgcctcaccagcactggcacctgcactagcatcaggtgagatgctcacagccattgcgcctgcaccagcgctggtgtccatgcatggattttccttgtttgctgtacttgtgtctccattgcttgatgtggcgcttgcagacgagtaatccctccatccctaactatttgacaccgttaatttttttaaatatatttgaccgttcgtcttattcagaaacttttgtgaaatatgtagaattatatgtatgcataaaagtatatttaacaatgaatcaaatgataggaaaataattaataattacattatttttttaataagatgaacagtcaaacatgttttaaaaagtcaatagcgtcaaatatttagggatggagggagtacaatccatgcccaccatgtgtttgtagaaatgccaatcaaataaaatgcattttattctccaaattcctaagctctcttttctcacacactcactccatgacaggtttcttaagacatactaattctcttggtatgcatttcatgtgttggatcagacttggtggcatgaaaccacaattcgaaggcatcattaaaaaaactgagtttatgatttgcggtaccgccacccgttgaacttggactgatcttatctctgtcacatatgtgcaccaaacgaattcagtttatgatcatcctaatgacagtagttggagaaaagagtatggacatgtaaaatttgcccctttgcattgagctatatattttcgcacaaaattttttacacttctgcttcaccttgctatgacctgtaggttgtcagccaactatgcaagttggcggtgccacactactgcaatggacacgcgccatctacaccattaacttattttcctgtcgttctccatttgccctgcggcaaggtactttatttatcggttatagttgtcaattgtaaatttacttgcatatgttgtatatgaagaggtatgcttgccgacattactaacttaagtttctggaggaagttagaagacaacgtgatagggagaggtatgcttccctcactgtatttattcatatcgtgcctagagttcagttcacaggaggtataaataatggaaaaagaaggttgaccgatctgattgaagttgatgcttgattctaaatgggatatgtttactgtgctctccagttcctcacaatttttaagcagcaatatgatagtatgctgtcatttctatttaagtaaaaaaaattgattactacctcgaaccacttgctttctagccttaatatggaccattatatctgcagtatatattagtgttagtttgacacctcaatcatattatggcctatggaacctgatttttggacttattgtgaatgtctcttgtggagatgacatatttcacaatctgtaataggtacagatatgtactgcaaaacttccataaaagcatcttcccaaatcccaacatatctttttctctgcagaacaatttagggcctgttttgatcccctagcaaaatttttcaccctgtaacatcaaatgtttggaaacatgcatggagtattaaatataggcaaagaaaataattacacaaatcacgtgtaaattgcgagacaaatcgtttagaccatggaactttaattttagttgttacctgaaaacttaattggtagtgtttacatcattacagaaatttgggttcaaaaatcttttgtgaattattgtttctttccaatgttacagtaagaataattattccatttgatatatgtcgacgtggcttgcacctacacactaaatagtttatgtacttattttaattattttcctcaaggaaaagtagtaagccactgacagctgtggtcggggtcaactattgacagccacggtggccagcgggcccacacatcagcgacacaaatcctaaacatggtttatttgctattcttaattacttaggacccacatgtcagtgtaatagtcttaatgaattgattaacttaattaccttcattagtcgctaatcaaggaggaccacatgccatacaaaggagagggatagggatttatgtcacgacacctgacatgcctggagatacataacaggaggtcgagccgaacatgcatatgaatgctaatccatcgatgctgcgcaagtctactcgggagagtaggcctaatagtaggtattattcaagtgaatggacccagtcgaaatgggttgggccatgtgtgagggagtgaggtccatggcgcgatgctataagagaccgatagggagttgagacagaatcgaacattgtagaaacatattctgaatactgaattcaaatctctccctgttctatgttgttcttccccaaatcccaaattccttgctacttctaccctcaattctgttcaattcttccttgttgcgacattgcaaatccagtgtcgtgacaaattggtatcagagcagtcaatcctggagaagccgcgctacacttcacggttgcaattgcaagtagtagcaatggagaaacagaatattgacttcggcaaaattctcggagaaattcaggaatcgctggtgtctctcaatagtcaataccaagcaatcggagactcaagcggctgtatcgaagttggatgtagggtgaatgggtggcgacctcaagtggaatccacaatctaggatttgcatgaagaggttggagatcttcgtcagcaactcgacctcatcggcaaatccaagcaggctgcttcgagcgcgtcttccccttgtgtctcattggcgggtgaggaaaggaaggaggctgctccgagcacgtctttccctcgggtcccgttgacgggcgaggaaaggaaggcgccattgctgccgatgccgccactgacaactcatttggccgcggcggagggtgggagcaaatgggcaatcggccaccacgttcaacctaatttccggggaaagacaccgggggccttagcgaccctgggtcaaaccccgggcaagggtacgtatgactcgaatcactttcagttccagaagtttgagcattcggggtttgatggtggggaatttgattctgattttggggagcgacaatacaattatagagtgccgaaattggattttcctaagtttgatggttctaaccctcaggattggcgaatgaaatgcgagcactattttgatgtgaataatacctttccggggctatgggtgaggatttcgatcatttatttcatgggtagagcagcatcatggctaagatcttctagggcgcatttgagatttccaatgtgggaagatttttgcactgcagtttctgaaaaattcgatagagaccagcatgaggctttgattaggcaaatggatagtataaaacaaactggaatggtgtgggagttttatgagcaattcgatgaattgatgaatcagcttttagtctatgacccctctgctagctcaaagtactgacacactgttttactgaagggttacgtcgagagattcgtaatgctgttcttttacaacgtccaaagaatctcgagactgctttggctgttgctttgttacaggaagaggtgctggagaatcctcaaaactctagcatcaaggacataaagaagtctgaaggaaattcagcttataagtctgctgtgaagggggcatggccattaccactaccaccaggaaaaggaggagttccaattgttggccgttctgaagacaagaggagcactaacagtgttcgtaatccgagaacaatgtctgataaggtggcagcattgaaaacttacaggcgggctcaagggttatgctatgtttgtgctgagaagtggtctccaagtcgtaagtgtgctccatcagtgcaattgaatgttgtgcaacaattgttcagtctaatcttggaagagaacttgcaggaaggaccggaaaattcagatcaattgaattctgaaactggggaactaatggcaatttctctgcaagcagtgtagggatctgaacctgatgggactatgagaattttggggcatgttcaaggtaaagaattgctgattttagtggactcagggagttcggtcagttttgtcagtacgcagttagcttctggattgacaggattgcaaccattggcacaccagttaattgtcagggttgctaatgggagcaagctgaaatgtgaagcagtaattcctaactgtgagtggcatgtacaaggacatgtattccacacaaccttgagagtgttgcctcttcctaattatgacatgatactaggtatggactggttgaaggaacatagtccaatgtcaattgattggtttaagaagattattgctctcagcttacaaggaactcaagtgacaatacaagggtgtagtccgaactggctaagtgtaatatgatttctgcaaatgaaatgaagcaattccattagaggagagcaatggctcatattgttcagttgtgttccataaatgatcaaaatgtatctgacgaa

SEQ ID NO: 4362 - DNA, 4877 bp, Oryza sativa
gaaagcgaatgtggtaagtgcggcccatataataagtggacagttcggcctcttccaagccattttcttctccaaaatgccggctcaatttatcagcgagaaaggtatctccctcgtagtatttgtaatgcattgaaacaaatcaaaacaaacacccagcgatctgtacatcatttctccaaattattgcaaagtttctatcacaagttccttcatcagtttatctgttacataaacctagtatacaacttttgatcagcagcttacggcaacaagcttcagaactcagaggcacagaacatggagacatgggagaagcagtggtgatgatgccgtcagatctggagcttgctggcgaggtaccaggagtgcattgcaaggctaccgaacgccatgatgttggccagagacgacaggccatggatcatcccgaacttcttgttcatggccgccagcgttgggttcgtcctcgccacctccgcgttcttcgaaaacccgacctcgctgccgatgccgaggtctttctcgatcttgtgccgcctcatcatcatctgtagaaagaagcctaagtcaaaactcaaaactgtatattgataggtactacaaaagagcaccctgaagtgaagcaatgttggggctacaggatgtttgttttcagcaatcatcattcgctgcaacttgtcaagagcataacagaagacgaatgttgagcactgaatgatggctcacaaggtaggagcaatccaaactcaaattcaattgaagaataaaggtatatctcttactgttctgcagtaacaccctgcaaactgccggctcacacaaatgattcaagactatgcaaccgtaagaccaaaaacatggtgtttgactacattaagccagaaacttttctatgttagaactataaaggtttacttactttcccaattcccaaagctatattgctaagctgattggaaactaagataagagcaagtgcccctgtgtcaagcacttgcatagttgcatgttatttagccggtgctagtgcgtgctacctatggaaaccactaccaggttactacatatgttcattcctgaaaataaaatgcaacaaaaagtcatttattccttaggcctcactgtcgcacttcagtcggactttttaatcaacatgaattgatccacctatactttatcgccttcaaaaaaaaatctacattacattacattacatggacatttacttatcaagcttaaatttcatgcaatgcaagtagagttaggtgaaaagcaaaaatcgtaacataaagaaagcagaaaaatggtaaaaaagatttacctcagtggtcatgggcgtgaaaaccagaaggttggaaaggtcaaaaccaagggcggagatcaagaatccaagctgatagcgctcaatggtagatgccgtcttccaaggatgtagatacgcaaaagctgccactgatatagccgagcatactgatatcaacatgaagtaggctgggaacattttcccttgtagactcccaaactggtgccttggcaaataccttaaagaatacatcaaagcaatgtcagtagccttattctgaaatattttggagtaaacaacttgcacttggtggatcaataaccaaaatagatgctgcatttctggttttaggtgatattttttctgcaaaatcacaaagcagcatgtactatgtgggtataataatacaacactgaaggcgcatttgaacaactgaacagatgacagtgctttctgaaatgcacactacgtattactctgaaacatgcagcttacacaataatccaacttgcttgcaaaaggcaccatgaacattggtgaaaccatgaaagagttctgaaaagttctccaggccaaatgccaaaatggtgagctcaagcatgacagtcacagcaggtttaaagttttaataagagaatttaacatctcaaatctctccattatccaaataaccaaatatacagtaattccaagttagaaattagtgttccatcctataggttgtaaattgggattctgtgcttacaagcatataaacacgcaatctttactaaaatgaaatcctagaaccaaaagtaaaaaactggatgaacgtttgggcaaggatactattctagggtcaaacccaaactgctaggagcctaggaacaaccaaattagcattttgagcatggccaagacagcaagactatgcaagctctccgcttaaatttgacaaaatctgatactgtttacaacatagtaacacttacgaaaaatctaacagcaacaataatcgacgtgaaaacccaaaattccactaaaatggagctgatagatagggaagcgattagagagctctttacttgaacatgacgatgccgccgatgaaggtgacccagagcgcggcgccccaggcggtggcgaagcagaggacgtgcgccagcctcgccgccgcgaccccggcgccggagcggccggagccaccgaggagagcgtccggcgcgaagagcacgccggcggcgaggaaggacactgccgtgaggaaccgcgccgcccaccccatcgtgcccccaccctaccaggctagggttcggattccgagagattgaatggaggaagaagaagaagagagcaaatctgtgtgattggaaatgaaattgaactcaacttaagcacagagtgtgaaatgaaagactagtcaatggagtactagtgcttgcttgcaaggaaagttctggaagcttatctagaacgcattaagttataatatttcctcattaattttataggaagcaatttaagttaattgattgattctcataatccacacaaattaacaacaaagaaacagagctttacttgtacagtactatttctactcaatggcaattctctgaagtctgaagttccaagagaggagtcagcgtaggagaacttgtgttacatgtgacagaaggcttgacctttttaaactccttttagaaatgatgagttgaatgaacactgtattaggcaggaatttgctcagttgaacctcatttgtttgtctgttttgtcatgaccaaacaaacctatgggctatgggctttaggctgtgtttggatccaaacttcagtccttttccatcacatcaacatgtcatacacacacaacttttcagtcacatcatctccaatttcaaccaaaatccaaactttgcgctgaactagtcacttagaaaaatttctaccagaaacctgtgggcagttgggcctagaaaaaagagcaacacacggttttggaccaaacagaagaaatcaaagattcagaactgcacaagatttggagtacgacaagtataaacagtgaacagcactagcaaaagaactgaccctgttcgcagtagaacatgaggtcagacctgcagtactttggataacattacagatcacagtacttacaatgcaggtagtccatctgccaaaatcaactgtaaaaatggagtgtattttggacaacagaagaagaacaagtaatgaatgatcttatgtatttcttcagttcaattgtttgaacctgaatacttgatcaattccaaatttccaatagcaatgtgatgcctttccaattgctctctctacctttgtagagacagtggcagtggcaccaacaataacaatccacaaatcatcatcaacacccaaaagatacaattccaaatcttgttgaataatcctatgcttttaattgatgagagtggctttctttctatacccctagctgctcgagggcgatggtgacggtgtgcgtgagctcgccgatgatgaggcggtgctcgccgacggggatccttcggaccccgttccggtcggcgacgctgagcccgtcgcacacgtcgatgcccatctccaccctcgccgtcccgccggcgcccacgtgcaccttctcgaacgccaccagctgccgcaccggcgcgccgtggcccgccgccgcctccgccgcggacgacgccggcgccgcggcgtacacgagcaccgtgtgcgcgccgtcgcgttctcccacgttcctgacgtcgacgtgcaccggcatcctcagctcctcgcaccgcgcgtgcgcgacgcgcacggcggcggcgcggctgaggcgagccgtggcgttgagcgaggcggaggcggaggcggcggcgtggtgggcggagaggcggacggtgagctgcgacggcgcgtgggcgatggagtgggtgaaggaggtgtagctgaggccatggccgaaggggtggatggtcgggccggtgtagaagcggtaggtccggccggggtagcccttggccggattggcgcgcatcgccatgttcgtcatcggcaccttctgcaggtaatcttgcgggtaccatgtcaccggcagcttccctcctgcaggaacacacaacaaaccaaattccaaattaacttgattaagatacatatttttttctcgatttctattagtatgctttttaaattgctaaacgatgtattttgtacggaattttttatgctgatgttattttaaaatattagagaaacgtttaggggtcttctatcttcgcaggtggtggcctaaatgatctgggtttgaagtctcaacccttctaattatttgatattagatcattccataatattcgcgtcttttgttttaaaatatcagacatatacattttttaagtttgtaataaattaaaacttaagtaatcttgtgttaatgactttatcattttacgtaccatcatttttttatcttcgttagattcaaacaagactttaatctcctttttgaaaagattagtcaaatttcacaatcaatctccttttcattggaaactaggggcggatccacaatgggggcggag

SEQ ID NO: 4363 - DNA, 2611 bp, Oryza sativa
tgtgtttccaaggagtattctagggattctcttttgagacaagttcttcgtaatatgggaattcgatatgagcaagatgaatcagttccagagctccaaagaaagattaaatcacacattgcaaataaaagtttttttctggtgtcggatgatgtgtggaactctgaagcatggacagatttactaagcactccacttcatgcagccgccacaggagtaattctaataactactcgagatgacactattgctagagtaattggggtggaccacactcatagggttgatttgatgtcagccgatgtaggatgggagttactttggaggagcatgaacatcaaagaagagaaacaagtgaaaaatctacgggacacaggtatcgagattgtccgcaaatgtggtggcctacctcttgcaatcagggctattgccaaagtcttagcaagcctgcaagatcaaacagagaatgagtggagacagatattggggaaaaatgcctggtccatgagcaaacttcctgatgaattaaatggtgctttatatcccgggaaaccaacacttgacgagcatgtcaatacctattgatgagagatgttgtatgtactgctgtttaagctatagaacctattgatgttatacagatctgagtgcattttttttctttgataatgtcaggtgtgagctcatgaataattttgataactactcggcaagatattgtcgctagggaaataggggttgaggaagcacatcgtgttgacctaatgtcaccagctgttggttgggagctactttggaagagcatgaacattcaggacgagaaagaagtgcaaaatctgcgagacatagggattgagattgttcagaaatgtggtgggctacctcttgcaatcaaggttactgctcgagtattggcaagcaaagataaaacagagaacaaatggaaaaggattttagctaaaaacgtttggtccatggctaaactccctaaggaaataagtggtgcactatatctaagttatgatgatttaccactgcatttgaagcaatgttttctttattgtattgtatttcctgaagactggaccttgaaacgtgatgagcttatcatgatgtgggttgctgaaggctttgtagaagtgcacaaagatcaattactagaagatacagcagaagaatactactatgaactaataattaggaatctcctgcaaccagtttacacatattttgatcagagcagatgcaaaatgcatgatctcttaaggcaacttgcttgttatctatcaagggaagaatgtcatattggagatctaaaaccattagtagacaatactatatgtaaactacgacgcatgttagttgtcggagagaaagacacggtggtcatacctttcactggtaaggaggaaattaagttgagaacttttacaactgatcatcagctacagggagttgataacacatttttcatgagattaactcatcttcgtgttttggatctaagtgactcacttgtgcaaacaataccagattatattggaaatttaatccatttacgtatgtttgatcttgatggaaccaacatatcttgtctcccagagtccattggttcccttcaaaaccttctcatattgaacttgaagaggtgtaaatatctgcacttccttcctttggcaacaactcaactgtacaatttgaggcggcttggtcttgctgatacaccaataaaccaagtcccaaaagggataggaagattgaaatttctcaatgatttagaaggatttcctatcggtggtggaagtgacaatacaaaaatgcaagatggctggaatttggaagagttggctcatctttcacagttgaggtgtcttgatatgataaaattggagagagctactccttgcagcagtagagacccatttctactaacagagaaaaagcatctcaaagttctgaatctacactgcactgaacagacagatgaagcatattcagaggaaggcattagcaatgttgagaagatctttgagaagctagcacctccacacaacttagaagatcttgttattgggaatttctttggttgtagattccccacctggcttggtactaaccacttgccttctgtgaaatacgttgtcctcatagattgcaaatcttgtgtgcatcttcccccaatcggacagctaccaaacttgaaatacctaaaaattaatggagcaagtgcaatcaccaagattggacccgaatttgttggctgctgggagggtaatctcagatccacagaggcagttgctttccccaagcttgaagcgttggtcattgaggatatgcccaactgggaggagtggtgtcagaaccctgaaccagaaatggagaaacagagtagcgatttgtgaattttggtaggatttgggtggccgccgcaagactatctcctagggttctaagttagctactcctaagacaaatagaaattgtgattcttcttatcttcttcccacagcaaaagccagcttaagtaagtttacagcagctaaaattattacagtgaatgtaaagagcaaaacgacaagctttgatagctacagcggcttctcatgacgtt

SEQ ID NO: 4364 - DNA, 2238 bp, Oryza sativa
agctttgcattatgccatgaattggtatatgtttactagtcaaatcgagggataagacgacaaacaatgagtatgagatgccattgagcccgtgacggaggaaacaaaactcaagcatgtgtatgctcacccctttgtaaaggcaataaagcacgcagctggtttcacatcatggaatcttggaagcaaactctaaattaatcacatcgaaataaactgtaaactaatcacatcgccagagcccaggcgccagctaatcgttgcaatatactattgcagctgttgatcagtgccctagaatatgtgagtgtagctaatagaagtacgaaaaggaaaacgcaaagttccctactaatctgtaaggtctattagtaggaattaagtactctctcaggagcctcaccatttgcattctaacaaacctaacgttttgacaaagaccattgcgtttccatggtgttactagaacaattgcttcagcgctagtgtgcaggaaatcaattaccatttagtgatgattggggatatgaataagaaaaggagtagccatagctaactatacggttcatgaatatacacaaaatgttgggttgtgcagcatagacaagtggacaattacttaaaatttggtcagtgatagtaacatgggaaagataaaagaaaagaagagtggttcagcagttgtctagctagtctgaatgttcagctatacaatatatgtaaggccttaccaccttgcctaaatcactccctagcctcctgcagtactgttgctttgttccactgtgtcgcattcttacactgcatttctaccggctgtgggtaagctcaatacatatagctgaatttacttcctttatttccttaagttaatccgtaaatgctcatcttgactgcagggcacggattttcaacaggatcagttgcgtccatttctgtctgctttctgattgattgagatgagatctactaggaaggaaaaatctgcttcatctgagtaatcccatatatactgctcttcttgaagcactccttgatcggtgaatgtcaacacatcaaccagtatttctggtactctcccgttgattcttctagttaaccttctgaatcatttcagttgtacatatataatacacacttcacttttcttctgtcccctttttgcagttgtagcagtgcagtctgcggttctctcttgatgactggctcataatgttctgaaatctattctatactctggcttattcaatcagattcctttggtcttgattaatctcagtttattgagatcttaagcacaagatgggaccgagcaacctgttaacctgtgcaagatggttgctactatactactgatccttgttatgtaccatatgttatttttgtgctgaatgatcgctctgtaaggtaagatttgcatcccggcgaaaacgaaaaaagatttgcatgtgtacttcaagtttcgaatgcatcattctgtgatctttttttgggatgcagctagtagagtagtaggtagggaggtgtatccgccatgcaacttttaggttttcatgtgtgaagctacctaaataatatagaccctgtttggatgcttgggctgtggttacataaccataaatgtcaattttgctagccattagactcaacatgcacggtacaccgaattaagtggaaactcttatacaaagaatagatggataatatatttactgaacttcatcttgcattcatattttgtcagccttatctaacttttaaactatgttaacaaagtttggttacatgtcaggctgcattttttacattgatcaattatatatggtggattaccccttttgagtttgtcggatggcaacaatagtagacacattggttggatcatgcatcaataagttgcaagcgatcattacagacaagacaatactcattttaggggtaaaagatgagcttgaagaactgcaacgaagaacaaacgtcataagatcttctcttcaggatgctgaggcaaggaggatggaagattcagtagttgaaaaatggcttgaccagctaagagatgttatgtatgatgttgatgatattattgatttggctagatttaaaggaagtgtcctactgcctgactatcctatgtcatcgtcaaggaaagcaactgcttgcagtggcctttcactttcgtgctgcttttctaatattcgtatacgtcatgaagttgctgtaaaaattagaagcctg

SEQ ID NO: 4365 - DNA, 18948 bp, Oryza sativa
  unsure (1)..(18948): unsure at all n locations
cacaatggttcataatgatgttgttccttttacataaaaaggcaaaaacacagttggaaccgaaagtctgaaggttgagttttctcttgactgtactgtaacacttgtggtacattagtgaagtgcagaagtaatcggttcaattctaggtcagctcatggaagtttgtcacctcaaagtcttacagaattttagagattagccccttctaaatgtctataaataatacggagtagaatatgtgaagttggatgagggctttctaagaacctgatgttgttactgcactcacactcagcaacaacaaaattcttctattatcacttattacatagaaaactaagaaaggtaaatatatatgactatataagattctaatcagcttaccattcacggcaaaacttcatggtactcatggctgatgcctatctggttcttgcagatcttcctctccacgttgaaccctactaagctgcaggcaactgagatgcttctagtacttctcaagaaggagattaaaggtgacaaagagcaaatctttgttatctcaaagagtctagagaatgggatcacacccgaccatccagaccccaatcagttcactctgctttgcatctgcagtgtgaaggagccgggcaatagagacaaggacagagcattcttggagaatttggatcttgctagtcatgtcgcattctaattctagaatttatggctcgatgaacatatcacgaagtcttcaaaaactcttggagtctgtgccattgtaactatttctcatagaatattatacataattactggagtaattgcttagatgagtacttgttttcatgacttctttctatttgaccaaaatttatttcctccagtttgatagtacttctgcaagtttgtgttgttgataactatgccttagaatacctctgatctgaaaccatctggtttgattgaagtgttgaactcaatattgcacagaacatttactcctagaaagcattttactcctagaaagcatccaattggattgtgacatcaacaggagcactgatctaacattgtcccaaacagatatgtgttgatatcaaaagaattcaggtgttgctttcccgggataatttttggtaacacaatagtatctgaagtttactcagcagtacagcatctctaatttggtatcatgcgcaacttgtctgatctgtgagacagagagaagaagatgaaagagccaaagcacattatggaaagggaagactcgaagaacctacgtgatgcaaatcttcgccggagaggagctccgtggccagtcggcggagctccggcgagcggctgccatggcggcggattctctcatccaggagactatcgctcttgcggtcgggccgattaatgggcgtacgccggaagcgacgtaggcccatgttatatggtccagcaagggattccatttaatttgtgggcctggacgatactatgggggaaaaagtacaccaaaggtccctcaatttgtcatcgagatacaaaatcatcctccaaccacaaaaccaaatagcgggcatccctcaactaacaaaaccgttcactttacatccttcggtggttttgaccctggttttgtccgacatggcggctgagttagcgtaggacccgcgtggatcccacatgtcagtgtggccacgtcagctcttctctctcttttcccctcttctctcccttcctcatctctctctctctctctcacttctctgctctgcgttctgcgaggcgggagaggaggagggcgtcagcggtgatggcgtcgcgcgagacggacgggtgcgtgggggagggaggggaccagacccacgaagcggcgacgggggaggggcgtcacgcggtcggtggggggaggggttgcgcgcgagcggcggggcaaccgctgcttgtgccgctccagtgtgggtgcccctcccactcgcccaatgcatacgcgcctatgcagtaccagatcaacgccggcgacaccttctggattgtctccaccaccaagctgcagagcctgatgcagtaccaggccgtcgagcgggtgaaccccacgctggtacccaccaaccttgacatcggccagatcgacatgttcccctccgttccccgctgcgtgttcccctctgttttgtcgccgcagcgtggtcgtctccgattgctgccgctgcctggtcgcgggacggcgttggcggcaacaccagacctacccaataaactcttttttattttcaccatcaattcactaacaatggccaagctagcccgagcannnnnnnnnnnnnnnnnnnnnnnnnnnnnnnnnnnnnnnnnnnnnnnnnnnnnntgacgatgaggagagagatcacgacggcggcggcacgggtgccacggacgggagtgcctgcgtgagcgccgccatggcgccttcgccttgctcggcagtggcggctgcgagcgcgcggtaggcggcgggggtgtggcgaggcgcacgcacacgcgcgcgtgcgggaggcgaggcgaggatggcaccggctccaccgcgaccgccctcgcgcctagctcctcccccgccgccgccgctcagttctttccggtcggccgccggccacgccgtgcccagccgcccgcgccccgcctctccgtcccgcgcacgcccgtcgcccgtggaagggggattggaaagggcagtagagagaggaaggaataagatgctgacatgtgggacccacgtgggtcccatgctgagtcagttgccacataggataaaaccggagtcaaaaacaccaaaggacctattgtgaccggttttgattagttaagggacgtgggggacaattttgtaactcgatgacaagttgagggaccttcggtgtactttttccatactacggggacatgcggcccgtcagcacagctgcacagggcaggagcaaaacgaggcccaaagtgtatggcccatcaaagagtgtatgagcgcttcgatgagtcagtgagtgagtttcagtacaggggaagaataatttctagtccagttgttaattactcggaacagttgagatgaaactagagcactgaactgcaataactgaacacaaaactcgattctgatttcagagtccatataagagggttgatgatttgggggtgaactctaaagcataggagagttaattgcaactcaatctgctgttaattgcagttggcatttgaaattttccatttacaattttagccagatttgtgtgtacagtaaccattttgtggcaagaactcgagttctgaatcctgtacaggagatgtagcacataagccattgctagtagagcagattacaatgcgaaaaattaggaaaacagcttacatggaatattaggaaggttgaagtatccaaaaggggcactttttagcatcccatcaaaactacagttaattcaacaatatgacgggacaacaaggggaaaagctagggtatttgtcataatatctctcctgattcctgaaccaatcctgatgacagagtaacaagctgttctgttcagcgtttaaatggaaaaggatggactcaataaaaaacgatgttggataatggaaggaatgattttcttttctgttcatcaagatatacatggattttgtggtcataaagcatcatctggtggaggaaagagggccttgcacacaatcattgctgatgtaaaattcagttaaggtgggctgtaaccatcagggagactaaatgtaccgagatagtccaagagggattgcgtaattctacaaaagtggagacacaagatatgagggtgtggcatcctttctcattcatccattgcattctcaagtgtacaatcctcctctctactcctctatttatagccattccctcttccaccttccatatttagtgatgggcctaattagtgggtaaccgagccgggccttcatgggccggcggtttcctaacaatacacacagtcagtatggtactcctaccatctacccattgatccattcattcattcctgctcaatagaagtttgatgttctgataatgagctgcatggaagttgcagaacctgttggtgtaatatgcaactttatcagggaactgcttgtaattttgttgaataagatatgtatgtgtgggggtgctggccatgggtgatatatatgcatgtgaagatgaatttcgttcagatcattgctgtgagaaacactgttgattttcgtttaggatgctgtggatttggcgattgggatttgtctagtgtttacctgaacgccctgaattcgattgtaagatcttcctattcttaccataggtagcgctgccgagcgtctcgctttcgacgaccttaatcgtcttgctccacttccagtgtcccttgatcttcgcctcggggaagaagaaccctgcgtgacacaacgacttgaactcgcccattcctacccggatcagcattgcttgtttgcattgctgctggaccatttcctgtccaactctgtttgttgagaactccgctttcctgccaggcttaatgtgatcgaacattcagtggcaatttcagtccagttcagtatccgctttaaggtatctttcaaaaaaaaataaaaataaagtagccccctccaggtgcagtttgttattctgttccatgtttacctttttccagtcaagaaacttgcatggaggtgaagtgattatgtaaagattcactagagcaatgtacttcagtaattactgaccatcgctggaaatcattcttgtcaggacatcaagcacgcctctctgtttttctggtttttgccaattccatttttcatgaatttaaattcatcatttttatttgttgatcatgtgcttcataattatgttctgaacctaaatagcgtgatatgtgataacagatgttttctgcaccagttttgatcatgaaaaatactaaagcctccaacaaacagacttgtgcatttgtggtctccaaaatatcaactcttgtgatcattgatctggcactgataactgaaggatgtaggacagaccgacagaggagaatgaactgatgcatgtgttcatccaaattgcttttactggaaaactggactgtaatgaggtcaaactaaaatagtctagaatcagatttgttgaacaattaaacagagtggatgactctccataactattctgatccattactgaagatgaaattagcttgataaaagtgcagaaacttccaagaaaatatcaaatgatgtatttagcagcagagcatcatttcaatatagaagtatacaagattatatcccctcctcctttttccgggcttgggaccggctatgtcatttagttacgccttaagatgacataggcggagttacctacacacctacaataaaaaaagttttaaaagaaaacaaacgcaagcaaatataacaaattatatgaagatgtattttacaatagctaaagaaaatgctttttttttcaatttttgacatttcccctttttttgatgcttttgttttttttttgttttaaattttcatgttttgtgatttttttttcattttattctctgaggaatgactgcactccaactcttcaagattaacaacctacaaaacaaataagcacacaaaaattaatcacggatgtatatatactttatacatcagacatcagttttaataacttaattaaggaaataaatataagtgctatcagtttcgcaacaatcatatttcgtggaattaacttaccaaacatcaggcatgcattacaaaaagtataaggaaaagacacatatacagataggcatgtcggtaatatcctccgcttattttaactgatagaatatgaaaaaaaatattaatcaatttgaaccaatgcaaagacatttaggtggatacttttggcactaaacaaaccttaattaggagccctacagtagaaacagatgttgggcacaaccctttcatgtttaatatcctgctaacaggtcgcaaggaatctgtaacattgggcctaacctattttttgtcgtaaaaaaaaattattctataggtctaatgtcttgcaaaaattcatgtgtatatgtgtttttacaagatagtaaatgctatcttttgcacacatgcatgatctgatatagaacacacttgtgaaattgaaggctaaatgcatgtaagctggtctgcatcatagctggtacattcaagagtcaaattaagggttacttatctcttggcctaacgaagcccaatatgtttagtccctcacttttgcagcctatgaaccaaatgctaaaccatttatgttgggacaaatcattggatggatatatccatctatgatattcctattgacatatagtgaatagcaatgccatcatagcatgtttttggcgatataacccatacagttttgttttggagtagcagtagtctctatctctgtcttcaaatctttgtacactactgcatatgatcatgttgtagtacctataggacgatacacttatttaacataccatacaggatgttaataagaccatgagtggataaaagatatggtcaactaattaatttgttgatctatatctaccattttatgaaaatcttgaccacggtgaaatggttacatgcagcactaatgaaaaagagcattgctccggtcattctttttgtaccgcaaggtactaaaatcccatccattaatgatggcatatcgaatggtcacgattacatggtacctcagggtaccagcttgatcgtggggtagcaagcacgagtgagccatagtggaagggtataatcgtattttcgcgtttggaaggatgtttggatcggtggtttgtttggggaagtgccgcagagtagcaaaaccctaggcttcctcccgacggcggcgcgtggcggacaatacgacggcggcggcggcggcattcgttggtctcgatgctggcgtcttccccttgtcccatcgttttccccttcgcggcggcgcctcatccattcctctcaacgctgcgactcctgcgaccatgctgcggatggggtcctggagatccactgcagccacggcccttgcagcggcgccgagacgactcctgtgaccgcgatgatgacacctacggctgcagcgatgacacctgcggcagcgacaactcctgtggcgctggcgaggacaactgcagcggccacgattctgggacgattgcggatgccatcgcccttgctgcgtctgcctgcggcggtgcggccgatggggtcgaccttcacctcgacttttttctcatgtgccctgcggcagcgctagatgcagaaggagaagggaaagcgagagatatcgagacacacacgctatttggaccacacgtgatacccatcgtacccctcagcaatcaacggccggatggagactggtacctcacagtaccagtaccgcgtgctacaaaaggaaggccgggagaaaaactcaatgaaaaaagaactaaatcatataaattattaaacaatcacaattcacacaacatgaacaactaaggagactatcaaatgctagagtagttgcatacagctgaagagcagagaagaagcatggatgtacaacccaatgattagtttattccagtgaaaaatcccaaccaattagtgtacataccttgtgccatctaattaattggctcttaaaaccactcgttgacctccaacttatgctcatctccatggagctggcgatgttgctcctcaagccctgggacccacagtgaagagatcttctgcatattctttgacagccatagctgctccaaaccacccaacatctcaacatgcctcaaattcgggcaatgatttacaagtagctctctcacttggggaaggttggagattatctccaggccttgacaactttgaacaaaaagtataccagagaggaatgggaggtgttccaccatcttcaagcatcttgctcttcttatatcgagctccttcaagttggtggcctgctgtccaagctgtggtgggagagccctcagcttggggcactccacaagttgcaactgcttcaaacaaggcagcagccacgacgaccttggagttggagacggggcttcctcccccttttgcttcgaagcagcagttccatcctttcccccttcctgggctgctgcagctgctttctcctcctgcaactcttcttctttgacaaaggaccactcctcccagttgggcatatccttgatagccaataattcaagcctagggaaagcaactgtctctgtggatatgagattaccctcccagcagccaacaaattcgggtccaatcttggtgattgcacttgctccatcaattctaaggtatttcaagttggtagctgtccaattggtggaagatgcacacaagatttgcaatctttgagtttcaaatatgtcagtgaagataaaagggatgtactaagccaggtggggaaccttcgcccaaagaataatacaatcataagatcttctaaattgcgtggaggacttagctgctcaaagatcatctcgacattgctaatgccttcctctgagcatgcttcatcagtcggttcagtgcagcatagatgtagacttttaagatgctttttgtcagttagcaacaatgcatctgtactgctcctaggagttgctctttccaatttgttcaagtcaagccggcgtaactgtgaaagatgagctaactcctgcaagttccatccgtcttgcattttagtattgtcacttccacctccaacaggaaatccttctaaatcattgaggaattcaagtcttcctatccctcttggaacctgatttattggtgaatcatcaagaccaagccgccttaaattgcataaccgagtgatcatgctgggcaaactgtacaaagattcacaccgctgtaagtgtaacatctggaggttttttagagcaccaatagattttggaagacaggatatgttggttccactaagatcaagtaaacgtagatgaattaaatatccaacacaatctggtatttcttccacaagtaagtcagtcaagtccaaaacacgaagatacgtgaatctcatgaaaaatgttttctcaattcccagtggatttggttgggttctaaaagttctcaacttaatctcctccttacccatgctaggtatgactaccatatctttctcggtgatagctaaaatgcggcgcaatttacacatgttattatccaccaatgatgttggatctccaatataacattcttctcttgatagatggcaagcaagttgccttaagagatcatgcattttgcatttgctctgatcaaaagatgtgtcaaccggttggaggagattcctacttattagctcatagtagtattcttctgctgtatcttctagtagttgatctttgtgcacttctacaaagccttcggcaacccacaacctgataaggtaatcacggtgaatggtccagtcttcaggatatacaatacaataaagaaaacattgctttaaatgctgtggtaaatcatcgtagcttagatatagagcacctcttatttccttaggaagtttatacatggaccaaacgtaattagctaaaatctttttccattcgttctctgctttatctttgcttgccaaaactctagcaataaccttgattgcaagaggtagcccaccacatttctgaacaatctcaatccctatgtctcgcagattttgcacttctttctcgtcctcaatgttaatgctcttccagagtagctcccaaccaacagccggtgacatttggtcgatatgatgtggttcctcaaccccaatttctctagcgacagtatcttgcctagtagttatcaaaactattcccgaggttgcagcatacagtggagttcgtagtagattggtccacacatcagactgccatacatcatccaacacaagaaaataactcttatctttaatagccgattcaagcttgctttgtagctcgccaactgattcttcttgtttgcattgagcgtcgatggttctaagtagttgtcccaaaacagaggctggggagtagtcctgagaaacacagatccatgcatgtttgtcgaagctttgttttaatttctcatcattgaatactttctgagcaagtgttgtctttccgattccccctgttccaataatagcaagcttgtaagtcttcttttccttgtgtgtaagaacctggctcaccaattttctagaagcatgtaatatctctttccccacaaggttggattcagcaatttgagaactttttctcaattctgatgttgaatctttatgagatgactgtgtattctcaagtgttacaaatattttatcctttgctatttcttctagttttctgttcaggcttctaattttattaccaatctcatggtgaacccgaatgttggaaaagcaagagagaagtgaaagcccattacatgcaattgtttttctcggtgaacaagaatggccatttaatagcttgcttccttcaaagctaaccaaatcgataatgtcatcagcatcatacatagcatcttttagacgagaaatccaattgtgtattgatgagtcttccatgccccttcgctccacatcacttataaagcatcgtatttgttccattttttcctgcagttctctaagatcttcttttacacctaaaattagtattgcctcctcggtaatgatctcttgcaacttcttagcacatgatccaatcaaagaatccagtatggttgccatagagaaactcgtcgagggtgatgctccaatatatccaagtttttttttttggcgtaagcaatatatccaattaaatcatgcaagagtaataccgtctgaaaatggacaaaagttgaattggtttcagagtatctttgtagctagcaagttattttgcaatctgttttgagcaagtatatactgattactgaagctgaagaactgaaatcattaaggggtttacctttcggtggcttctttgtatcaacaggcaaacgagaaagaagtaaccggctcaaattgcggtgttaattttgctcaagttgacaaagctaacttgcttggtatgaaagccgagctgaggctgaagtgaatcggatcgacaggaacggcagtggagcaggcgggtgtcttctggaatgcaagatgatgaccgagcgagccaacgtttcgattggctagctcctaacgtgacaagcagaaaattgttcaaaccctatgttgtgagagaaaactcagctgagcctgagagcaaggcctttgatgcgtgcagccgaggcatcgccggtcacaaggaagacaacgagcaagttcccattatgagattatgtctcgtggactagatgggctggctctcttatgcagtgttcaaatagtacaatggctcttttatccgtctcaccatttatgtcccactgtgcatgaggagtttgttttccagtgtgcaaattgcacggaacaagacaagccatcttagataaagatgtttgaacaagtttgcaaattgtgcaaatggcagtctgatgtatgaacaagatgtttcagctgcatatataaatttctccatcgtgctactaaaaagattcccatgtcaggaaagatatttggactgaaattcattcagagtactccaccctagtaaatagagaaagaaagacctcctaataccgaaggtatcgagaaataccaaattttacattagaaaatatggtacttcttccgtttcatattataagactttctagtattgcccatattcatatatatatattaatgaatcaatatatatatatatgtgtgtgtctagaatgtgagcaatgttagaacgttttataatatgaaacggagggagtacctcctagtatctcttaaggattggggtgcagctcatcttcaaaatcttaattctgccctagtaagtagagaaaaaaaggccaagaatatttcaactcatgtaagtaagaaagaaagacgagatatagtgttatttctgaatctaatccattcaaatggccgtatgtgagccaagaggaaagtaacatggctagcagtatgttggcttcttgtcttgatgtcagaatcgatgaaccatcgactaaagaaaacgataagaacatttgacttgctgacttatatatgttaggaaacatacaagaaaggatttatgggtggctaggatcatcacccctagtgctgtcgacttatcaggttcagcttcaccatggttgatgctgatcagttgctcaccattcactgtaaaaatgatcaatgctcaccattggaccattttctgtccttttgtccaggactattctcctctgaaccgagtggttctgcgtttcgcaactgttccatctcttccgagtgaaataatattaccattctcaacttgtgcactaatgcacaaattgcacacaacatattgctgcacttgaattgcaggccgaattgcagcagcagccctgcttcctcgtcaagagatgttgagaactgcagttaaacgtattaacagattgaacatgaatatttgcctaacacgaatttggtcctgagttgaatttgattccaactgtagcattgatcgaacattctcccaaacagatacaggtttgatggatgctatgaattaaacagtgaacacaataaacagcagtgcagcatctctttcaattcatggtgttgatgatatgattatctgaactagtgaactctgcagaccaacgaacaaacaagagctcaacttctatcgaccaaactctcttcctaccagtttggagattgagattcctctgtaaatttcgctgcgccccgctggataaacaagaactgaacagcctccctgatctgaacgaggataggagcccaagaaccaacgggacacgaaccgcctctggatacgggcgccgagatttggggtttccggagggagctccggcgagcggctgccggttagttctcaagcaggagagacacgcgtcgttcttgcgttcttgccctcaagtggccccacgagtcagggagacattatatgtttatattgccgttgatgcgacgacggcaagcgagcgagcgctccgacgaggtaaatcgccgccgagtcccacgtcgccggcgccggagaacctcgagcacaaccgaggtacaggacccctcgttttcctccccctttttcttctcatcgctggatgcgctatagctgtgctttgctttgtgctgcgttgatcagtcacgataagaataatttgtccgttgtagatgaacacagaatgattcagatgaaaattcaaactgaatagctcaattgtgtacatgaatgaacacaaacctcgattctaatttcagagtccatgagaagcttgcagacctgcaggtcgactcgagctccccagcatcagtagtgagcatctttgaacataatgatcaaatgccatcaaatgaaatgtcaaaaccgaatatctcaaaccctatcgttgctagtagaacacattacactatgcaaaataaggaaatcagcttacacggaacattaggaagatgcaagtatccaagaagacactggtttgcatccccgtccagaaaatacgaaggcaataaaaccatggttaatttaacaatgtaatgggataacaaggtgaaaagctagtgcactgtcataataacattttcctgaaccaatcctaaagacatacaagctgttattttcagtgttcaaaaggaaaaaggatgaattcaatgaaataaacaaaagttggatttacttctcttcctcaagttatacatgggttccatcccacataagcagcagctggtggagaaagagccttggacacaatcattgccgatgcaaatttcagtcaaagatgtgttgtatccatctattaacacaggtattgattgtcaatacgaggtatcatcactgagatttcctcaagtactgaaacattgtcagtacaaaggaatgactaggaaggttatccaccatttcctctcctctcgatcacaattcacaaagcacaatcagtttctatcatgatgggaggataaatatatttttgcctcagtgatcttcattgatttccttgtcctgcaggcttgtcattaaggactgacaggagaatgattggtgcttgggtttagcccaattgcttctggtgaaagaaggggttgaaatgagctcaaactaaactggtttccaactcaggttcgtccaacagagaaacagagtgtatgtgcctctgaaagtgttttcataattattccatcacaaaaaaaatgcagtagcctgacaaaggtgcagtttcaagaaaactttcaaagacctggtagcagtagactattccgtcattgaaaataagactggatgagtctctagaagtgtctccataactattccatcattgaaaatgaaattaatctgataaaagtacggaaaaatcccaatgatctactatatagtaggagagcgtcatttcaaccaacatctatacaagattatcccctcctcctttttccgggcttgggaccggctatgtcattcagataaacctaagatgacataggcggagttacctacacacctacaataaaaaaaataaaaagaaaagaaacgcacacatctaagaaaacatgacgatgtattttacaagagctaaagaaaatataaccttttttttgacattttcccattttttgatatttttgtttttttaatttttttaatatatttcaaagaccagtagctaggtaaagacaaaagtacagattacaggtgactgcagcccaaattcttcaagattaacctacaacacaaataagcgcacaaaaattaatcatggatgtatattcataagcaatttggtaattaaataacttaattaaggaaaagaaaatacaagtgacatccgttttgcaacaatctattttctacaattgaacttaccaaacatcatacgtgaattacaaaaagtataaggaaaagacacatagggactatacataggcatgtcgctcggcaatatcctctgcttataacagatgtaatacgaacaaaaatattaatcaatttgaaccaatacaaagacatttaggtggcttttgttttttcaccaaacaaaccttaattaggagccctacactaggaacagatgttgggcacaacccttccatcttcaatatcctgctcacaggctgcaaggaatctgtaacattgggcctgacctattttttgtgaaatctaaaaaaactactctattgcctaatgtcttgcgaaaattcatgtgtatttgtgtttttataagatactgagtactaaatgtgcacattgatatgacatagaacacacttgcagacttgaaggctaaatgcacgtgatctggtcttcgtcatagatagcgcatttttaaataatggattaaataaaacccggcctctacatcccgaaggatgtacacggccaatcatagctagcacattcaagagctgaattaaggattacttatctcttggcctagcgaagtccattatgtttagtcgtgcacttatgcagcctgtgtaccaaatgctaaaccatttatgttgtccccaagtccttggatggatatatgcatttgtgatattactactatcatatagtgaatatagcaatgccatcatagcattgtttggtgatataacccatacaattttcttttggagtagaagtaatctctatctttgtctgcagagctaggaacactattgcacatgattatgttgtagtacatataggacaattcatttatctagaatacaccgtatgtacaggacgcatgttaataagatcacgagaggattaaagaaatggacaactaatgaatttgtcaatgtatatccaccattttatgaaaatcttgaccatgatgaaatgcttacatgcagcataaatgaaaataaaactaaatcatataaatcattaaacaatcagtcaatgcacacgacatgaacaactaaggagactatcaaatgctagaatagctgcatatatacagctgaagagcagaggggcagcatgaatgtacaacccaatgattagtttattccagtgaaatgtcccaagcaattagtgtacataccttgcgccatctaaattaattgggtctcacagccactcgatgacctccagctcatgctcatctccatggagttggcggtgttgctcctgaagccttgggacccacagctgagagatctcctgcataccttcatccagcaatagctgctccaaaccacccaactcctcgacatgcctcaaattggggcagacatttagaaacagctctctcacttggggaaggttggagaccctctccaggccttcacagccaccaattgaaagggcaccagagaggaacgggaggtcttccaccgtcttcaagcattctgcttctcttataaggaggtccttcaagttggtggcctgctgtccaagctgtggtgggagagccctcagcttggggcagcccacgagatccaacttcgtcaaacaaggcagcagccacgacgaccttggagttggagacggggcttcctcccccttttgcttcgaagcagcaattccatcctctcccccttccttggctgctgcagctgcttcctcctcctgcacttcttcttcttcaacaaaggaccactcctcccagttgggcatatcctcaatgaccaaccattcgagcttggggaaagcaactgcctctgtggatctgagattaccctcccagcagccaacaaattcgggtccaatcttggtgattgcacttgctccattaatttttaggtatttcaagtttggtagctgtccgattgggggaagatgcacacaagatttgcaatctatgaggagcacgtatttcactgaagacaaatggttactaccaagccaggtggggaaccttcgcccaaagaaatccccgatagcaagaacttctaagttgtgtggaggtgctagcttctcaaagatcttctcaacattgctaatgccttcctctgaatatgcttcatctgtctgttcagtgcagtgtagattcagaactttgagatgctttttctctgttagtagaaatgggtctctactgctgcaaggagtagctctttccaattttatcatatcaagctgcctcaactgtgaaagatgacccaactcttccaaattccatccatcttgtattttggtattgtcatttccaccaccgataggaaatccttctaaatcattgagaaatttcagtcttcctatcccttttggaaccaggtttattggagtaccagcaagaccaagccgcctcaaattgcatagttgagttgttgccaaaggaagtctgcgcaaagattcacacccctgcaaattcaatatttgaaggctttgaagggagccaatggcctctgggagagaacatatatttgtcttgtcaagatcgagcaaccgcagataaatcaaatttccaatcgcacctgggatgtcatgtacaagtgagtcagacaaatccaaaatgcgaagacatacaagtctctcgaaaagtgaattatcaattcttgctgacttcccagataagtttgtaaaacacctcactttatattgatccttgtccatgctaggtaacaccactatgtccttctcagtgacaactgaaatacgccgtactttgcacatagtattagtccctagtgactctgggtctccaacaaaacattcttctcttgacaaataagaagcaagttgccttaagagatcatgcatcttgcagctgctgtggtcaaaatataaaccatctggttggagcaagttccgatggatcagctcataataatatctctctgctgtatcttctagtaattgtcctttttcctcatctataaagccttcagcaacccacatcctagtaagatcgtcacgcaaaatgcttgcatcttcagggaaaagtgcacaataaagaaaacattgcttcagttggtgcggcagcacttcataactcagatataaagcaccacttaattcacgaggaagtttgctcatggaccaggcatttttccccaatatccgtctccattcattctctgtttgttcttggcttgctaaaactgtagcaataactctgattgcaagaggaaggccaccacatttgcgaacaatctcaatacctatgtccttgagattttgcacttgtttctcttggttgatgttcatgctcctccaaagcagctcccatcctacatcagctgacatcaaatcaaccctatgagtgtggtccaccccaattactctagcaatagtgtcatctcgagtagttattagaattactcctgtggcggctgcatgaagtggagtgcttagtaaatctgtccatgcttcagagttccacacatcatccaacaccagaaaaaaacttttatttgcaatgtgtgatttaatctttctttggagctctggaactgattcatcttgctcatatcgaattcccatattacgaagaacttgtctcaaaagagaatccctagaatactccttggaaacacaagcccatgcatgatggtcaaatctcccttctaattttttatcattgaatattttctgagctagtgttgtcttaccaactcctcctgttccaacaatagcaagcttgtaaacattctttttcttgtgtgcaagcaccaaatccaccacttctctgcaagcacgtatgacctccttgcccacaaggttgggttcaactaggctggagctttctattggtgtccatgctgaaccacttccattatgatgtctgcggttgagttttaaaaatacctcatcctttgaaatgttatcgatctttttgttcaggcttctaatttttacagcaacttcatgacgtatacgaatattagaaaagcag

SEQ ID NO: 4366 - DNA, 8129 bp, Oryza sativa
tggactgtatccataaagggccttgaatggagtcatttgtattgctgtgtgatatgttgtgttataccaccattctgctaaagctatccaagagcaccaattttgtggttcttgaaatgtcatgcaccttaagtaagattctaaacactggttcaccctctcagtttgcccatctgtctggggatggtaagctgtgctaaacctcaattggaccttttgagatttgaacacttcttgaaagaatgtgctagtaaaaactctgtccctatctgtcacaatagctatcggcatcccatgcagtttgtgaatattatccataaacacctgcaccacttcctccactgtgtatgggtgggataaagctatgaaatgtgcatatttggttaacctatccaccactaccaaaatcacatccttccccttggactttggtaacccttctacaaagtccatggatatatgtgtccaagccatgtctggtacctctagagggtttaaaagacctggtatatgcacatgttcagatttagtaacctgacatactggacaatttcttatgtgattttccactcccttcttcaatcctggccaataaaacagcttcttaatcctttggtatgtggctctaattccacagtgccccccaaaagtcgaactatgataagcttgtattaactgccctctgatttctcctgtttcccccacatatattcttcctttatatttcataattccagcctcaaacttatactccccttctggatcccctgctgtgccaattaaactcagcaacttatgagcttgaacatcctcttcataacttcttttaatatccagtatccactcaggcaccaccacagcaatagctgcacaaagttcagtcacttcttccttgtttttcgggctcctagatagggcatctgctactaagttctccctaccagccttgtactcaatagtgtaattatattccatcagtttaagcaataacttgtgttgtatcccttccaccagtctttggttcatcatgtacttaagactctgctgatctgttttgatgactaattctccacccaaaacataatgcctccatctctttaaagcctctagtatagccatagcctctttctcataaattgactgagctgctgcttttggccctagagccttgctataataagcaattggccttcctgcctgcatcaaaactgctccaataccaacttcgcaagcatctgcttcaatcacaaacggctgctcaaagtttggtaaggctaacactggactagtacacagcttcccttttagctctgtaaatgcttcagattgagctaacccccaattgaaacctcctttcttcaacatgtcgtgaaggggtctgcagattaacccatacccttttataaatcttctataatacccagtcatccccaagaattccctaacttcagtcacatttttaggttccttccgattcatgatatcactgatcttgctaggatctgttgccactccatcagaagatatcacatgtcccaagtaagccacactgctcagaccaaaagcacacttcttaagccgtaccaccaactggttcttctccaggacttgcaatactgccttgatatgcttgatatgttcctcccttgttttgctataaatcaagatgtcataaaaaaacacaagaacaaactttcttaaaaagggtgctagagcttggttcattagtgactgaaaagtggcaggtgcattagttaacccaaaaggcattacttggtactcatagtgacccatgtgtgttttgaaggcagttttaggaatatcttcctcagccattctaatctgatgatatcccgaccttaagtccagcttagaaaatattctagccccatgtaactcatccaacaagtcctctataattggcataggaaacttgttcttcactgtctgggcattcagctgtcggtagtctacacacattctccaagatccatccctttttctaaccattatagctggacaggcataagggctgtcactgaacctaatctccttagactggatcagatctgatattatgttctccatggcctccttttggtaatgtggcactctatagggtctctggttgggaggttctgacccaggtttcaagtttatcacatggtcacaagctcttcttggaggtaagccttttggctccttcatcactcctgggaattgtgataaaacttcctgaacatctgctggcactgcagcctcctccttcctctcttcttcagtcatcgcattcacttgtaacacacaccccacagctcccttttttatcagcttctccattttatgaccatcaattaagaaatgtttcccaggtttagtgaaatcctgaaattcaactagcttaccttccttggtgatagacagttccctctgtttgagatccaaagtaattggactatgccgaaaaatctagtctgcccccaagattacatcatatcccttcaaggtgatcaggctgaaagcattaacaaatttcaccccttgaattttatatgccacttctgggactacaagattagatttcaattctcctcctcctgctactatcaccttcttaatagtcgaggttgctataggacacttgcacttaactgcaaactcatgggtcatgaaagtcccagtactcccactatcaattagaccaactgcttgtttcccattgatcatgattaggactgaaaaagtatcaggccgagttgtgccagaagctgcactaaatgacacactcattaactcctcatgtgctccctcctgcttaggtgcctctatttggtcagtggccagctcctcttgttccttctcttttgattcatcctcctcctcttcagtacaaggttcattctctaccagtaaagcattgatagcttgcttcaccttgcattggtgtctaggaaaccatggttccttacaaaaccagcattttctgtcttctttcttctcaccatcacccctttgtggtctattatttgcgttcctgccaagattgttgaaattggtgttctgatttctgtttctgctgaaattcagtgccaccttccttgcattagctgccttctcatagttctttgcataccaataggactccaacagaccttgtggtttttgcccacacacatcatgcttgatatcctctctaagcccaccgatgaagcagctattcagatactgttcctgtaagtaaggatggtccctcctgactagatccacatactcctcaaatttatctatatattgttccacagttgaaccatactgcttaacattctggaatagttccactgcctcatgctcatttgcagccgaaaaacgagtgctcaccatgtgacaccattgtggccaaggaatcaactgccaaggaatacctactcctctaaaccacttcattgctcttccctgcagatgtgcaattgccagattgacccattgatcatatggtgtcccagtaatctcgtagaatttctcacattgcttcaaccagtcaatgggatcttctcctgtgaacagtggtatttccaaccgaggtcccttgattacagcttcagcataatgttgattttctccttgataaaccataccaccaggtctgctatgatctaatatgtgaaccccttgttgcccagtgcctgagctagtggctgtcccttgtgtttgaaaatttgaattgggcactcttcccccaactgttgtttgagtttgaaaaggagctgagtttaagaaaggtaccctctggtttggaaatggggcaaatggtatgaatggtggaggttttgataatacagtagtcacctgccccaaatctgtctgaacactactgactcccccctgtggtctagcttcttgacccataggtgcagataggctcatagtatttggctcaatagagaactgaactcccaaactaggcgtggttacctgcacagatcgactgggtcctgcttctcccgtgctcttctcttttgctgcagcatctcccacaggattctcctgtccctcgttccccttctgtttgcacaactccagcagaaggcccttgatctccttcacctctgacctcaagcccttaagctctactacttccttcttcagagatgccacatctgagcgaaactcgttcatctcctccagtcccacaatctcatcgtttgagcgcatcttggtcaccatttcgcccctgcaggttaggttcagaattcaagattcctcccctattacccctgcagtcggatctacagccgccaacctcaaatcagaagcgccggagattttacaggtgcacaccacgaaagtggcaacccaacccttgctgtccgatctgaagcaccactcgcctccggattgaatccctcctagctcaggaattttacggtggatctcgccgccgccttccaccaaccttcaccagagagatccaagagccaaggattcgctcgtgctctgatacctctgtcagaaccctgaaccagaaatggagaaacagagtagcgatttgtgaattttggtaggatttgggtggccgccgcaagactatctcctagggttctaagttagctactcctaagacaaatagaaattgtgattcttcttatcttcttcccacagcaaaagccagcttaagtaagtttacagcagctaaaattattacagtgaatgtaaagagcaaaacgacaagctttgatagctacagcggcttctcatgacgttaacaccgtcggatccctctctcgaacacgtggctttgtctcatctcttagatcttcattacccaggatgaaacgttttctccctcctttgcatcttcagttaaccgaaactctgaactttctgaaatttcctccattcttcttacgagtctgacaagtggtcctttgttgaagaagaagaagtgcaggaggaggaagcagctgcagcagccaaggaagggggagaggatggaactgctgcttcgaagcaaaagggggaggaagccccgtctccaactccaaggtcgtcatggctgctgccttgtttgacgaggttgcaacttgtgggctgccccaagctgagggctctcccaccacagcttggacagcaggccaccaacttgaaggagttctttataagatgcacaagttgcttgaagacggtggaggacctcccattcctctctggtttccttcaagttgaaggatgtgaaggcctggagaggatctccaaccttccccaagtgagagagctgtttgtaaatgaatgcctgaatttgaggcatgtcgaggagttgggtggtttggagtggctattgctggaaaaaggtatgcaggagatctctcagctgtggatccctgggcttccggagcaacaccgccagctccatggagatgagcatgagctggaggtcaacgagtggctctgagaggtcaatgatttgtgtgtttcttcttcttcttcttcttcttgtaggtgtgtaggtaactccgcctatgtcacttgaggtgtttaatgacatagccggtcccaagcccggaaaaggaggaggggataatcttgtatatatacttgtctagtgaaacgatgctgtgctgctaggtggatcattgaaaattttcttgaaatttgctgcattcttgtctattcaattattagaggcacatccactctgctgctcgcctgctctattggacaaatttgattctaaactattttagctcaacctcattacaatccagttttcaagtaaaagcaattgaacacatgcaccaattcattctcctcccagtcccctgtttgggagcacgcacaagccacaggatgggcgactgtcgggctgacaaagccgactttggtcgacaagaagatatcgggtagcgagcaggtggctggcgagcaagtggtgacggtagcggatggtgatatggttttgtcggcgcagcctgaaaaggagatgaccgcggcaatgcttcttaagtcttcgggacacgctggttcgcactatccagtgaccggcagcaatgaagcagtggctgtcgggcttgcgccgaacatgacaccaatacgccgcagtgatcgttccaactccgagacagccctcggcatcgcttcggccgatgatgactctctgttgaaagcgatgaagaggaaagcagccatcaatctggatgatcaatttgccccttatggggcaaggccggccttgttggcttcccctcaaggtacacctaatgagccttttacaagttcttgttccgcttctcaacttagtttttgttcgtctttaaaccgtattgaggtctctttgggaaataattcttctgaggttgatttttctattaaagcccttaagcacatcaatgttgacaaattgaaagtaatccctaaagcaaactcttcattttccctaaaccaatgccgccatggatgagcttggagttaaggggtggcagggatggcaaaggctgtgagagggaagggaagagcaaattgagtggcgggagatcatgttcagatatttaccgacgacggttgggtttaactgggggtgaagacgagcggcggtgagctggcgtcctcccgggctcgacgcgcggcggcggcaaggggtaaaatatccggctcggcggcgttcggttcgagttgagagagggaaagttagttacaccttttgtgtttaaatgagcggcggcgaatttggagggtttcatccccggtagaggcgaagtcagcttcgacgtcgacatcgggtgggcgcgcatggcggcagacggcggcgagctgtggcggtggccgtcccggatttgtcttgacaagatttgtgcgacgacggttggttgaggcgcactggacagatggatggcgcgccaaggtggccgggcacgcgcgggcggtcgtggagcctacgcgcggcggctgcggcggcacgacgcgcagggcaccaaggcagcatggcagggggtggaaaggcaaagagaggccacagttttggatgggtgtggtcccccaaggatcaattctagactttgcaaatatttgggtggatgctgggctgctagggccgggctaggcatttcatcgagcagctcatgtgcaatgaacagtgaaattcagaaatttgacaaatttgcctaaggagaaaagaatttctctaggggtttttgaagggtttttgctagggttttgtaatataactaagtctaacaaatataagggtaatttaaagaaggtttctagattttaaattttgaaagaaatttgctaaactcactagagtttagggtaggggagtaattagaatatttttgggtacgatggtatagggtaggtttaaaggaattttaaaggggtaatacttgaaccaaaaatgaagattaaaaaggaaattttaaaaaggattttgattttgctaaattaagattaattcaagtcaaaagccagcatgatgcagtcaaattttagattaaaatttgaggatgttacattggagcaggcagcgcggttcacggaccccaccgaggtgaccgcgcccgctgccgtggggcagcacgggggtgccatttagaagctctggggcaatgccgacgaggtcgtgctcctcgccggcgccgccaccttccgcgcgcgctcgtccatgtcccacgcctcccgacatgggcgcgctcttcgactccatcaggggctccctctccctgcacattgaccaagccaaggtgtactacaagctgaagtggctcaagggcaagtacctgcacgcggcgcccggtgtgttcgtgggaccgcacgaacgctgcgtgcacaacctctgcacgagcgtgtggggcgtcgacctcgagccccttgttggcgacgatgaaggggccgccgccgtgtagcgcccgttccgtcgtggcgcctagcgggaaaattatctcttaaaaaccctaattgcgaaatatgtttctttgcttgttgtctagtgtccgtgccatctcaagatctcaaatccccgatctatcgtcgagtccaattccgaatccaaatccttccaaatcaaatccctccgcaaaagtctattttgcctcccccagggtcgatgggccgaatccctctcggcccatctaccc

SEQ ID NO: 4367 - DNA, 16105 bp, Oryza sativa
agggggaggaagccccgtctccaactccaaggtcgtcgtggctgctgccttgtttgacgaagttggatctcgtgggctgccccaagctgagggctctcccaccacagcttggacagcaggccaccaacttgaagaaactctttataagagacacaagatacttgaagacggtggaggacctcccgttcctctctggtggccttcaagttgaaggatgtgaaggactggagagggtctccaaccttccccaagtgagagagctgtttgtaaatgaatgcccgaatttgaggcatgtcgaggagttgggtggtttggagcagctatggctggatgaaggtatgcaggagatctcttcactgtgggtcccaaggcttcaggagcaacaccgccagctccatggagatgagcatgagctggaggtcaccgagtggctctgagacccaattaatttagatggtgcaaggtatgtacactaattgcttgggatttttcactggaataaactaatcattgggttgtacattcatgctgctcctctgctcttcacttgtatatatgcagctattttagcatttgatagtctccttagttgttcatgttgtgtgcattgactgattgtttaatgatttatatgatttagttttattttcatttgtgctacatgtaaccatttcattgtggtcaagattttcataaaatggtggatatcaatcgaaggacttgaggtagttaggaagaatcattttttcacttttggtacacaaactgcataagtaaaggagacatatgggccaagaaataaatatcatttagttcagatgcagaacagtttacttgcatttagccctcaatgacccaagtgtgttttgtatcgagattatgcatgtacataggagacattgaagggagcacatattatcttgtaaaaacaagtagagacgtcaatttttcatgaaatatttcaactgtgtaatatattaggcatatacaacggtcaatttagacttgcaagcgatacaacgcccaattctacagattttcggcctgcagcctgttggcagcaggacattgaacacaaaaggggcagcgcccaacatctgctcctaggccactaaggtttgtttggaaaataaaaagctgcctaaatgcctttgtatttgttccaattgattaatattttagttatatccctaacaaataaaataagcagggtacattgccctgcctacatgcttatgtgtagttcgtatgtggctttttcttagactattttttttcttgatgtctagtaggtttaactccagaaaacatgattgttgcaaaaactgatcacacttgtattttattttccttaactaagttattgaagtaccaaattgcttatatatagcgatgcttaatttgtgtgtgcttgtttattttgtaggttgctaatctcgaagatttgggcagtgcaggcactttcttatttatttgttatctttacctagttaccgatctatggaagatttaagaaatccaaaaaaaaagaaagaaaaagaaaaatccaaaaaaaggtaaaacttagcaaaaaaaaagaaaaaaaacaggggcatttgctttacctcatgaaatgtatttcatttttttttatgatttgtgtgtgtttcttcttcttcttcttcttcttcttcttcttcttcttcttcttcttgtagctgtgtaggtaactccgcctatgtcacttgaggtgtgattttaatgacatagccggtcccaagcccggaaaaggaggaggggataatcttgtatatatacttgtctagtgaaatgatgctgtgctgctaggtggatcattgaaaattttcttgaaatttgctgcattcttgtcaagttatttgtatattcaattattagaggcacatccactctgctgctcgcctgctctattggacaaatttgattctaaactattttagctcaacctcattacaatccagttttcaagtaaaagcaattgaacacatgcaccaattcattctcctcccagtcccctgtttgagagttgagaattgagctactgagatattttcattagtgatatctactgcactgtgcaacctcattacaatcacaggcagaaagatgatatgtctattagtactccttgttctttattttttcactttcatgatgtgtgaccaactgatggtgaaccaattccttctactttcacttttcacttagtggctttcaaaagcatagcccagatgctattgggacatgttacatgtaccgtttcacttcaattcttggttcctgtaaatggtcccttctcctatgccactatggcaccatccactagtaaggacagaagttagctccaagaaaactactagtggtactatgtatttatggagcagtgttgtaatgtcaaagcaagaaaactactagggtgccacttctgtaaatcagtatatgaacttccctactgaaaatgctgaacaactatttgtctgcaacagcgaaagacgcaaggtaggtacttgggtagtgttgtcctatgtcaatgcaagttaataattttatgcttaagaccgattcccccgcgtcgctctcgtgcgggcggctcggggggcgaaaaaaccctagccgccagcgcctccacttcctctccgttgcctcgccggagtcggagcttgccggcggcaagccggcagcaagcacggaaggcggcggcgaggctctccctcttcttggcgtatcccaccccggcgcgacgtggacggggcgcagccgacgaagaccctcaccgcggccagaggtgtgacggtgggatggtgtggggagacggccgccaaggctggatctggccaccccgcgcacggatctagcacggcggcgcgcggtggctgggagcggcggcggcacggcagcccgcagctcggcacggcagcccgtgcaacggcagcgcgacagcccagggcggccgcatgcccgcatggcggccctgcaagtcctcgcttccggggtgccgccacggtgcccttcacgaccaggtgggcggcagggcgcggtagttggacaacggaggcgtcgacgggttgcgccagagccggagtagcagtagcgtcaccgtcgtcggtgcaagcccagatggctgtgtaaagggagctggcggcggtgggtcatcttcctcgttgccggtcggcaccctcgcccttcctggagctcctccccttctttgcggggagtttctaggttggattgaggcggcagctcgtaagcgggggaagctcaggctgccgaagcaatgccacctagtcctgggttctccttcggccaaaactagcgaggcggccggtgggtagtggaacggaggcgtcctaggccagctctcaggggtggtggttcgatgaagtcggccgacggaggggcgtcggtgcggtgtggtggatgctgcgtgctgccatctgtctgtgtgggggttctgagttggtggacggcgatccgcagtcaagggtgtagggtatcaagcgaaagcctagtccggtggttcaccgggctggcagcggctatgtcttcgggcgttgtaacctccttggggcgttgtcgagggttaccctctcctttgctcgacgagcttctctgagtgaaaaccacatcttttttagatgggcgatggcggtatccttggatgtcgtgagcaccgtggtggcatcgttttcaaagcctcgtctgtgtggtgttgccgtaggcctagcggcgttcggccacgcttagcgggggtcgtttggtgctaggcttcaccctagcggtttgtgcttgggtggtagcgcgtggtgtatggcaatgcaccttggtgtattttgatgttttttcttgtaacttttactccttcttaatatacccggttggcctccttcagccttcccggtgaaatttttttttttatgcttcaatactgtaaattttgcacccaaactgcagaaaacatggagatgattccacaagtccacttccgaaggttcctagtagcagtgtgttgcctcatgtcatcatgtatgaatccaccgttctgcattacttctgtccatggccataagcacaaaaaggccacttgcaagcatgcaccactcaagtggaaccaaactggatggcttcagctcatggaattcagcagttgtagatgtaggtttgaagctgaggctacactgcacaacatgtggtactgactgcatgtagaacaggatactgtatatgctcaaacagttggtgaagtaatgggagcaggaatgaatggagggatgataggagtaccagactgacagtgtatctgttaggcaaattgagtcatggactatattgagtctctctgattgtatacagcacatcttgactgaattttgcatctgtaatgattgtctgcaaggctctttctcccccaccatgctgcgaaatgcatgtatatcttcagaaacagaaaacaaaatctttccctccgttatccacctttgtttttttattgaattcatcattctacatttaaacactgaacagaacaacttgtgagtcatcagaattggttcaggacagatgtgatgaccagtgccttagctttcctcatagctgtcccactaaattcttcaaattaaccgtaattttgatgccttcatatggtctgcaggggatgttaaccagtgctcttcttcgatacttgaaccttcctaatttttcacactgtattctgttctactagcaatgccttcccttccctgattcatagctcgagttgttgtctcaaactgatttctgtacagtgtacacataattctaggtaaaattataagggccatcagagattaatagcagttgagagtagctgatggaggtgtaatatggctcttgtattgtatctgaagagcagtgtggcttgtcagaagtactctaattgcacttccagtttcacacacttatctcttatcaacgtttcacctgatggcatttgatcactacagtatgttcatagacgttcaattctgacgcttaaaagttcactccccaaatcttcaacctctcatggactattaaattagaatctagcttagtgttcattcttgtactcttcacttattcagtatttcagttcactagttcagtgctctagtttcatctcaaccatttcgattttcgggtacaaattattcttcccatgcatgagtgacgcacaaaacaatcaacggtgtttggcgtttcatctaacctgagcgacgagaagggaaaggaacggcgacgacttggggtaggttcttcgagtcttctgcaggcttagggtctttccatctcctctttcagatcgaacaagttcagcgggtaccaagtgcgaatttgcagaggcatcccaatcgatagaggatgagttcgtcagtctgttccaatttgtttgtctgtagcattcacagattcagatcagataatatcatcaaggtaccacagtacctggtgcaaacctgagaaatttgcagagggattgtaaagtccaaactggaagaaaggtttccaagaagattgagttgttaaatgttcagtttgttcttgtttgtttgtctgtagaattcaaaaattcagattatgtcctgaccttgacttaaaatatacaaatgtactaaaattcagattagttctcctttgcaatggattgggctagcactatttggggattgagaagcactctaaaaatatgctttactgaacttgacgatcccatgtcagacgcttgccgatgttctgtaagctatgctgttctgcacacaacttatttattcagatgacagaattcagttttatactcgctccgtcccattttaagtgcagttgcggatttccatgtacaacgtttgaacatccgtcttatttgaaaaatttataaaaaaaattataaaatttataaatttggtggtacatctggacagccagaacatgaggagcagcggtgccgccccatgtaaagtttgtagctctaaacttgatttgaccttttcagaacgggtatataaggttatattcagtttaaaaactagctgggtggcccgcgcaattgcacggctagcatccaaacaaaatcatatattttttagtatgtttttacttaaaatttattaaatagctatctcattgttttaagactttaaaagaccaaaccttactatcctcgtgtttctgattatatagtttttaaaagtcacaccagttgctaccctttatgtcatctccttctttatttgcttgctcgatttaccactatttttattcattcttcttggaacctttataaattggattttatagttttagagtttattgtcacgttgggtttcgtttttataatttctagatgtcccatcaaatgttgccattatactcctctatggcccgtccagtgtttcttctctttattgtcattgagattttaaaagttgaacataattatcgtttgggttcatttttactttctagaagtcctaccaaatcatcagcggctttgccattgtactcctctacggcttgtccgctgcctcccttctttattgtcattgagattttaaaatcgaacctaattatcattgggtttttttactttttggaagttccaaacctttaaaaattggacttgtaattttattttttttataatttttagaagttccatcaaacgatgccactatgcctctctacagttcgtccatcgcctactctttattgtcattataattctaaaaatcgaacataactattgttggaattcattttttattttctagaagtcccgtcaatcgtcagcggttctgcaactatactcttatacaccccgcccgctgcttctcctttttattgtcattgagattttaaaaatcgaatatgattatcaatagggtttttttttactttctagaagtcccagcatctgctttacttgtttgcttcacggcctgcctagcgtccctccttttaatcgtcattagaattctattttgtgttttattaacaatttttatatgtcatatcaaccgccaccactctactcctttataggtatgttacttaatttatctcgtcatgtgttttagatggtcttttctttcaatagcctttatttttatcacaaactttagttatttataaattgtattcctaattgaaatcttatttttctttttctaatttcagaatttattttttttaaaaaattagttaataccgtattgtgttcttttaatgtttttatttttttattttcaatttcagttgtttcaaaattgtattcctacttgaactctcttttaatttttctaattttgatattattttattttttattcgaaattttaattaatttgtattgggttcttatatggattcttctttcaatattgcttatttttaattccgaatttcagctaattttaaattgtattcctacttgaactcttcttttattttatttttctaatttcagatttatttttatttttattctgaattttaattaatctcatattgggttcttatatgaactcttcatattcttacttagactctcgtttccttttctaattttgtattttattttatttttatttcgaattttgattattctcatattgggttcttatatggaaacttctttcaatattgcttatttttaattccgaatttcagctatttttagattatattcctacttggactcttgtttccttttctaattttggattttattttatttttatttcgaattttgattaatctcgtattgggttcttatatggaaacttctttcaatattgcttatttttaattccgaattttagctaattttagattgtattcctatttggactctcctttccttttctaattttggattttattttatttttatttcgaatttcgattaatctcgtattgggttcttatatggaaactttttttaatattgcttatttttaattccgaatttcagctatttttagattgtatgcctacttggacttttcttttcttttttttctttttctccgattaatgtgggaatttctagcctccacagcgaatgtggtgcctccttttcgaggtgtcttaataatataatagatagatgattcagttttcaaaatgttctatagtcgacctgtaactcgttttttaggaaaagtcaaactttaactgaaatcatagaaaggaaatcgtcatgtggtttctggccgatgttagtgaacggccatcttctgaagcagcacacaagattccaataatcagtctagggacaaggatgcaatagtgacgtatacgagtctacattaattttttatatctgcagctatcgtgtgaggacaataagccattgtctcgtcacaaccagaaagtaacataagcatacttatattcttatgctagaaaagaaacaagaggatcgaggcacatagtactatagtagcagcagaaactcatcgctgctgcaagcttttttttttttttgaacaaaccggcgagctgccaatttgaatagagaaggagcatcgctgctgcaagctcaattcatggcttcatacaaggtataataagttgctccctttgtctggtattgctactttacttctcagtgttgtgtaatttttgtttccgtaagttctccaccggcttccctcaatttaccactggtctcagtgctagctttgccctgatccatccatggcgggcttaccagcagaagcaactgcaacaaaggtagcgatgctcgctgtactcaggccagcgtctccaccaccttcagtctcatggaatatgttctgctgctaattcttacactccaattgttgctttgtttctgctacctgttttatgccaaactgcagtgaacaggtgaccagctacttttttctttctcccctttgctggcacttgataatttctcacatgtaaaatgaatgaaaaatttgagttcctcgccagtccagatatagacaccagtgccctcgacaagtgaccctgatcttatcatccacacgatgccctcgccaagtcaccatgatatcatcatccaagatgaataggaactttgcacaccaaccgaataggggtagagggatcactgcactatatgaaatttacagtggttagtatcgaatatgattttatgaaataattgccttcctccgttcattttagtatgttaattagtattgttttacagttgttagtattgtttgctgttaattagttagtcttattctcaccagtcctatatacaattatgtaattgtaaaagatgcaccattctttagttgtagtcccattttaagagtagatacactacactaaacagaaaaaaaaacatacttctatgaatacctcacatgataagaatgtagtaatagtttttagtgttggttatgtacctcatactgtgcatgatttgtccctagaactttagtttaagtatgataagctaattattgtattaatataaatgtcaattcagtagttatacccatggatgtctattttatcaatacaaaagttttagtgaacattatatatttttcagatcatgctaacagatatcgtgcattccttgccaacctacaatgctgtcactttctgaaacgttaaaagtggatctcccttgctgatttttcctatggcaaccatattagattctttggttggatcatgtgccaataagttgaaagagattattactgaagaggtgatacttattctagggatacaagaagagctcgcagagttgcagcggaagactgaactcatacattgttgtattagtgatgctgaggaaaggaggatggaagagtcagcagttgacaattggcttggtcagctaagagaagttctatatgatattatgatgttgatgatattattgacttggctagatttaaggggagcattctactaactgatcatccttcatcgtcatcaaggaagtcaattgcttgcactggcctgtcaatttccacttgcttttctaatgttcaagcacgtcatgaggttgctgtgaagattagaagtctcaacaggaagatagaaaacatttcgaaggacagagtatttttgacactcaagagtacggttcctactggaagcagttcagtattgagagtgagaaaaagttcccacctacttgagcccaacattgttggcaaggagatcatacatgcctgcagaaaaatggtagatttagtgcttgaacataagggaagaaaactttataagcttgcaattgttgggactgggggagttggtaagacaacattagctcagaaaatatacaatgatagaaaaataaaaggaagtttcaacaaaaaggcctgggtttgtgtttccaaagtgtactctaaagcttctcttttgagagaacttcttcgaattatggaagttcatcatgatcaagatgaatcaattggagagctccagagcaagcttgaaatagcaattaaggagacaagttttttccttgtgttggatgacatgtggcaatctgacgcatggacaaatttattaagaattccgttgcatgctgcagaaatgggagcaattctcataacaactagaaataatattgttgccttagaaatcggagtggaccatacttatcgagttgatttgatgtcaaccgacgtaggatgggagctactttgcaagagcatgaatatcagtgaaagcatagaattgcaaactctgcaggatgttgggattgagattgttcgcaaatgtggttgccttcctcttgcaatcaaggttattgctagagtgttagcgagtaaagaacaaacagagaacgaatggaaaaaaatattgagcaaaaatgcttggttcatgaacaaccttccaaatgatttgagaggtgctttatatctgagttacgatgagttaccacgtcatttgaagcaatgctttctttattgtagtgtatatcctgaagatgcaaacatttaccatgatgatcttacaaggatgtggatcgctgaaggctttatagaggaccatggaggtcaactactagaagaaacagcagacgagtattactatgagctgatccaccggaaccttcttcaaccagatggtttatattatgaccacagcagctgcaaaatgcatgatcttttaaggcagcttgcttgttatttgtcaagggaagaatgttttgttggaaacccagaatcattggtaggtaacactgtgtctaaacttcgacgtgtttcagtcgtcacagataagaacatggtaatgttacctagcatggacgaggtgcaatataaagtaaggacatggaaaacttcttatgagaaaacactcagagttgataattcatttttcaagagatttccttatcttcgtgttttagatttgactgattcatttgtaccaagcatcccaggttgcatcgggaatttgatccatctacgtttgcttgatcttgatggtaccaatgtatcttgtcttccagagtccattggcaacctgaaaaatcttcaaatattgaacttggagaggagtgttgctttgcacagtcttccttcagcgatcacccaactgtgcaatttaaggcgccttggcctcaattattcaccgatatatcaagttccaaaagggattggcaaattggaatttctcaatgatgtagaagggtttccagtctatggtggcagtagtaatactaaaatgcaagatggatggaacttggaagagttggcttatctttaccagctaaggcggcttcatatgattaaattggaaagagcagcttaccgcactacttacccattgttaacagacaaagggtttctgaaatttttgtatctatggtgtactgaacgtacagatgaaccatacacagaaaaagatttcagcaatattgagaagatctttgagcagctaattccgccgtgcaacctggaagatcttgctattgttaaattcttcggtcgccagtatcccttctggatagattctacccatttggcttatgtaaaatccttgcatctcttcaactgcaaattctgtatgcaccttccaccagttgggcagctacccaacttgaaatatctaaaaattgagggagcagctgcagttaccattattggacccgaatttgctggccacagggcgagtaatcttggacgaacagttgctttccccaagcttgaagagttgctcattagagatatgcccaactgggaagagtggttctttattgatgaagcaacgtcaactgctaaggaaagggttgatgatggagattctgcaataccaaaagagaaagcattacctccaaggatgcagatactgtcacggttgaggaggctggaactttctggctgcccaaagctgaaagctcttccacagcagcttgcacagattaacagtctgaaggagatagagctaagatgggcaagcagcctgaaggtggtggagaacttccccctcctctctgagatgcttttgattgcgacatgtcaagccctggagaaagtctctaaccttcctcaagtgcgagagctgcgcgtgcaagattgtccaaacttgagacttgttgaggatttgagcactttggagcagttgtggctttatgaggatatgcatgaggtctctacattgtgggtgcctgggcttcaacagcagtgccggcaacatcatggagaggatcttgaagtctacaattggacatagtaataatgtatggatgcccaaaattatttggacgcttcagttgtttgatgcaaggtatgtgattttatatactctggattcggattgcgcccattttttggcgtgctattgtgtacatagatatatattttttgctttaccagttctcggtcttgaggatgaaaggatctagtactttgtaatatcggatattacagatatgacaataatcccaaagatatggcagtataagaactaaaaaactgtacttctagtttgttctggtaatcctctattaggttctgcaacttccatgcagctcattatcagcacatcgaccttctactgagcaggaatgaatgaatggatcaacgggtagatggtaggagtaccagactgactgtgtgtatattcagcaaatttagtctccctgatgtttacagcctaccttaactgaatttcacatcagcaatgattgcgtgcaaggccctttttcctccaccagatgatgcttaaggaccacaaaatacatgtatatctcgatgaaccgaaaataaaagcattccctccattatccaacatcgttttttatcgagtccatccttctccatttaaacactgaacagaacagcttgttactctgtcatcaggagagatattatgaccaatacccccaggttttccccttgttattccgtattgttgaattaactgtagttttgatgcattcatgtgttatgcagggggatgctgatcagtgccccttttggatacttcaaccttcctaatgttccatgtaagctgttttcctaatttctcccattgtaatctgctctactagcaatggcttatctgctgcatctcctgtacaggattcagaactcaagttcttgccgcaaaatggtttctgtacacacaaaaatggctaaaatttcaaatgccaactgcgattaacagcagattgagttgctgatggaggtgaaaactcactatgctttagagttcgctcccaaatcatcaaccctcttatatggactccgaaatcagaatctgagttttgtgttcagttatttcagttcagtgatctagtttcatctcaactgttccgagtaattaacaactggagtagaaattatccttcccctgaactgaatcacaaatgcatcgcaaagcaatcaaagctgtggcgaaattcatctatctagcgacgagaagagaggaagggagggaggcgtcacgtacctgggttgaactcgaggaggaggaagaggccgcggcgtcgaccccgggcgccgtggcggcgaagggggcccatggagcgctccaacttctcctccgtcggatctctgtcgctccctgcggcccaccctccagctccgcctccgcctccgctccccgacgccatcgccgaggtggggggttggatggccgtaccaggcgctccacgatgtacctcactcactgactcatcggagaactcgcccgcagcaatggtagctcccttctccaccatcaacttcgccactcgtcggagcgccgccgtcgccgtcggcgaccaacgcgcccttttccaacgacaatacgagataatccgagggcttattcgaaaatgatcctccaatgctcaggcgcccttagatatcccggcccattaattagggcccacacgtcatccgcaaaccccttgatggcccataaaatatgggctccacgttgcatcccgcccatgttcacttgcagcacgttgggctgtgaaagggtccaaagtccaagtatcgccccagagacggcccgtacactttgggcctcacattgctcctgccctgcgctgacgggccgcatgtccgcgtagtatcgtcccggcccacaaattaaatggaatcgcttgctggcctacgcccattagtcggcccgaccgcaagagcgatagtctcctggatgatagaatccgccgccatggcagccgctcgccggagctccgccgactggccacggagctcctctccggcgaagatttgcatcacgtaggttcttcgagtcttccctttccataatgtgctttggctctttcatcttcctctctctgtctcacagatcagacaagtgcaaatgagagatgctgtactgctgagtaagcttcagatactgttgtgttaccaaaaattatctcgggaaaccaacacttgacgagcatgtcaatacctattgatgagagatgttgtatgtactgctgtttaagctatagaacctattgatgttatacagatctgagtgcattttttttctttgataatgtcaggtgtgagctcatgaaactgggattgtgttctgttcgtagcatcctcttctttcattctttgttgtgaatcaatggtcctgttgaagtcaccaattggatgctttgttctctatgttctgcttctgtagctggatgagtatcagtcactgtatctgaacacatacagagtgaactctatggtttcagagcaggtatgttccttctttgacatggtcatcaatctgaaagcatgtcctccactagcatgtgcagtagtatgattccatgatggaggaaacaaaacttaatcatgtgcacgtctttctttttcttttctaatcaaagtgcgcgcctgctttaacaccatggactataatattcacgtaaactaattataatcacatcaccacgtacgtccagtgcgcttcatgcagccacggggaagctgccttcttccaggtcaggattgtcgatcagagccaaaccaagcagtttgttcagagttcagaattacatagaaactactgaaatctgaatgctgaaaatgattttgttgttgcatgcaggcacagcgaggggaaaggaaggcatgacacttatcttcgtgtgctgcaaccccagctgcaatcacagatggagggagtgacatgtaaattaattgtaattaatgctactattatgctgcatgtaaaggcaatagagctttgcattatgccatgaattggtatatgtttactagtcaaatcgagggataagacgacaaacaatgagtatgagatgccattgagcccgtgacggaggaaacaaaactcaagcatgtgtatgctcacccctttgtaaaggcaataaagcacgcagctggtttcacatcatggaatcttggaagcaaactctaaattaatcacatcgaaataaactgtaaactaatcacatcgccagagcccaggcgccagctaatcgttgcaatatactattgcagctgttgatcagtgccctagaatatgtgagtgtagctaatagaagtacgaaaaggaaaacgcaaagttccctactaatctgtaaggtctattagtaggaattaagtactctctcaggagcctcaccatttgcattcta

SEQ ID NO: 4368 - DNA, 17836 bp, Oryza sativa
tagatccgcccctgttggaaagattataaaattttgatatttttgaagcactctgaatgaaaatgaaatgaaatgttgcttggattatgtactacctgggttgtggtggccgaagatgacgtcagcaatggcctgcccgccggcctggccggggtacccagcccacaggattccggcgatcttcgggtcgttctgcgcgacccaatggcgatggggccaccggacatgagcaccaggatcaccggccctttcgacgccttcgccaccgacgagatgagctccgcttgccggccagggaggaggaggctcgcgcggtccagcccctcggcctcgatcttctggtcgaggccggcgacgacgatggtcgcgtcggcgcggcgagcggcgtcgacggccgccgcgatcggctggccgcttcccgcgcacgccacgtcggtgcatcccggctggtgcgcggcccgcgcggcgtaccgggcgacgccctgcagcggcgttgtgtacctgcacggcttcccggcgtagttcccgatcatcgccaccgttgcctcggcgtgcgggcccacgacggcgacggcgcggcgcgccgtcgccggcgacagcggcagcgcccgcccgtcgttcttgaggaggacgatcccctgccgcgccgcctccaccgcgagctcctggtgcgccgccgtgcacacgtgctgcgggcccaggtgcccgaacggctgcgccgccgggtcgccgtcgaacatcccgagccgcatctgcaccgtgacggtgttcgtcaccgcggcatcaatgtcgccatcgccgaccttcccctgcgcgacggcgccctcggtgtactgcgccaagaacgggccgcagtcgaggtcgagccccgcccggagcgtcgccgcgacggcgtcctccctggtccgcgtgtagtgctggtcgctgtagaacacatcaaccgaatcgcagtcggagacgatgtagcctgcgagcccccaccggcggcggatggttccccggaggaacgccgcgtcggcgcaggtgggcacgccgttgacctggttgtaggagcacatgacgctggcggcgcggccgtcgacgacgcaggagcggaaggggacattgaaggtgtcctcgaggtcctggcgcgtcacgacggcgttgaagtggaagcggtcggtgccggaccagttgtcgaggtcgtaggcggtgaagtgcttgcagcaggcggcgagcttgaggcggccggaggagggttgctgctgctggaggccgcggacgtaggcggcggcgtagcgggcggcgacggcggggtcctcgccgggggtctcctggccgcggccccaccgcgggtcgcggaagatgttcacgttggggctccagaacgtcagccccgcctgaccgccgttgtacatcgcgcgaccctcgtcggacaccgcctgtgcgcatacgtacacgtacatgaatacagatatacgtatacagctgaagaaatacatgaattaataactctaatataaaacacacacataaatacatacatggattaataacaaaaggaatttgctagatttcagacatctaagaatttatactattttttcttgtcacctgaagtaaacattttggtatttggttagcttaaaattgcaatgtactaacatgtgccgttgtatttcattttgcctgtaattttttttttcgaattacatattacaacgcacgcacacccatccctatgaacgcacgcacataaactatttacgtaaaccctatctctacgagcattttcgaagactgggttgcattatatagttttacttaatttttgtttaagcttaaataattgtatagttctattaaaaaaatactttgttatgaatattttttttgactgaattattttgaataattaatagtagaggggatgagaatgatgagaaacctgaaaaccagatagtcctgactagtaaaaaaatactcctaaaatataaaaagaagaatctttctatggattgttcatcatgggcaggatgacaacgagtcatggttttgatcacagtggagcacgaatcacgaggcaggatcaaatatataattgactctcctgcaatcacatggccgtgtaccctatcgtgtactcaaccaagttactatgcaacactgcattcgcacgtgaattctcaaccgtgtgcttgtgctcacattcacgctcgtgatcgaattcctctgcaaatttcagaagatttttttttttaaaaaaatgtctgcaggttctctatctctttggaaacaagacatgcagagatcagatcagacacaggtccagcaacttgccctgaaggtccaatttgtgaccactgtttgggccttgaaggcctcaactactcctaatacagtactcttgtcttgctaatcttgagagagccataaatgaggcatctgaagatcttgttctgcaagtatactaccaactgcagctctacaaacaagtcaacaacctatggatcacattgtactggagcactactgatcaattgatcatagatcctagatcgacaaatggtttcactgaattgttgaactgccatacctaccaatgggtaattaggagtaaaatggccattatatgaattcaccatgacacggggagggctagcccgccgctcggctcgccgacgaaaactccattaaatttttaatattgttgaataattaaattgatgatagaatttctatagcaaatgatagttataatgaagtttgtttgagctaaaaaaaagtttttctagcttcgccactgccatgatatgaatggaattcaatatatatgtaataacaaaaaggcaaaaggccaaaaaggtttgatctaaagctaaagttaaagcttagcactgattatggtaaacaaaattcagtgcaaacaactttgccagaattttagtgatgaagagagaaggacatgctaaaatgagagaataaaggtgggcaatatgctatgactacaataacaagagcaacatatcataactctatccttatggactcttctgatgtaaatagttgctagctgcctcctacacttcaccttggccgttggttgcatcttgcatggccacctttcagaatgggcatcacctttaattaaggtgtaccaactttacacatttacacattgaaaaatattttcttaattagctaagataagatatcagaatggggctcaaaagttttagatttggctaggctggcttgcacatggctgcacccctgtatcttgcacaccattggccagcacactatataggacactaggaattccattatgtccttcctttttggacttggacacactagcaaggtgtgcatcactcttgggtcctaaagttttgtccattgatgataatgaacttctaaactaaatttaagtgcatgttattgttttgatcaaatattaggacatagtctatttctcaccaccagtttttggttatgaaaggtgcatgatgcatgcatgcttttacagggctaacaatggtaaaataacacaatgattaaggtagaatgtcacatcacagttagcctaatacatgcatgagatctagatatattcttcagtgtagagcagagcatagcatgtgcattgcttgcttgtcattttgctaagacagaccatgtacaaacacggtgccttaactcacaattagtgcctaacattatgtctagacgcaagctctaatgtcttatctacaaaaagataagtactacacacatataccatttgtgtgaagctaaattaacaaaaaaaatagctagtaaatgcatgcagagcaaatcagttcaccactagtaccaaaaacgccagtaaaatcaaacaaaccagaaacaaagtacccttgaaaggttaaaagcagtcacttgcaaaaaggccaaaagggcatatggatcattagccttttcttctttgtaatcacacatgttgtaggctccacacaaaaataataatacaactccagtgctctatccattccaccaaccatgatccagcagatgctattgctgggccagtgtcacagtgaccctctttgctcatgcagatatttaggccaactcataactgaataaaaacttgttcatgtaaaatttccacaaacttttatcttgcaaacattatgtgcttgaagtttgagaactgccatgcatacaaaaaggttttgttcactacatcttacacttgttcaccaaaaaataacattttctgttataaagattgaaaattttgtggacacgcatcattattaagcaaagtggtggcaaggatgctagtgctctatccaagtattatggaccgtgagatatgtgctttaagattcgtacccaaaatcattggcactaccaagtaaaaaactactcattctattccaaaataaaaacatttctagaatagtgataagtcaaatatttttaattttaactattaatagcaaaaaatcaaaaagatcattcatctaaaattgatgttattagatttactattaaataaactatcataatatgtaacttttcatttaaaatattttattggttaaagtagtattttaaagattgcgtggaagatttatattttagaagagagagagagagtataaaccatagaaaaaaaatagagaaggacagaacctgagacaagcgcgacgcacagtagcgagtgacacagacaaggacgccatggcgcgcacagacatgacgaagagaggcatcacatgcacgcacaacaacaaaaccgcgacaaaagcaaaagcgccgcgcacgccgcacgcgcgccgcggcgtcccgtgtccgcgccgcgcgcgcgccacggcgccggcgacggcgacaatgccggcgacacagtgttaagtgtggaacgtacctgcccgatgagctcccagagggtggcgttgaacgacgcggcggtgccgatgacctgcgggaacgcggtggcgccggggaacgcgccgccgaacctcaccccgggccccgtgtcggacacgccgtggagcgcctccgaccaccactcgtacccggcgacgcccagccgcggcacgccggcggcgttgttcaccagcagccgcaccttctcggcgcgcgtcagccgcgccaccaggtcgcgcgcccgcgcccgcgccggcagcgaccgcctgcagaacggcagcgtcgccgccggcccgcccgccgcgcacgcgaacgccgaccgcgccgcgacggggacgacgcccccgccgaccgccgccccggcgagcaccaggagcgggaggagcaggaggcgccgcattgtggaagtgaactcctcctctgcaactgcaaggtgtttgtggaaatggagatggcgaaggcagcgtgcttatataaacccaaccgcacaatctcaggggctctgcaagttgcaaccaacccccagaggagaggagcaagaaaatggctaatttctttctctcttttttttatactttttgtttgcaaagaaaagtatatgcttttcaattaaaaatttacagcacgttttcagtattccataaattatttggtttgcagagaaaagattaattaaaattcaatcaatgtctcgggtgccatgagtttctttcttcaattttgatcgtctgttttatttaattgttttaaaaaaaataaaaaacataagtcatgtataaactatattcatgttttataatctaataacaataaaaacactagtagtaaaaaaattttaaataaaacggatgatcaaagttggcacggaaaatttatggctgcatttattttgggatggaagaagtagtaaattgcagtcactgctgctggctagtcctagagaaaacttaaaaaaaaatcggtggctgccagtttgtgtgctgcgtgctggtggtgttttcattctcttgtgcatgtgagcatgtaactgtgtgtttgtacaatgagagaagtaataaatcattttttccctttctttttagtaatggtgtttgtactgaatgaaagttggtggtgatggatatttgtgatttgtgcttcaaaagtcagataaagaagtaaagcggtttcaaggacagggcacggctactttggagcaggtattgacgtactaggctctgtactgtactggtgtaaagactgcttttagaatttacaaaggtaattactgctatgattaacatctgaacatatccattagctttaactcccaaaacaagtaccttcaaatctagtagagatgaaaatagaggaactttcccatatgaaaagcacctaacaactttccctatctcctttcttcctctatcccttttaacctgaattttttttgttggtttatcttggaccgtccaatcaaagagtctatgattttattctagaatagaaacaatgttgaaacagaagatttagttcattaccacactagacaacaaacaagaatctataagttccaattaaggcctataaatatctctcagtgatcaccatgtcatcttgatcttttatttgtaaatgagagcatgcttttaatcataatctgctttttagcctctgtttggttctgttttggatttatgagagcaaaagagagagggcctgcttgcctttagcatcacatttgtgtaaagatgcattcatgccttggaaggaccaccttgcagaatggaaggatatttctccacacatatgtcatcagactaatctgttcacagtactcatgcaacaactcttccataaaaacaacgtggcctcattagcacaaagctacatgtttcataagcagaagcacaagctcaaatcctacatcaatcaaagaatgcgtttcaaacaagcccaaaatgttactgaaagcatcttaacgatgtactttgccaagtttcatttcacacaatatatattgactcttgcactcaccgttaatcttgttgagcagttggtaatccaatcttttttatggtcagttttagtgagcaaccaacttggaacggcgtactacgtatttcgccggcaagcagttgttcagtacttcaacgtacagatcaaaatgtcatgatttcacctaacacctttatacaaaccacagtccagtgaattacaaatgtttttaaatgcaatttcatcaggttgtacaaaatgttgaagaagttcattctgtcattaattaatatatttaatggcggcgcctatcatgcacctgatttgatcgccagcaagaagaggattagaactgagaataacttcgcttgaagaaatcggactagtaggttgatttaacaagctttgctggaagaactaatgacgtgtcagaattacttaccgtttagaccaatgcaaaggatacgaaaagcttcatcaaaatggtttccttgtacggaggtattgtttggcaactttgctgacatggattgataaatgagagcgaaatgagtgtgtcactgtcaaatcggattagatgagtagttcagctgcaaaggttaaaagcaagaggataaatacgatttcagaattcagatagcaccaaaaagagtaaccaaagtttgagtgttaatagatcatctgtgcacaaaacttgacgtctcttgcaggtctgcttgtgcttatcccttttcactctgtttaaagcttcttttctttttgtgaattcttgaatgttgatgaatgaaaggtcgagcaaacacttattcttattcgcaactaaatgcttccaaagaagaagcatcactctattttccctaatccctagtgatttctccactacactgtgcaacctatttctgatggcaaaagtactactatatattctaatgacaggcagaaagacaacatgcttattagtccttattcttttccttttcactttcatgatgtgtgaccaattgatggtgaactgttagtggctttcaaaagcatagcatgttatacatcactctgacacaactaggagaagggagaaagtgtgatgtccagatgctaatgggacatgtaccatttcacttcaagtattggctcctgtaaatggtcccttctactatccattatcccttatgccaatgccactatggcaccaccatccactagtaaggacagaagttagctccaagagttagtggtacaatgtatttatggagtagtgttgtgatgtcaaagcaagaaaactaccagggtacccacttcagtaagtatatctgtatatgatcttcctcctgaaaatgctgagcaactatttgtctgcaacagtagaaaagctaggtaattagactcactgtgaatagatatttttatgggtttagtcatgtaaattctgcatatgtagctccccaaatctctgcagaaaatatggagatgattccacatttccacttcccaaggcttttagtggcgttgttgcctcatgtgcatccacaattctgcatcacttctgttcatggacatacgcacaaaggtcaacttgcaagcatgcatcacccaactggaaccgaactggatggcttcagctcatggaattcagcagctgttgatgtaggggttggtgctgaggcagtgaggctatgctgcagaacatgtggtactgactgcatgtaggacaggatactgcatatactcatacagttgaagaagtaatgggagcaggaatgagtgaatggatggatgataggagtaccagactgcagtgtatctgttgggcaaattgagagtcatgggctctattgagtctctctgattggatgcagcacatcttgactgaattttgcatcagcaatgattgtgtgcaaggctctttctcccccaccagatgctgcgaaatgcatgtatatcttcaggaacagaaaagaaaatctttccctccattatccacccttgttttttttattgaattcatcattctacaattaaacactgaacagaacagcttgtgagtcatcaggattggttcaagacagatgtaatgaccagtgccttagctttcctcattgctgtcccattaaattcttcaaatcacccgtgatcttgatgccttcatatgctctgcaggggatgttaaccagtgctcttcttcgatacttgaaccttcctaatttttcacgaggctttttacagtctttgagtgaaggaggcaccatatcctagccgtccattccactcaatctaatggcctaggatctcccgcaaaagcaggtaccgaatgttgttgatggtgggagggcaattttgtactttcgcttgcaggaatcaagttggagcggagcaccatctgtccgatgcagtcgtctactcatcgactcctcaaatcgaacagaaaccgtataggcgaacacgggcacacggcgacgagcctgagacaaccgatgcggtggtcttccgggcggcagtgacctcgggggaggtgggccgatagggaacaccggcgacttcgtggttccctcccgtcagtgctcccgcttcctccctcctcccggttcgatcctgacggcgccgcattctagtccctcctacccattccaccagagcgaggacgggcatcgcaattcgcaagggcgccggcagctgcaaggtcaaatcgcgccagggcgattggctgctacgggctacggcgaggccaccaggaaacttgaagcagacaaagcttttcactcgagaagctcatctagagaagccaatataaatccacgaatttcagaggcctcgtgccaaggagttagaagtcctgcaaaccaggcatttgtttgcaagccaattgcatcattatgcgctgaaccacaactaattacagaaaggtttacaaaagagccttttcaagaacaatactccaactaaaaaggaacaaggagcttgaagaacagtcatcatcagaaagttctgaatacatgtctgacataaattcctaacaaatcctatattccacaaacaagatctaaataaccactgcgtaccacaccaaagaaggttcagagttccacacttccacttcatttgagtttcagaaggttcagagttccaggaactgaacttggcacttccacaatactgaacactcatacttcatgcgagctttgaagcacggcatatatactagcacaagacaaaccactatgcatgctatggacacgacatgactgtcaaagtgtggagctctggtgctgtgtggagttgggcagggcacgatgatcaagagcaaggggggagatagccgacagatgaaggcaacggcgccctgtggctgcagcagaaaggacaaagaatcggagacggccatgggagggagcaggggcaccctgccgcggggaggatagagacgctagcagaagaagcggggaggctggctttatgaagcagcgacgtcgtggatcgatggtcggcggcgagatagatgggtggaggcggcgctatagatgggtggccaacggcatcctggaggaaaggagaggccgcgccatctagggacgtgcgccggtgccaaagcaagtgaaaacaaaggatgcggagcggaggggaagaggacgaagaagaagacggagaagagacgataccacacgcgcagacgtgctattccgatcgtatcctttgtgaacggacggatggattgagttggtacctcctcaaagataggaaaaatactcatttttcacactgtattatgttatactagcaatgccttccctgattcatagctcgagttgttgtctcaagggatgaaactggttcggatagtttccgtccgtccggaccatttttcgaattcggatagtttcggtcggaactatccggaaattctcggattcggaaacgaattcggattttttttctcagaaacgaaaacgaatacagtaagggtactatccgttggaatcggaaataagtcggaaactatccggaatttttttcagatatccgcagacattgagtaaattttagaaaaaaacacgtatatatgcataactttttcatacgaaatcatatgaagacaaactttatatcaacattgtaaagctcggtgagatctacaactttcttattgactattttattatttgaggtcatttaagggtctaaatattcattataatataccatattaatttttacaaaatctcatatctaccatccaaacgacatctgatggagatgtgttacatatcaaagttgtagagctcaactggatctaccactttgtagtttataacatttgtatttgaaagcatttaaagcataaaataaatattgcaagtttcgaagatgcgaagtaaaataaacaacatctccaatttatacaatggcaagtaagttatacatctagtagaaggtcttgagaatagaaactgataatcatatttgcatatgaatctcttagaggaacaaccataaaaatcgattttcacatacggttgtgagaccgtctataaaattgacgatataaatattggagatgttgaactaaaataataagtgatatctcttcctcgatcaagaaactcaatttgaggggccttttatataccggtaaatattcactaccgtattcgttccgtctcgtattcgctccgtatttgtattcgataatatttgatttcatttccgtatccgacttttcgattccgattccaattccgaaaaaaatttatgaaaacaaatatgataaagctaatttccgtccgttttcgatttattttcatcctctcatggacaattaaattggaatcgagcttagtgttcattcctgtactcttcacttattcagtatttcagttcagtgttcttagtttcatctcaaccatttcgattttcgggtacaaattattcttcccatgcatgaatgacgcacaaaacaatcaacggtgtttggcgaatttcatctaaccggagcgacgagaagggaaatggagcgctcgaccttgccctccgcgctccgccaccggtcttcagcgccatcgccgaggtgggggctcgctcgatggccggaccaggtgctccgtgctcgaggatttacctcactggctgactgactcatcggagcgctcgccatcaacctcgccgccagcgccaccgtcgccactcgccggagcgccgccgccgtcggcgacccacgcgcccttttcaacgataatacgagatagtttgagggcttactcgaaaataatcatcagatgcttacgtggctttaatctcagccggctgtgttagatcaaacgggtgtaaagatgcacatgtaccttttttggattcaaaaatggaaattctgatagctaaaggactcgttcaaaaaatcacctccaacaactggccaacgttaatatcgaccgctagtgttcgatcggacggtcagcagagatagaggcccatcgacaaggcccacaatctcgtcgtgaatatggggccgcacgttgcctccggcctatgttggctagaactcgccgcagtacagcctaggcccattaattgaggcccaaatcatccctcacggcccatacattatgggccacaatttgctcctggcatgtggtggcccacaaattaatcccaacagcttgatgggcccatacaatatgggcctcacgccggcagcagctcaccggcgcatcccgaccagccatgggccatggcgctccactccggcgacgacttggatcccgtcgtttcttcgactcttcggcgagcttccggtctttcagtttcatatttcagatcagacaagttgagcgggtacggaattcaaatttgcagagggatatcaactagaagcaggaatcctcgatagataaaggataatgaagtttgtcaggtatatgttgtctgtttgtcagtatcattcaagattcagatcaggtagctcgacaaggtaaatctgagttcccctcaatcggctgtgaccctttcatatttatagggtgggtggacagagcttagctcttgtacaagtcgaattcatgacaaattcgttaagaacacatactctcttttcggataccaaaacaggatcatccggtttagcaggacatattaattttaactgttactctctccattttaggttataaaacgttttgactttagtaaaagtcaaactactttaaatttaactaattctataaaaaaagtaataatatttacaacactaacatagattcattaaatctataattgaataaatttcataatatatttgtctcgggttaaaaatactaatactttcttttctataaaattagttaaactaggagtagtttgattttaaccaaagttaaaacgtcatgtaacctaaaatggagggagtaactccttgtagtgacaatcaatacttatgttaatggttggcatgggcaacgattgtgtccaagactcattctccacccatcagccactgcttaggtgggatggaacccatgtatatcttgaggaagagaaaagtaaatccagctttgtttattacattgaattcatcttatccatttaaacactgaaaacaacggtctgtccgctgtcatcaggattggttcaggaaaaagctacgagagtgccctaacttttctccttgttatcccattacattgtttaatgagagaatatattctatctccctaagtttactccaattcaaggatttgccatcgattgtcttcctctataatatgtcatcaactttgtcaactttttctacaatatgctattgaggtggatactttttcaaataaaaaaaaaactaaaatgtcactcaagacatggctgtttggttgccgccgtagtttgcctcagtagctgtggctcaccatgcttggcttgccacagttgcctaagctttttgtgtctgaatgtgcttgccacaacaacagcgccgcagatgaggcgatgattttcagcgccacaggtgtggcgtgtttttgtactgggagcagtagtggcagccacagctttcacgggaaccaaacaccagccgcactctcgatctggcgtggcgcatgttggcaggaaccaaacaccggccaagctctccatggctgccgcaggtgtggcgtgccgcgcggaggcgggcaaccaaacaaccaaaccgtcggtgtgccatctgcgcccacggtaaagatgttattttccaggccaggattgtcgatcacaaccaaagcgagtttttgttcagacttcatactctttggcatatagaaactactggaatctgaaagcccaaaagctttcgtcattgcagagaggccacagtgaggggtgaagaaagcatgacgtttcttcttcgtgtgaagggagtgtctatgatcattgttcgtctctactactagcatataaagtagtatgcacctctttggctctttcttttttcttttttaatcaaagtgcgctcctgctttaacatcatggaatataatctttatacttaaactaattataatcacatcactaggcgctagctaatcatttgatttacttggaaattttggtgcatcaccattaacgagtttctctatggcaaccatactagattctttaattggatcatgcgtaaacaagttgcaacggctcattactgaggaggcaatacaaattttacatgtaaaagaagaatttattaacaaaacaaattacatattctgccaggaaactgtgagacgaatttattaagcctaattaatccgtcattaacgaatgtttaatttattgtagcaccacattgtcaaatcatggcgcaattaggcttaaaagattcgtctcgcaatttcctggtgaactgtgtaattattttttttgttttttttgtctatatttaatactccatgcatgtgtctagacattcaatgttacagcgtgaaaaattttgtttgggaactaaacagcccctaaacagggcctcataagagcaggtacaatagcaggctataagccagctgcaaacatattttaagaagataaataaggagagagaaaaagcagcgggctacagatttgtagccagatgtagcacggactccaagacgcggtgtgtgtacgacaggtgggaccatatattaatagtgtagtatgcaactattgtatgaatgggctattagattggctatagatgaattggagctaatagttggctatactattaaacttcacaatttttgacaatttgaccctttgcaaaaactatttttacaaatgaaccgctgccaaaacttatttcaaatctgacccttgtgctcaacgccaaatcatgtggcgctgaaattaaacacctcagcgccacgtcagctggcgctgaatgccgtgccacggcggatgggagactaagtcagcgtgccaacgtacattcagcgccatgctatttagcgctgaggtgtctaaattcagcgccacacgatttggcgttgagcaaaagggtcagatttaaaataagttttggcagtggttcatttgtaaaaatagtttttgcaaagggtcaaattgtcaaattttgtgattaaacttgctctaagaggacaggactatgatggtccatacatgccatcaaatgcacactcataaagtctgagttgtcagtgttcaaactgaaaaacatcacatggcaagctgtaagttattgcctacttcctactagtagtactggtagtaactgaaagctccaagcagcaacaatctcatatcgatcctctagctccctcgtcagattacaggggaaacgttcttgatcatcatctccctcgtcagcggctgcacgcaccaattaaggcctcactctgaggcgagtctttcttcctcacgcaccaaccctctgcttgcccacaagctctggttccttgcggtatgagctgattgaaacatcggattgctcagtggtcgtcatcttggcgtgcactgctgccattcccatcaatccagctccattcggcctcgcctttcatgtccagctagttcaccttgtatacatgaagagaacacctcatctgtgctggttacttcgtcttttcattgcccattgaccaaagaagctatcgaaaggtaaccccattaattcttccaattcttcagcttcagtatactaaattacttgctccaaagacattgcaaaatagcttgttagctagagatcgtgctcctgcgttacataaagatgaaactgagtaaacttctgatcatcttcagaccatgttattattgttaataacttggaaattttcttgcatcacctcccatcatcactttatacgttatatgcataactctcaaagacagaagaaaaactcaagaacatatacaaatgagaatttccaagatgatttctactgtaatattgaaaattataaagtaccatccattcttttcacgccagatgactactttataaggtagacttgcatgtaaggatgtacttcaaatctcttgttcttctagctgtgatcattttattgtttttttttcaggaggagaagggagggggggggggggtccataatgttagttactacagttaaatgcgctaacacaactcctaggctagcatgtgcgaagtagttatagaataaaataagatagatatcttaatgttacgccagcttttggaatcatttctggactgcattaatttttaactctcttctggtattttttgttgaattccctaaaacagtttgctggatggcaacaatagtggatactttggttggatcatgcatcaataagttgcaagcgatcattacagacaaggcaatactcattttaggggtaaaagatgagcttaagaactgcagcgaagaacagatctcataagatattctcttcaggatgctgaggcaaggaggatgaaagattctgcagttcaaaaatggcttgaccagctaagagatgttatgtatgatgttgatgatattattgatttggctagatttaaaggaagtgtcctactacctaactatcctatgtcatcgtcaaggaaatctactgcttgcagtggcctttcactttcatcctgcttttctaatattcgtatacgtcatgaagttgctgtaaaaattagaagcctgaacaaaaagatagataacatttcaaaggatgatgtatttttaaaactcagcctcacacaacataatggaagtggttcagcatggacacctatagaaagctccagcctagttgaacctaaccttgtgggcaaggaggtcgtacatgcttgcagagaagtggtggatttggtgcttgcacacaaggcaaagaatgtttacaagcttgctattgttggaacagggggagttggcaagacaacactagctcagaaaatattcaatgataaaaaattagaagggagatttgaccatcgtgcctgggtttgtgtctccaaggagtattctatggtttcccttttggcacaagttcttagtaatatgaaaattcattatgaaaaaaatgaatcagttgggaaccttcaaagcaaactcaaagcaggcattgcagacaagagttttttccttgtgttggatgatgtatggcactataaagcatgggaagatttactaagaactccactaaatgcggcagccacaggaataattctagtaactactcgagatgaaactattgctcgtgtaattggggtggaccgcactcatagagttgatttgatgtcagccgatataggatgggagttactttggaggagcatgaacatcaaagaagagaaacaagtgaaaaatctacgggacacaggtatcgagattgtccgcaaatgtggtggcctacctcttgcaatcagggctattgccaaagtcttagcaagcctgcaagatcaaacagagaatgagtggagacagatattggggaaaaatgcctggtccatgagcaaacttcctgatgaattaaatgg

SEQ ID NO: 4369 - DNA, 6970 bp, Oryza sativa
tcccccccctccccccaccgctccgcccgcgcgccgcgcgcgcgtgcgcgagagccgcaccgagcgctccctcccccctccgctctgcccgcgcgcgtgcgcgtgagccgcccgcgccgagccgagtcctccctctccgctccctcgctgccacttcccgcgcgccgtgttcgcgtgcgcgcgcccgcgcggtcgccgcccttgccgcgcctgcgccgtctgtgccgcctggcccccactgccctaccgcgcagccgcccggccccgctagccagcgcgcgtgcccgagccgcgcctctcaaaccgccgcgccgcccgttgcttcccgcgcgcgcgtgtcgtggtggccgaccgcccggtcgccgccgccgtcaccctctgccgcgccagcccgcgcctgtcgcccgtgtcgtcgcgccgctccaaaccgtcccgccgtcatcgccgtcgtcatcgcctcggccccgcctccgcgcgcaagccaccaagggacggaggcagagcccctcctccctctgccgcgacgcccccgctcccctcctccttttccaaaagcggcaaggaggcaagcccctttttctctccctcttttcccctttttccgtcaccgctggcgtcatcctcctccctccgccctgtcgccgatttggacgcgagcgccgagcgccagctcgcgccttgaccgcccaaagtcggtttccaaaccgacattgccgcccttaaagccccgggcgccctccctctcttctccttccatcgcctccgcgccattgccgccgcccccgtgctctgttcgccatcgccgttcgtcgttgcgcgtgtcggaggagccggcacgagcaaggacgcggaaggggactccgggcgcgccctcttcttcctcttccccggcccgaggccggagagattactcccgcgccgtcggcctctcgtcacagcgcccctcctcatcgcggtagtgctccctccgttcttcctcctcgctccacctctccctcttagttttcggtagtagcacgagtagcctccccgtagctagccggcgccgccccggccgttgccgcctctcgccgggtgctcgccgccgtcgccgcccgagctcggaagcgccgctcgtcgccggcctcgctcggcgtagctccgcccaattcgacgctagcatcggattcccgtggccgcgtagatgctctcgccgccgggaatcggcccctcgtgacctcgtcgccgtttccccctttttccgccgccggatgccgccgccgcaattcgccgccgtcgggcatcctccggcgaatccgagccgttggctcgtctccccttgtcctgttcaaccatccggtgtgctcgctttcgcctgtatcgccgtggttcgctccgccgctcgccgctgtcgtccgccgtccgttccggccggcgtcgtcgtctacctcccgccggctcgcgtggcagccacgtaggcgccagctcagccaagaccgggtcgagccgaccccggtcagcccctcctcgtgcgcgcgttccaccgcgagccgtgaggctgcgcgtgggcccgccgcatccgcatccaccgtgaaccgcgcgcgtgcaccgcgtccctcccccaccctagcgccgcgccgcgtgctccctccgcacggtgagccgagccgctgacaagcgggtcccacccgggaccgggcgtggtgagcccggtccaccggctctctctctcctccctcccgcgcgcgcgcgtcttgggccgctctgggccgccttcttgggccggccggcccgttaagcccggccgagccgccctttctctcgggccacgccctagccgcccgagggaagtctattttccatccctcttttcttttcttttcttttctttttcaaaaaggatttaattaaatccttttcctttagaccaaaaatccaataatcttagaaattcaatatcttcccaaccgtaaatccgtttgactccgttcaacttccaaaattcctcaaatctcgagatctatctaatggcacgcttagaggtcattaatagggctttattttcgccgtttgctgagttgtcccgtttcgcgtgtagtttcggagcccgaagacccgcagcgcgaggatttcgaggatcaagctccagatctcgagcaaggcaagccacctttgaacatcttgagcctatatttgaaattcaattatattgcttgcaaaatattatgcattgataggatcgcacttaatctgttgtcccgtctgcaaggcagatcggcggacctacctaacttgttgcatttgatccttccattgttaattgctataccatgtccccttgtaaccatccagttgcgcctcgatattcgtgcactctgtgcgagtatcgacggtcgccttcaaacttaaaatctgagtaacaatttgggtaaaactggagttttacaaaagacttggaaaacccgacacctgggtcggtgcttgcgaactaaatgaatttccaaaaccgcgaaccggggaacgtaccgggtgtacggttttcccgctcttgcacttaaggatcgtttccttggaatttcatccgaacataagacaagtacgaccacataggtggaatgggacacccctggctgagtaactagcttatcaggggagccttgatgccgagagacatgtggattcgccggggtggtgtcggggaggacccctgggcttcctggcacagtatggtctgggacctaacctgttgttggtctgggacccctctcgtcggcatatggtaaacctgtgtcggctttggaaatgccttgtcatgaaagcttggaggtctcccgacgtggctgatccccacgggctgggtgatccgggttagtaatgtcgtgtgggtaaagtgtaccccctctgcagaggttatcaaactattcgaacagccgtgcccacggtcatgggcggatgtgaggtgattcctagcgtagttttgtttgactactgcttgtgaaattgctgttgtgaaaaaggggttcgatgtttgaaaaatctgtagctgaagggatcagctaggcccgggtggccgtttggaaaagttgttggcccgggtggccgtttgaaaagttgttggcccgagtggccgttgaaaagctgtcggccgggtgccaaccttgtttcaattctaaagactgatacatcgcacatactccgaccggacgagacgcactgtcttatccgtgtagtttgagaagcactcacttagtcgttcttagaaaagagttcaaataaaatcaattgcaaaaacaacagcctctccttgaagcctgcattaaacacctattttcccttggcttgctgagtactcccgtactcacccttgctctatataaataattccccccccagttgctgaagaagatgaagcggatcctgctgatgagaagttctttcaggagcaagccggctacaatgagttttagggtttcggcctagttcccaagtcgcgcctgtgttgtttggtccaagtcctgcttccgtttcccttttgtaatgcagttgtgagctcggggtctgtccgtagtccaacatgaccgtatctctactctataataaagagaccgctgttgctgtgatattctgtctccttgtgataccagcactgtttcctgggactggtatcgatcaacaggttaatttggagcgtcacgggctagttccagtcggtactagttcggggcgtgacacgccgcctccgccgaccaaccgcgcattgtcccagacgccgccgccatgctgcatgtgctgcatgccgcctctcagctccatcgccgcccctctgcgccgctcgctgccgctcgccattctcaagggagagagggagggagggatagagagaagaaggagagagaggatagagagaaaggggatagagagaaggggtagtgaggatgataggtggggtccacgtgggccccaccatttttttttattattgtgtgtgtgaaactgacatgtgggtcccataggttttattaatttttggatcgaattgccacgtaagcgcaacgtcaatgccacgtcagatgaagaccgagtcaaattagccacgtaggcgccacctcagccaaaaccgaggtcaaatactaccgagggaccttatttaaacggtttcgtaagttgggggacctgtcgtacccacttttgcaattaagggatgaaaatcagactaggcgacaaatagagggaaccaaagtgaacttattccacagagaatccccttgatgggccatacaatatgggccgcacgttgcatccggccgtagcagcccacgatctccccagggcggccgctcgccaagccctcgccgtcgccggccgcccgccgccgtcgctttcctcgtctgagacggcgaacccctgcccaccacaccgccatgttcgctgcgaggccggccggaccgccatgtgcgggcgcgcacgatcgagcatccccaactctgcctgaacacacaacatgaataatacatgcaagtttcagtcactgctactcactgcttgtctgcatctgaaagttcggacttttacttacggattctattagtattactgcatctgcacgcatgagaaagtattttttttataaaaaatattttcttaaaaagtttttaacctaggtgcccatggatttgatttttgacatgcttaatgtgtgttcatagctatctaagatttcgaaacctgtgaattgtgcatggactgattttttacgggcacagtgctacgctacttgactatgacttccccgaatgcaaaatagaccttttgttttctggattgctcataagcatcgtctatgtagatgttttcaacataaaagtacccatggatctggttgagccaacaaatgaaagaataacatcgctacaaacaaatgctactaatcactaatcagccggtcagaatcgcacaatatatatgcatgatgttatataacaaaggcactgttgatccaacaaaacctggaaatagtagcacccaaggaggaaggtggtgatcttaaatcaatggacaataatgaatatctgaatcttctcattcggttattagtttcgacattgttggttgctctttgatgttcttgcatatttaactcaagaaagggtaaactcaagaccaaattcatgtagatgtaggcaaatattcatgttcaatctgttgaagcatataattgcagttctgaacatctcttggctagaaagctgcggctggactgcaattccgctggcagaggagaggactacaagtgcagcaatatgttgtgtgcaattgtgcatgagtgcacaagttgaaaaaaggtaatattatttcattccgaaaagatagaacaaccgtgaaaataacgttcaaaccagtcagttcagaggagaatacggtgatggacagaaggccagaaaacaacccaatggtgagaatcgatcatttttctagacaatgaatggtgagcaattgatcttggtgaagctgaaccagataagttgacagcgttactgttagtggtgatcagcccagccatccgtaaatcctttcttgcattttgcccaatacaagtcagcaagtcaagatgttcttatcgtttcagactaagtggacactggaatctgttcttttcacatccacactgggacacatacagaaaagctaaatggacataccacctaacagcaatatctcttgtcttccactctttgtcactgcataagagccagcccatctggatgatccacgcaatcaccggggaacttgctcgtcatcttcctcgcaataggcgatcgatttgccggcttgccatggctgcacgcaccaaaggcctcgctctggggtgagtctttctttcaattcctcgcaacatagcatgtgcttgcttggttgttgggtctgatggaaatgtcgtcttgcgatgcagcagacgcgccccatgccgctgctgttcccattgatctaggatcactccggtctttcctttcatgctgagcaagttcgccttctgtacttgagtaaaacccctcaactttgttgccagatatttctttctggttgcccgtttacccaagaagctatagaaaaaggtaacctcattatttcattttttcagattcagtgatccagtatggtcttgtggcaaaacacatgcaaaataacatactagctagatatgtgctcctctcttacaaatatactctactttatgagtcaggctgtgtttagttcagtgcaaagtttggattttggttgaaattggagatgatgtgactgaaaagttgtgtgtgtatgacatgttgatgtgatgaaaaaggactgaagtttggatccaaactttggatctaaacacagcctcagtcagacagtaagacaaataattcagttcggtctctagctatgatggtccgtgcatgtcatcgaatgcatttatgcacactcataaagtttgagttgtcagtgttcatactccagtaactgaaaaacatcacagggcaagctataagtcattgcctacaagtacctactagtagtactggtagtaactgaaagctgtgcagctagccttcactggcaagctccaagcagcaacaatcccatatcgaattaagtggaaactcttatacaaagaatagatggataatatatttactgaacttcatcttgcattcatattttgtcagccttatctaacttttaaactatgttaacacaagtttggttacatgtcaggctgcattttttacattgatcaattatatatggtggattaccccttttgagtttgtcggatggcaacaatagtagacacattggttggatcatgcatcaataagttgcaagcgatcattacagacaagacaatactcattttaggggtaaaagatgagcttgaagaactgcgacgaagaacaaacgtcataagatcttctcttcaggatgctgaggcaaggaggatggaagattc

SEQ ID NO: 4370 - DNA, 44590 bp, Oryza sativa
  unsure (1)..(44590): unsure at all n locations
tcaatgataaaaaattagaagggagatttgaccatcgtgcctgggtttgtgtctccaaggagtattctatggtttcccttttggcacaagttcttagtaatatgaaaattcattatgaaaaaaatgaatcagttgggaaccttcaaagcaaactcaaagcaggcattgcagacaagagttttttccttgtgttggatgatgtatggcactataaagcatgggaagatttactaagaactccactaaatgcggcagccacaggaataattctagtaactactcgagatgaaactattgctcgtgtaattggggtggaccgcactcatagagttgatttgatgtcagccgatataggatgggagttactttggaggagcatgaacatcaaagaagagaaacaagtgaaaaatctacgggacacaggtatcgagattgtccgcaaatgtggtggcctacctcttgcaatcagggctattgccaaagtcttagcaagcctgcaagatcaaacagagaatgagtggagacagatattggggaaaaatgcctggtccatgagcaaacttcctgatgaattaaatggtgctttatatctgagttatgaagtgctgccgcaccagctgaagcaatgttttctttattgtgcacttttccctgaagatgcaaccattttctgtggtgatcttactaggatgtgggtggctgaaggctttatagatgagcaagaaggccaattattagaagacacagcagagaggtattatcatgagttgatccatcggaacttgctccaaccagatggtttatattttgaccacagcaggtgcaagatgcatgatctcttaaggcaacttgcttcttatttgtcaagagaagaatgttttgttggagacccagagtcactagggactaatactatgtgcaaagtacggcgtatttcagttgtcactgagaaggacatagtggtgttacctagcatggacaaggatcaatataaagtgaggtgttttacaaacttctctgggaagtcagcaagaattgataattcacttttcaagagacttgtatgtcttcgcattttggatttgtctgactcacttgtacatgacatcccaggtgcgattggaaatttgatttatctgcggttgctcgatcttgacaggacaaatatatgttctctcccagaggccattggctcccttcaaagccttcaaatattgaatttgcaggggtgtgaatctttgcgcagacttcctttggcaacaactcaactatgcaatttgaggcggcttggtcttgctggtactccaataaaccaggttccaaaagggataggaagactgaaatttctcaatgatttagaaggatttcctatcggtggtggaaatgacaataccaaaatacaagatggatggaatttggaagagttggctcatctttcacagttgaggtgtcttgatatgataaaattggagagagctactccttgcagcagtagagacccatttctactaacagagaaaaagcatctcaaagttctgaatctacactgcactgaacagacagatgaagcatattcagaggaaggcattagcaatgttgagaagatctttgagaagctagcacctccacacaacttagaagttcttgctattgtgaatttctttgggcgaaggttccccacctggcttggtactaaccatttgtcttcagtgaaatacgtgctcctcatagattgcaaatcttgtgtgcatcttcccccaatcggacagctaccaaacttgaaatacctaaaaattaatggagcaagtgcaatcaccaagattggacccgaatttgttggctgctgggagggtaatctcagatccacagaggcagttgctttccccaagctcgaatggttggtcattgaggatatgcccaactgggaggagtggtcctttgttgaagaagaagaagtgcaggaggaggaagcagctgcagcagccaaggaagggggagaggatggaattgctgcttcgaagcaaaagggggaggaagccccgtctccaactccaaggtcgtcgtggctgctgccttgtttgacgaagttggatctcgtgggctgccccaagctgagggctctcccaccacagcttggacagcaggccaccaacttgaaggacctccttataagagaagcagaatgcttgaagacggtggaagacctcccgttcctctctggtgccctttcaattggtggctgtgaaggcctggagagggtctccaaccttccccaagtgagagagctgtttctaaatgtctgccccaatttgaggcatgtcgaggagttgggtggtttggagcagctattgctggatgaaggtatgcaggagatctctcagctgtgggtcccaaggcttcaggagcaacaccgccaactccatggagatgagcatgagctggaggtcatcgagtggctgtgagacccaattaatttagatggcgcaaggtatgtacactaattgcttgggacatttcactggaataaactaatcattgggttgtacattcatgctgcccctctgctcttcagctgtatatatgcagctattctagcatttgatagtctccttagttgttcatgtcgtgtgcattgactgattgtttaatgatttatatgatttagttttattttcatttatgctgcatgtaagcatttcatcatggtcaagattttcataaaatggtggatatacattgacaaattcattagttgtccatttctttaatcctctcgtgatcttattaacatgcgtcctgtacatacggtgtattctagataaatgaattgtcctatatgtactacaacataatcatgtgcaatagtgttcctagctctgcagacaaagatagagattacttctactccaaaagaaaattgtatgggttatatcaccaaacaatgctatgatggcattgctatattcactatatgatagtagtaatatcacaaatgcatatatccatccaaggacttggggacaacataaatggtttagcatttggtacacaggctgcataagtgcacgactaaacataatggacttcgctaggccaagagataagtaatccttaattcagctcttgaatgtgctagctatgattggccgtgtacatccttcgggatgtagaggccgggttttatttaatccattatttaaaaatgcgctatctatgacgaagaccagatcacgtgcatttagccttcaagtctgcaagtgtgttctatgtcatatcaatgtgcacatttagtactcagtatcttataaaaacacaaatacacatgaattttcgcaagacattaggcaatagagtagtttttttagatttcacaaaaaataggtcaggcccaatgttacagattccttgcagcctgtgagcaggatattgaagatggaagggttgtgcccaacatctgttcctagtgtagggctcctaattaaggtttgtttggtgaaaaaacaaaagccacctaaatgtctttgtattggttcaaattgattaatatttttgttcgtattacatctgttataagcagaggatattgccgagcgacatgcctatgtatagtccctatgtgtcttttccttatactttttgtaattcacgtatgatgtttggtaagttcaattgtagaaaatagattgttgcaaaacggatgtcacttgtattttcttttccttaattaagttatttaattaccaaattgcttatgaatatacatccatgattaatttttgtgcgcttatttgtgttgtaggttaatcttgaagaatttgggctgcagtcacctgtaatctgtacttttgtctttacctagctactggtctttgaaatatattaaaaaaattaaaaaaacaaaaatatcaaaaaatgggaaaatgtcaaaaaaaaggttatattttctttagctcttgtaaaatacatcgtcatgttttcttagatgtgtgcgtttcttttctttttattttttttattgtaggtgtgtaggtaactccgcctatgtcatcttaggtttatctgaatgacatagccggtcccaagcccggaaaaaggaggaggggataatcttgtatagatgttggttgaaatgacgctctcctactatatagtagatcattgggatttttccgtacttttatcagattaatttcattttcaatgatggaatagttatggagacacttctagagactcatccagtcttattttcaatgacggaatagtctactgctaccaggtctttgaaagttttcttgaaactgcacctttgtcaggctactgcattttttttgtgatggaataattatgaaaacactttcagaggcacatacactctgtttctctgttggacgaacctgagttggaaaccagtttagtttgagctcatttcaaccccttctttcaccagaagcaattgggctaaacccaagcaccaatcattctcctgtcagtccttaatgacaagcctgcaggacaaggaaatcaatgaagatcactgaggcaaaaatatatttatcctcccatcatgatagaaactgattgtgctttgtgaattgtgatcgagaggagaggaaatggtggataaccttcctagtcattcctttgtactgacaatgtttcagtacttgaggaaatctcagtgatgatacctcgtattgacaatcaatacctgtgttaatagatggatacaacacatctttgactgaaatttgcatcggcaatgattgtgtccaaggctctttctccaccagctgctgcttatgtgggatggaacccatgtataacttgaggaagagaagtaaatccaacttttgtttatttcattgaattcatcctttttccttttgaacactgaaaataacagcttgtatgtctttaggattggttcaggaaaatgttattatgacagtgcactagcttttcaccttgttatcccattacattgttaaattaaccatggttttattgccttcgtattttctggacggggatgcaaaccagtgtcttcttggatacttgcatcttcctaatgttccgtgtaagctgatttccttattttgcatagtgtaatgtgttctactagcaacgatagggtttgagatattcggttttgacatttcatttgatggcatttgatcattatgttcaaagatgctcactactgatgctgtagagctcactcccccaaatctgcaaccttctcatggactctgaaattagaatcgaggtttgtgttcattcatgtacacaattgagctattcagtttgaattttcatctgaatcattctgtgttcatctacaacggacaaattattcttatcgtgactgatcaacgcagcacaaagcaaagcacagctatagcgcatccagcgatgagaagaaaaagggggaggaaaacgaggggtcctgtacctcggttgtgctcgaggttctccggcgccggcgacgtgggactcggcggcgatttacctcgtcggagcgctcgctcgcttgccgtcgtcgcatcaacggcaatataaacatataatgtctccctgactcgtggggccacttgagggcaagaacgcaagaacgacgcgtgtctctcctgcttgagaactaaccggcagccgctcgccggagctccctccggaaaccccaaatctcggcgcccgtatccagaggcggttcgtgtcccgttggttcttgggctcctatcctcgttcagatcagggaggctgttcagttcttgtttatccagcggggcgcagcgaaatttacagaggaatctcaatctccaaactggtaggaagagagtttggtcgatagaagttgagctcttgtttgttcgttggtctgcagagttcactagttcagataatcatatcatcaacaccatgaattgaaagagatgctgcactgctgtttattgtgttcactgtttaattcatagcatccatcaaacctgtatctgtttgggagaatgttcgatcaatgctacagttggaatcaaattcaactcaggaccaaattcgtgttaggcaaatattcatgttcaatctgttaatacgtttaactgcagttctcaacatctcttgacgaggaagcagggctgctgctgcaattcggcctgcaattcaagtgcagcaatatgttgtgtgcaatttgtgcattagtgcacaagttgagaatggtaatattatttcactcggaagagatggaacagttgcgaaacgcagaaccactcggttcagaggagaatagtcctggacaaaaggacagaaaatggtccaatggtgagcattgatcatttttacagtgaatggtgagcaactgatcagcatcaaccatggtgaagctgaacctgataagtcgacagcactaggggtgatgatcctagccacccataaatcctttcttgtatgtttcctaacatatataagtcagcaagtcaaatgttcttatcgttttctttagtcgatggttcatcgattctgacatcaagacaagaagccaacatactgctagccatgttactttcctcttggctcacatacggccatttgaatggattagattcagaaataacactatatctcgtctttctttcttacttacatgagttgaaatattcttggcctttttttctctacttactagggcagaattaagattttgaagatgagctgcaccccaatccttaagagatactaggaggtactccctccgtttcatattataaaacgttctaacattgctcacattctagacacacacatatatatatatattgattcattaatatatatatatgaatatgggcaatactagaaagtcttataatatgaaacggaagaagtaccatattttctaatgtaaaatttggtatttctcgataccttcggtattaggaggtctttctttctctatttactagggtggagtactctgaatgaatttcagtccaaatatctttcctgacatgggaatctttttagtagcacgatggagaaatttatatatgcagctgaaacatcttgttcatacatcagactgccatttgcacaatttgcaaacttgttcaaacatctttatctaagatggcttgtcttgttccgtgcaatttgcacactggaaaacaaactcctcatgcacagtgggacataaatggtgagacggataaaagagccattgtactatttgaacactgcataagagagccagcccatctagtccacgagacataatctcataatgggaacttgctcgttgtcttccttgtgaccggcgatgcctcggctgcacgcatcaaaggccttgctctcaggctcagctgagttttctctcacaacatagggtttgaacaattttctgcttgtcacgttaggagctagccaatcgaaacgttggctcgctcggtcatcatcttgcattccagaagacacccgcctgctccactgccgttcctgtcgatccgattcacttcagcctcagctcggctttcataccaagcaagttagctttgtcaacttgagcaaaattaacaccgcaatttgagccggttacttctttctcgtttgcctgttgatacaaagaagccaccgaaaggtaaaccccttaatgatttcagttcttcagcttcagtaatcagtatatacttgctcaaaacagattgcaaaataacttgctagctacaaagatactctgaaaccaattcaacttttgtccattttcagacggtattactcttgcatgatttaattggatatattgcttacgccaaaaaaaaaaacttggatatattggagcatcaccctcgacgagtttctctatggcaaccatactggattctttgattggatcatgtgctaagaagttgcaagagatcattaccgaggaggcaatactaattttaggtgtaaaagaagatcttagagaactgcaggaaaaaatggaacaaatacgatgctttataagtgatgtggagcgaaggggcatggaagactcatcaatacacaattggatttctcgtctaaaagatgctatgtatgatgctgatgacattatcgatttggttagctttgaaggaagcaagctattaaatggccattcttgttcaccgagaaaaacaattgcatgtaatgggctttcacttctctcttgcttttccaacattcgggttcaccatgagattggtaataaaattagaagcctgaacagaaaactagaagaaatagcaaaggataaaatatttgtaacacttgagaatacacagtcatctcataaagattcaacatcagaattgagaaaaagttctcaaattgctgaatccaaccttgtggggaaagagatattacatgcttctagaaaattggtgagccaggttcttacacacaaggaaaagaagacttacaagcttgctattattggaacagggggaatcggaaagacaacacttgctcagaaagtattcaatgatgagaaattaaaacaaagcttcgacaaacatgcatggatctgtgtttctcaggactactccccagcctctgttttgggacaactacttagaaccatcgacgctcaatgcaaacaagaagaatcagttggcgagctacaaagcaagcttgaatcggctattaaagataagagttattttcttgtgttggatgatgtatggcagtctgatgtgtggaccaatctactacgaactccactgtatgctgcaacctcggaatagttttgataactactaggcaagatactgtcgctagagaaattggggttgaggaaccacatcatatcgaccaaatgtcaccggctgttggttgggagctactctggaagagcattaacattgaggacgagaaagaagtgcaaaatctgcgagacatagggattgagattgttcagaaatgtggtgggctacctcttgcaatcaaggttattgctagagttttggcaagcaaagataaagcagagaacgaatggaaaaagattttagctaattacgtttggtccatgtataaacttcctaaggaaataagaggtgctctatatctaagctacgatgatttaccacagcatttaaagcaatgttttctttattgtattgtatatcctgaagactggaccattcaccgtgattaccttatcaggttgtgggttgccgaaggctttgtagaagtgcacaaagatcaactactagaagatacagcagaagaatactactatgagctaataagtaggaatctcctccaaccggttgacacatcttttgatcagagcaaatgcaaaatgcatgatctcttaaggcaacttgcttgccatctatcaagagaagaatgttatattggagatccaacatcattggtggataataacatgtgtaaattgcgccgcattttagctatcaccgagaaagatatggtagtcatacctagcatgggtaaggaggagattaagttgagaacttttagaacccaaccaaatccactgggaattgagaaaacatttttcatgagattcacgtatcttcgtgttttggacttgactgacttacttgtggaagaaataccagattgtgttggatatttaattcatctacgtttacttgatcttagtggaaccaacatatcctgtcttccaaaatctattggtgctctaaaaaacctccagatgttacacttacagcggtgtgaatctttgtacagtttgcccagcatgatcactcggttatgcaatttaaggcggcttggtcttgatgattcaccaataaatcaggttccaagagggataggaagacttgaattcctcaatgatttagaaggatttcctgttggaggtggaagtgacaatactaaaatgcaagacggatggaacttgcaggagttagctcatctttcacagttacgccggcttgacttgaacaaattggaaagagcaactcctaggagcagtacagatgcattgttgctaactgacaaaaagcatcttaaaagtctacatctatgctgcactgaaccgactgatgaagcatgctcagaggaaggcattagcaatgtcgagatgatctttgagcagctaagtcctccacgcaatttagaagatcttatgattgtattattctttgggcgaaggttccccacctggcttagtacatcccttttatcttcactgacatatttgaaactcaaagattgcaaatcttgtgtgcatcttccaccaattggacagctaccaacttgaaataccttagaattgatggagcaagtgcaatcaccaagattggacccgaatttgttggctgctgggagggtaatctcatatccacagagacagttgctttccctaggcttgaattattggctatcaaggatatgcccaactgggaggagtggtcctttgtcaaagaagaagagttgcaggaggagaaagcagctgcagcagcccaggaagggggaaaggatggaactgctgcttcgaagcaaaagggggaggaagccccgtctccaactccaaggtcgtcgtggctgctgccttgtttgaagcagttgcaacttgtggagtgccccaagctgagggctctcccaccacagcttggacagcaggccaccaacttgaaggagctcgatataagaagagcaagatgcttgaagatggtggaacacctcccattcctctctggtatactttttgttcaaagttgtcaaggcctggagataatctccaaccttccccaagtgagagagctacttgtaaatcattgcccgaatttgaggcatgttgagatgttgggtggtttggagcagctatggctgtcaaagaatatgcagaagatctcttcactgtgggtcccagggcttgaggagcaacatcgccagctccatggagatgagcataagttggaggtcaacgagtggttttaagagccaattaattagatggcacaaggtatgtacactaattggttgggatttttcactggaataaactaatcattgggttgtacatccatgcttcttctctgctcttcagctgtatgcaactactctagcatttgatagtctccttagttgttcatgttgtgtgaattgtgattgtttaataatttatatgatttagttcttttttcattgagtttttctcccggccttccttttgtagcacgcggtactggtactgtgaggtaccagtctccatccggccgttgattgctgaggggtacgatgggtatcacgtgtggtccaaatagcgtgtgtgtctcgatatctctcgctttcccttctccttctgcatctagcgctgccgcagggcacatgagaaaaaagtcgaggtgaaggtcgaccccatcggccgcaccgccgcaggcagacgcagcaagggcgatggcatccgcaatcgtcccagaatcgtggccgctgcagttgtcctcgccagcgccacaggagttgtcgctgccgcaggtgtcatcgctgcagccgtaggtgtcatcatcgcggtcacaggagtcgtctcggcgccgctgcaagggccgtggctgcagtggatctccaggaccccatccgcagcatggtcgcaggagtcgcagcgttgagaggaatggatgaggcgccgccgcgaaggggaaaacgatgggacaaggggaagacgccagcatcgagaccaacgaatgccgccgccgccgccgtcgtattgtccgccacgcgccgccgtcgggaggaagcctagggttttgctactctgcggcacttccccaaacaaaccaccgatccaaacatccttccaaacgcgaaaatacgattatacccttccactatggctcactcgtgcttgctaccccacgatcaagctggtaccctgaggtaccatgtaatcgtgaccattcgatatgccatcattaatggatgggattttagtaccttgcggtacaaaaagaatgaccggagcaatgctctttttcattagtgctgcatgtaaccatttcaccgtggtcaagattttcataaaatggtagatatagatcaacaaattaattagttgaccatatcttttatccactcatggtcttattaacatcctgtatggtatgttaaataagtgtatcgtcctataggtactacaacatgatcatatgcagtagtgtacaaagatttgaagacagagatagagactactgctactccaaaacaaaactgtatgggttatatcgccaaaaacatgctatgatggcattgctattcactatatgtcaataggaatatcatagatggatatatccatccaatgatttgtcccaacataaatggtttagcatttggttcataggctgcaaaagtgagggactaaacatattgggcttcgttaggccaagagataagtaacccttaatttgactcttgaatgtaccagctatgatgcagaccagcttacatgcatttagccttcaatttcacaagtgtgttctatatcagatcatgcatgtgtgcaaaagatagcatttactatcttgtaaaaacacatatacacatgaatttttgcaagacattagacctatagaataatttttttttacgacaaaaaataggttaggcccaatgttacagattccttgcgacctgttagcaggatattaaacatgaaagggttgtgcccaacatctgtttctactgtagggctcctaattaaggtttgtttagtgccaaaagtatccacctaaatgtctttgcattggttcaaattgattaatattttttttcatattctatcagttaaaataagcggaggatattaccgacatgcctatctgtatatgtgtcttttccttatactttttgtaatgcatgcctgatgtttggtaagttaattccacgaaatatgattgttgcgaaactgatagcacttatatttatttccttaattaagttattaaaactgatgtctgatgtataaagtatatatacatccgtgattaatttttgtgtgcttatttgttttgtaggttgttaatcttgaagagttggagtgcagtcattcctcagagaataaaatgaaaaaaaaatcacaaaacatgaaaatttaaaacaaaaaaaaaacaaaagcatcaaaaaaaggggaaatgtcaaaaattgaaaaaaaaagcattttctttagctattgtaaaatacatcttcatataatttgttatatttgcttgcgtttgttttcttttaaaactttttttattgtaggtgtgtaggtaactccgcctatgtcatcttaaggcgtaactaaatgacatagccggtcccaagcccggaaaaaggaggaggggatataatcttgtatacttctatattgaaatgatgctctgctgctaaatacatcatttgatattttcttggaagtttctgcacttttatcaagctaatttcatcttcagtaatggatcagaatagttatggagagtcatccactctgtttaattgttcaacaaatctgattctagactattttagtttgacctcattacagtccagttttccagtaaaagcaatttggatgaacacatgcatcagttcattctcctctgtcggtctgtcctacatccttcagttatcagtgccagatcaatgatcacaagagttgatattttggagaccacaaatgcacaagtctgtttgttggaggctttagtatttttcatgatcaaaactggtgcagaaaacatctgttatcacatatcacgctatttaggttcagaacataattatgaagcacatgatcaacaaataaaaatgatgaatttaaattcatgaaaaatggaattggcaaaaaccagaaaaacagagaggcgtgcttgatgtcctgacaagaatgatttccagcgatggtcagtaattactgaagtacattgctctagtgaatctttacataatcacttcacctccatgcaagtttcttgactggaaaaaggtaaacatggaacagaataacaaactgcacctggagggggctactttatttttatttttttttgaaagataccttaaagcggatactgaactggactgaaattgccactgaatgttcgatcacattaagcctggcaggaaagcggagttctcaacaaacagagttggacaggaaatggtccagcagcaatgcaaacaagcaatgctgatccgggtaggaatgggcgagttcaagtcgttgtgtcacgcagggttcttcttccccgaggcgaagatcaagggacactggaagtggagcaagacgattaaggtcgtcgaaagcgagacgctcggcagcgctacctatggtaagaataggaagatcttacaatcgaattcagggcgttcaggtaaacactagacaaatcccaatcgccaaatccacagcatcctaaacgaaaatcaacagtgtttctcacagcaatgatctgaacgaaattcatcttcacatgcatatatatcacccatggccagcacccccacacatacatatcttattcaacaaaattacaagcagttccctgataaagttgcatattacaccaacaggttctgcaacttccatgcagctcattatcagaacatcaaacttctattgagcaggaatgaatgaatggatcaatgggtagatggtaggagtaccatactgactgtgtgtattgttaggaaaccgccggcccatgaaggcccggctcggttacccactaattaggcccatcactaaatatggaaggtggaagagggaatggctataaatagaggagtagagaggaggattgtacacttgagaatgcaatggatgaatgagaaaggatgccacaccctcatatcttgtgtctccacttttgtagaattacgcaatccctcttggactatctcggtacatttagtctccctgatggttacagcccaccttaactgaattttacatcagcaatgattgtgtgcaaggccctctttcctccaccagatgatgctttatgaccacaaaatccatgtatatcttgatgaacagaaaagaaaatcattccttccattatccaacatcgttttttattgagtccatccttttccatttaaacgctgaacagaacagcttgttactctgtcatcaggattggttcaggaatcaggagagatattatgacaaataccctagcttttccccttgttgtcccgtcatattgttgaattaactgtagttttgatgggatgctaaaaagtgccccttttggatacttcaaccttcctaatattccatgtaagctgttttcctaatttttcgcattgtaatctgctctactagcaatggcttatgtgctacatctcctgtacaggattcagaactcgagttcttgccacaaaatggttactgtacacacaaatctggctaaaattgtaaatggaaaatttcaaatgccaactgcaattaacagcagattgagttgcaattaactctcctatgctttagagttcacccccaaatcatcaaccctcttatatggactctgaaatcagaatcgagttttgtgttcagttattgcagttcagtgctctagtttcatctcaactgttccgagtaattaacaactggactagaaattattcttcccctgtactgaaactcactcactgactcatcgaagcgctcatacactctttgatgggccatacactttgggcctcgttttgctcctgccctgtgcagctgtgctgacgggccgcatgtccccgtagtatggaaaaagtacaccgaaggtccctcaacttgtcatcgagttacaaaattgtcccccacgtcccttaactaatcaaaaccggtcacaataggtcctttggtgtttttgactccggttttatcctatgtggcaactgactcagcatgggacccacgtgggtcccacatgtcagcatcttattccttcctctctctactgccctttccaatcccccttccacgggcgacgggcgtgcgcgggacggagaggcggggcgcgggcggctgggcacggcgtggccggcggccgaccggaaagaactgagcggcggcggcgggggaggagctaggcgcgagggcggtcgcggtggagccggtgccatcctcgcctcgcctcccgcacgcgcgcgtgtgcgtgcgcctcgccacaccnccgccgcctaccgcgcgctcgcagccgccactgccgagcaaggcgaaggcgccatggcggcgctcacgcaggcactcccgtccgtggcacccgtgccgccgccgtcgtgatctctctcctcatcgtcatctagttccaaggaaggatttggtctgtgtctgtacatgactttttttttgttttgctcgggtagcttggccattgttagtgaattgatggtgaaaataaaaaagagtttattgggtaggtctggtgttgccgccaacgccgtcccgcgaccaggcagcggcagcaatcggagacgaccacgctgcggcgacaaaacagaggggaacacgcagcggggaacggaggggaacatgtcgatctggccgatgtcaaggttggtgggtaccagcgtggggttcacccgctcgacggcctggtactgcatcaggctctgcagcttggtggtggagacaatccagaaggtgtcgccggcgttgatctggtactgcataggcgcgtatgcattgggcgagtgggaggggcacccacactggagcggcacaagcagcggctgccccgccgctcgcgcgcaacccctccccccaccgaccgcgtgacgcccctcccccgtcgccgcttcgtgggtctcgtcccctccctcccccacgcacccgtccgtctcgcgcgacgccatcaccgctgacgccctcctcctctcccgcctcgcagaacgcagagcagagaagtgagagagagagagagagatgaggaagggagagaagaggggaaaagagagagaaggctgacgtggccacactgacatgtgggatccacgcgggtcctacgctaactcagccgccatgtcggacaaaaccagggtcaaaaccaccgaaggatgtaaagtgaacggttttgttagttgagggatgcccgctatttggttttgtggttggaggatgattttgtatctcgatgacaaattgagggacctttggtgtactttttcccccatagtatcgtccaggcccacaaattaaatggaatcccttgctggaccatataacatgggcctacgtcgcttccggcgtacgcccattaatcggcccgaccgcaagagcgatagtctcctggatgagagaatccgccgccatggcagccgctcgccggagctccgccgactggccacggagctcctctccggcgaagatttgcatcacgtaggttcttcgagtcttccctttccataatgtgctttggctctttcatcttcttctctctgtctcacagatcagacaagttgcgcatgataccaaattagagatgctgtactgctgagtaaacttcagatactattgtgttaccaaaaattatcccgggaaagcaacacctgaattcttttgatatcaacacatatctgtttgggacaatgttagatcagtgctcctgttgatgtcacaatccaattggatgctttctaggagtaaaatgctttctaggagtaaatgttctgtgcaatattgagttcaacacttcaatcaaaccagatggtttcagatcagaggtattctaaggcatagttatcaacaacacaaacttgcagaaggactatcaaactggaggaaataaattttggtcaaatagaaagaagtcatgaaaacaagtactcatctaagcaattactccagtaattatgtataatattctatgagaaatagttacaatggcacagactccaagagtttttgaagacttcgtgatatgttcatcagccataaattctagaattagaatgcgacatgactagcaagatccaaattctccaagaatgctctgtccttgtctctattgcccggctccttcacactgcagatgcaaagcagagtgaactgattggggtctggatggtcgggtgtgatcccattctctagactctttgagataacaaagatttgctctttgtcacctttaatctccttcttgagaagtactagaagcatctcagttgcctgcagcttagtagggttcaacgtggagaggaagatctgcaagaaccagataggcatcagccatgagtaccatgaagttttgccgtgaatggtaagctgattagaatcttatatagtcatatatatttacctttcttagttttctatgtaataagtgataatagaagaattttgttgttgctgagtgtgagtgcagtaacaacatcaggttcttagaaagccctcatccaacttcacatattctactccgtattatttatagacatttagaaggggctaatctctaaaattctgtaagactttgaggtgacaaacttcatgagctgacctagaattgaaccgattacttctgcacttcactaatgtaccacaagtgttacagtacagtcaagagaaaactcaaccttcagactttcggttccaactgtgtttttgcctttttctgtaaaaggaacaacatcattatgaaccattgtgtcatacataccacaaacgtacagtatctagattttatcatgagagtgcccgtaatatgttgattcttgttcattcttgagctagaaaatactaacagctttggatggcaatctctgcattgcttgactgaacttttgcaagctcctgaatcacaggaggtagctgacagatactgtgtgtaccgcaacatggtgcaccacatcgccggggagttcaccacattgcttgacctggaaggatgtcttcttccaggtcaggattatcggtcagagacaaaccaccagtttcttcatagttcagaattacatagaaactactaaactctgaaaggtgaaagctttaaaagctttaaaccacagcgaggggtgaggaaggcatgacgcttatcttcgtgtgctgcaaccccagctgcggtcacagatggagggagtacgtggcatgcaaaggcagtagagatttgcgttatgccatgaattggtctatgtttactttgtcaacaagagtatgagatgccatgatcctatgacagaggaaacaaaactgaagcatgtgtggccttccttctctatctgtttttttttctaattcaagggcgcagctagttgactagttccacatcatggaatcttgaagccaacagtaaagtaatcacatagaagtaaactgtagatcaatcacatggaaataaactgtgaactaatcacatcgactagacaagtggacaagcacaaaacgttgggttgtggagcatagacaagtggacaataactcaaaattgggtcagcggtattaacgtgggaaagataaaagaaaagagtggttcagcacttgtctagtctgaatgttcagctagctatgcaatatatatatgcaaggtcttaccactccctcctgcagtactgttgctttgttccactgttgtgtgtgtggcattcttgtactgcatttctaccagctgtgggtaagctcaagacatatagctgaatttacttcctttgtttccttaagataatctgtaaatgctcgttttgattgcaggcacggtgtttcatcaggatcagtcgtgtctatttctgtctgccctgtgatcgcttgagacgaggtctgctaggaaggaaaatctgcttcatctgaataaacacatatatactgatatctccttgtagcagacactctcccgtcggtggatgtcaacacattcacctgtatttttggtattatcccattgatccttctagttaaccttctgaatcattcaagttttacatcggtataatgagcatacacttcacctcttattttcatctcccctttttgcagttgtagcagcacaatcagtggttctctcttgatgactggctcataatgttctgaaatcctttctacagttggcgtatccactgagtttcttttgatcttcactaatctgagtctgtcgagtatctaaagtagatgggtcagagcaaacttctagcttgtgcaagatgaatgctactatactattgatccttgttatgtgacttatgtcttttcatgctgaattatcactccataaggtaagatttgcatgcaatatacttgagtaaaacccctcaacttgtttccggttacttctttctcctcatttacctttaacccaagaagcttacccgaaatgtaaccccattattccagttctttagcttcagtatgctaacttgctcaaaactcatggcaaaacaacttattaaaaaccttaccgaaatgtaaccccattattctagatactctgaaactgattgaacttttgtccattttcagatcgtgtaattctcataagtaatttacttagaaattttggtgcatcaccatcaacgagtttctctatggcaaccatattgggttctttgattggatcatgcgtaaacaagttgcaaggcatcattacagaggaggcaatactaattttaggtgtagaagaagaactcaaaaaactgcagaaaagaatgaaacaaatacagtgctttctcagtgatgctgagcgaaggggaatggaagactcagcagtacacaattgggtttcttggctaaaagatgctatgtatgatgctgatgacattatcgatttggctagttttgaaggaagcaagctattaaatggccattcttcttcaccaagaaaaacaactgcatgcggtgggctttcacctctctcttgcttttccaatattcaggttcgccatgagattggtgataaaattagaagtctgaaccggaaattagcggaaatagaaaaggataaaatatttgcaacacttaagaatgcacaaccagctgataaaggttcaacatcagaactgagaaaaacatctcacattgttgaacccaaccttgtggggaaagagatattaaaagtttctagaaatttggtgtgccacgtgcttgcacacaaggaaaagaaggcttacaagcttgctattgttggaacagggggaatcggaaagacaacacttgctcagaaattattcaatgatcagaaattaaaaggaagcttcaacaaacatgcttggatttgtgtttctcaggactactccccgtcctctgttttgagacaactacttagaaccatggaggttcagcacagacaggaagaatcagttggcgagctccaaagcaagcttgaattggctattaaagataagagttattttcttgtgttggacgatgtatggcagcatgatgtatggaccaatctactacgaactccactgcatgctgcaacctcaggaataattttgataactactcggcaagatattgtcgctagggaaattggggttgagaaacagcatcgtgttgaccaaatgtcaccagctgatggttgggagctactctggaagagcattagcattcaggatgaaaaagaagtgcaaaatctgcgagacatagggatcaagattattcagaaatgtggtggtctacctcttgcaatcaaggttattgctagagttttggcaagcaaagataaaacagagaacgaatggaaaaggattttagataaaaatgtttggtccatggctaaacttcctaaagaaataagaggtgctctatatctaagctatgatgatttaccacaacatttaaagcaatgttttctttattgtattgtatttcctgaagactggaccattcatcgtgattaccttattaggatgtgggttgccgaaggctttgtagaagtgcacaaagatcaattacttgaagatacagcagaagaatactactatgagctaataagtaggaatctcctccaaccagttaacacatcttttgataagagccaatgcaaaatgcatgatctcttaaggcaacttgcttgttatatatcaagagaagaatgctatattggagatccaacatcatgtgtggataataacatgtgtaaactgcgacgcattttagttatcaccgagaaagatatggttgtcatacctagcatgggtaaggaggagattaagttgagaacttttagaacccaacaacatccagttggaattgagaacacaatttttatgagatttatgtatcttcgtgttttggatttatctgacttacttgtggaaaaaataccagattgtattggacatttaattcatctacatttacttgatcttgatagaacctgcatatcttgtcttccagagtctattggtgctctaaaaaatctccaaatgttacacttgcataggtgtaaatctttgcacagtttgcctactgcaatcactcagttatataatttaagacggcttgatatagttgagacaccaataaatcaggtcccaaaagggataggaagactaaaatttctcaatgatttagaaggattccctgtcagtggtggaagtgacaatgctaaaatgcaagatggatggaatttggaagagttggctgatctttcaaagttgagacggcttattatgataaacttggaaagaggtactcctcacagtggtgtagacccatttctgctaacagagaaaaagtatctcaaagttctgaatctatggtgcactgaacagacagatgaagcatattcagaggaaaatgctagcaacgttgagaacatcttcgagatgctaacacctccacacaacttacgagatcttgttattgggtatttctttggttgtagattccccacctggcttggtactacccatttgccttcagtgaaatccatgatcctcgcaaattgcaaatcctgtgtgcaccttccaccaatcggacagctaccaaacttgaactacttgaaaattattggagcaagtgcaatcaccaagattggacccgaattcgttggctgcagggaaggtaatctcatatccacagaggcagttgctttccccaagctcgaaatgttgatcatcaaggatatgcccaactgggaggagtggtcctttgttgaacaagaagaagaagaggtgcaggaggaggaagcagttgcagcagccaaggaagggggagaggatggaactgttgcttcgaagcaaaaggggaaagtagccctgtctccaaggtcatcgtggctgatgccttgtttgaggaggttggatctttgggactgccccaagctgagggctctcccaccacagcttggacagaccaacttgaaggagctccttataagatacacaagttgattgaagacggtggaggacctcccgttcctctctggtttacttttagttgaaagatgtgaagacctagagaggatctccaaccttccccaagtgagagagttgtttttaaattgttgcccgaatttgaggcatgttgaggagttgggcggtttggagcagctatggctggatgaaggtatgcacgagatctctcagcagtgggtccctgggcttcaggagctacactgcaagctccatggagatgagcatgagctggtggtcaacgagtagctctaagacccaattaatttagatggtgcaaggtatgtacactaattgcttgggatttttcactggaatatactaatctttgggttgtacattcatgctgctcctctgctcttcagctgtatgcatctattctagcatttgatagtctccttagttgttcatgttgtgtgcattgactgattgtttaatcacttatatgatttagtatttatttcattactgctgcacgtaaccatttcaccgtggtcaagattttcataaaatggtggatatacatcgacaaatttgttagttgtccatatcttttatcctctcatgatcttattaacatgcatcctgcacatacggtgtattctagataaatgtattgtcctatatgtactacaacataatcatgtgcagtagtgttcctagctctgcagacatagatagagattactgctactccaaaagaaaattgtatgggttatatcaccaaacaatgctatgatggcattgctatattcactatatgccagtagtaatatcacatatgcatatatccattcaaggatttggggacaacataaaggcaaaatttgccactggacacgcaaaaaaacgtgtaattggctgagagacaccgcgaaaacgtgacatggctgatggacactacaaaaaatgtgtaattggctgtaggacactcgtcgcattattttattatttccgggtcaaaacaggtgagatatttttctaaatgcccggattgccccttctctttccttctttaaacaccggtgggtcccatgtgtcatggacagtgtatgtttaatctaatttataataggtttttaaccacctggccccacgcgtcatggactaatttttgtaacaccctgaaaatttgaccaacaaaaatcaaagttccaaaaatatggaccttcaaaaactttttaaataaattgcatcatgctgattttgttcacctatttcatcggattttaatttcggagttcatagatcacgaataaagaatagttaattaggaataaaccctaaaattagattggcaagagaaataattaagatataatttaaaataaagattatgtgaggatagaaataaataaaacattatcacgaccatatttatatcaattaaatttaaatgtgatggaataagaattaactctaattaaattccaataaattatatataaaaataaaatatgggtaatgataatctaggttagagcaacacaaatattgtgtaaacttgatttgtgcaaaaattataaatattgggacaagatttgaataggaaaaacaaccaaataggaaaaacagaaaaaaattcactattcattgcgctgtaagtgttcgatcgcgttccctagccctaacccctcctctgccgcacgcgcctggccgccatcacgtcgccgctgtcgcccgtcgcgtcgtcgccttgcgccccgtgccgccgcgcgccgtcgccgtcgctgccgcgccgccttgcgccccgtgccgccgcgtgcgccgtcgccgtcgccgttccgtcgccgcgcgtgcgtctcatcgcctcgcgcctcgcgccgccgtcgccgctgtcgcccgtcccgtcgccgcgccgtcgtcctgtcgccgtcgcgtcgccgcctcgtgccccgcgcccgcgcgccgcccgcccgtcgcgtcgccgcctcgcgccccgcgctgctgccgcgccgcatcgtcgtcgcatcgccgtcgtcgtcgcaccgagccccgtgtcacgccgcgctgcccgcccgtcgccatcgccgcctgccgcgccgcgcgccgcctgtcacgtcgccataaggctgcccgccccgctccacgccctataaagcccgacccctcctcttctccaccccacacacatccccttcatctttcctcctctccctctcccccttccccacgcgccgccgtcgtcgtgccgccgcgccgccgccttcgagccgccgcgctgcgccgcgacttgcgccgccgtcgccatcgtcgccgccgctgcccccccacctcgcgtccaccgccgccgccgcccgggtgggcaaggagccgagagagagagagggagaaaggagccgggagggagagaagagagtaaaaaaaaagaaagaaaagaaaagagaaaagaaagaaaaggaaaaagggaaaagaaaaagaaagaaaaagaaagaaagaggaagaaaataaataggcatttgagtaaaatttagaggtttagaaaatttaaaataattagaatttaatcgtggattaattatagtcgtaaaattgcgaaatttaattatattttggtagcctctatgagtaatcaatttgcggtaggaatttagatttatttaagaactaaaataaaggtgttgaattcttaggaaaattacttaggagacacaaaatgtcttaggttgaggaatagttctatttcgcgaataatatagtggatataacaatcgactctcgtgctcgctttttgatttggtctttattggattttatttgaattcggaattcaaatcaattcttcgcacgtacttgtagagcccgagggagttgcggatccgagcgaaggtcaagacccgcaagactttgagcaaggcaagtcatcactattctttgagcatattgatcccgattgcaaaatttattttgtttacaaataagattggatgtgatgatgaacattccacttgtgaactatgccatgccttgattattgttcatctttaaatctttgtaaccataaatacgtatgagtccctagtcaactatgacacttgcttagaaatgctactctagatttatgcatgctcatactttattaaatgctatatgcttgggcaattacctttgggaagttaattgagatgcggcatgtggagacatgagcgccacattgccatgatatgatgacatgaattatgaaaataggaatgaaattaaacacttgttttagactggggcggacggtaatattgggtgatatctgggaaaggctagtaccgtccccggtcaattaaggaccgagccatgaagttaagcatgaaacgaccctgtacaaccacacttctcgtatggggatagacctagcggagtaaatagctgagcggaggcagtatccttgcatagtggtttcttgatgtttgaggatggggctctacagtggtaccgccattggtaggactgccatatgataatttagacataattataacttaatgcatgtgcgtgagtcttcccttcccgggtgcgccagaactcctctcgctgctagaaactgtgtacgcctagagtgcatgaggatgaaaagttcatagagcggatactgccgatgccaggttatcgaaaagctttgccgtgacacgtctcatgtgttgggacgaggctcatgtgttgggcagtcgcggagtgcgggtaaagtgtacatccactgtagtgtgagtaaaacaaatctattcgaatagccgtgctcgcagttattgagcaccgggacatgtattacacttagctagactctaaattcttaacttgtgtggaatgggatattgcatgatgatttttatgctgttggagccacttcctgagaggagggaaggtggacatcctcagaaaaccatgacaactcaatggcgggaagctatccttgggatcacaatggatggtggacagcaccatcgttgtttaaatatgaacactggtactaaaatttgctcagtcaatgctaggtcttaggcttgtgaaaagaattacaaaacttgctttgcgcaaaagaaccatagccatcctttgaaatacccctatcatgtgcattgttgatgtgatggcttgctgagtacggttggtactcacccttgcaaatataaacttaatcagaggccggagatgaagcttcggaggatccctgtgcctattaccaggagggtgatgaagacgatggtgctcaataggtcttagttacggtcgttgcctgtggcaatggcgtgccgctgccttaactctgctgccttatctacctctgtttttgggatgtactccggaccgctcggttcgatgatttaagactatgcctgcgggcttatgatgtaataatttgcactagactctcgtgtatgtgcatatggtatttcagctataaactcgtgtgtaccagactacttgatccagggaaatggtactgtttacacgattgattcctgttataaaaacgggggtccacaatttttttctaattagtagggtgattgctatttgctaatcataagtggggcccatatctctctcctatccttcttcttcttcctcacgcacgcgccagagtagaggaacggcgcgcggccggcgcgacgacctgagccaggacggctcggcgtgcagcagaaaaagcggcggcgctccgccatggtctcaccgccggagctcgtcccttacttgaccagagacgggacaaagacgggacggagaagcgcgggtgggtcaggatggccgtcgatgccttggctgccgtcttgtccgcggatggggtaaacgaagataccaaggaaggtctcatcgatgccctcatagccggcgatctgggccccatcatgaacacgctcatcgcagctgttcccagatctggtatgggtcctcaaggacgccggcaatctgctgcatggcggcaaccgtgcaggtgcgaggctgcccagctcgctcgtagatggtccggccaggcgccatcccgacgctcgcgcgagttcaccgtgggagacgactagaggatgagagaggcagtggcatccgcgccggaggccgtgggaaagttgctcgtgtgatgcaaggacgacgacactgtacatgggcccacatgtcggctgcatcgagaagagaggggcattcctgtcattttgaaaattttcttccctctttcggcatggaaattataaaataatgtcttcggtgtcctacaaccaattacacaacttttgtagtgtccatcggcaatgccaagttttacagtgtcccttagccaattactcgatttttgagtgtcctgtagcaaattttgcccaacataaatggtttagcatttggtatacaggctacataagtgcacgaccaaacataatggacttcgttagaccaagagataagtactccttaattcagctcttgaatgtgctagctatgattggctgtgtacatccttcgggatgcagaggccgggttttatttaatccattatgtaaaaatgtgctatctatgatgaagaccagctcacgcgcatttagccttcaagtctgcaagtgtgttcttgtcatatcaatgtgcacatttagcattcactatcttataaaaacacaaatacacatgaattttcgcaagacattaggcctatagagtagttttttagatttgacaaaaaataggtcaggcccaatgttacagattcagagattccttgcagcctgtgagcaggatattgaagatggaagggttgtgcccaacatctgttcctagtgtagggctcctaattaagttttgtttggtgaaaaacaaaagccacctaaatgtctttgtatgtgtcttttccttatactttttgtaatgcacgtctgatgtttggtaagttcaattgcagaaaatagattgttgcaaaacgaacgtcacttgtattttcttttccttaattaagttatttaattaccaaattgcttatgtatatacatccatgattaattttttttttgcggggaacatccatgattaatttgtgtgcgcttatttgtgttgtaggttaatcttgaaggatttggccgggctgcggtcacctgtaatctgtatttttatctttacctagctactggtctttgaaatattaaaaaaataaaaaaacatgaaaattaaaaaatatatatcaaaaaatgggaaaatgtaaaaaaaaggttatattttctttaactcttgtaaaatacattgtcatgttttcttagatgtgtgtgtttcttttctttttaattgttttattgtaggagtgtatgtaactccgcctatgtcatcttaagtttatctaaatgatatagccggtcccaagcccggaaaaaggaggagggtataatcttgtatagatgttggttgaaatgatgctctcctgctacatagtggatcattgggatttttttgtacttttatcatattattttcattttcaatgatggaatagttatggagacacttctgtagactcatccagtcttattgctctgttggacacatctgattctaaactaagcttgaccagaccaccagatctgagagttacgttgcaaattgagatagacaagtaggtaaaggaaattcagtgccaggcatgacaagaggcagggcaccccagataaggtgtgcaacgagacattcgagtctctgagctcatatatgcccaaagtcctgaacaactcgatacaattttgctacaagatcaaatcataacggctagatcaaggtaagttctatttttatgtcggtttggccgatctagctaatgaattgacaaaatataagtacagttacatacccactaatcaataaagacatccccatgctaaaacaagtatgaaagaaatgtgcatatccctcagtatctaaaagaaaatagttttaagttttagcctataagtttatcccacaaagattatttttacagtgaggttcactagatctctttaatactactttatatttttctccctccttctcttttttttctcctcattaatagaatacaatgttcttttagcctcctacttaatctatctttgatagctaaaactacattgttttagaaacggagggagtatgtgagtgacaggttacaacttacaacaatcattgtctgatgtgtcacttgcttcggttcacaataggctgtgaactttatgtgttgcttcggtttgttgttcccctattgttttgttgctagctgctatgcttgtcatcagttcctgtgatgaacgtggcggtctgaaactctgtaagcctgcaggtctcactctctgtctctcctcattcctgagtcctgacagcctgtggcccatttctgcatttagtcctaattaatgaatttacctagccagttgacaccatcaggagggaaaaatactgaagactctgtgaaccctgcaatctagtagtttacatgtttattcaaatgagcaaatattcaactccctcatggactctgaaataagaattgagttttgcattcatttcttgtgctcttcagttattcagttcagttctatatagtgtcaggactatcatctgaactgtttcgggttcatgaacaataactgttaagtccatctaataagttcagttattcttcccctgaatgactaatgcagcaaagcaaagcaatgctgaatcgcatccagtttatcttaatttgggttcctgtgcacacaatttgggtgaacttgtaaagttcaaatgccaaatgtgattagaagcacatttagttagttgctgatggaggtgtatagggcttttgtatgtatggattgtggtaaggcttgtcagaagttgtaattcctacctccagtttcagatacatggcagaatttcacctgatggcatttgatcgttatgttcagagatgctcagttgctcactactgatgctgtagagctcactcccccaaatttgcaaccctctcatgaactctgaaattagaatcgaggtttgtgttcattcctgtacacacttgagctattcagttccaattttcatctgaatcgttctgtgttcatctacaaagcaaagcacatctagagcgcatccagcgatgagaagagaaaaggggaggaaaacgagaggttcgccccaagatccggccgagcctcgtcgaacagcttcgcgctccgccacctatctccggcgccgacgacgtggggctcggcggggatttacctcgtcagagagctcgttcgcttgccgtcgtcgcatcaacggcaatgcaaacatataatgtctccctgactcgtggggcccacttgagggcaagaacgcaacaatgacgcgtgtctctcctgcttgagaactaaccagcagccgctcgccggagctcctgccggaaaccccaaatctcggcgcccgtatccggaggcggttcgtgtcccgttggttcttggagacttggactcctatcctcgttcagatcaggggcgctgttcagttcttgtttatccagcagggcgcaccgaaatttgcagaggaatctcaatctccaaactggtaggaagagattttggtcgatagaagtagagttcttgtttgttctttggtctgtagagttcactagttcagataatcatgtcatcaacaccatgaattgaaagagatgctgtactgctgtttattgtgtttactgtttaattcgtagtatccatcaaacctgtatctgtttgggagaatgttcgatcaaattcaactcatgaccaaattcgtgttaggcaaatattcacattcaatctgttacttcctccgttttacaatgtaagtcattatagtatttttcatattcatattagttttaatgaatctagatagatatatatgtctagattcattaacatcaactaggaaggaagcccgcgcatatgcgcgggcaatttatttattgtctataaaaagaatattaaaagaagccctatcacactatattcactgtaagaaatagatcatagattttgatagtactaaatgataagaatgtgtatcatatccaaacaaaaaatcactttgttccggttatatgtaaattcgcctatcacccctacttattattattgtcttggaaatatgagtatctttttaatagatagaattgtagttatacctaaaagtaaacccaatacaccattaatgccagaaaaagttaaatctccacatcatacccaagtgcctatgtctcacatgtgtccaaatctatatataaatatttaaaagtactgcttctaccaattaataggataaaaccgtttaacttatataagaatgcctctctaacgatcgggtgaagccgactatagccgttaaggtttttctttaatgccttaattcatggtctcgtattgatatagtcgtgctcctcaagtaggccagttaagctctattttcaatggtaacctgtaaaatcggaccacctcaaccgaataatgcatactcctgcatagtttactacaacgtagccaattgagattcatgcttggcaccctttagggaatgagtgaaaaaagatggaggtaatgaaaaaaaaggtttttttgtgtcttgagttgatttaatgtatagagtagacataatgtgtttatgatgttaatcaatggtactaaattttagtagtaaagacatattgtttaaaaaagattagtatggatcattcgactatctaatatcttcagtggcgaggatcacataaaaaatatatgctctcacgatgatcatttgctaacatatggttttgatattttttttacttgtattatacatctaattcacctatgcatgtaagtagggtttaatatgcgttggaatttgtgctaatttgttaacactatttggatgagaccaacaaaaaatagatataatgtagttacgtgtatgttttttttttggggggggggggacagtagtctctcgtacatacgtttgtttttcttttttttggacaaaattttttctaatgtagggatagggtgtacgcatgtgtactcccagtgtgcttctgcacatatttatatgagttcatatgattgtcttttaaattattagtaaaaagaatactttcgagaaaatcaatgggaagagagtggagcaaagggtggcgtaaggcagttgcatatggcatggcttgttttaccacctcagtaggagtagttgctacatttatataccctcaatttgggaaaatcttagagctggaaagaaagagaaaactaccagatgggacggataatatacacactcttttttttctttttatatctcttatctacatacttacgtaggagttgtgtacgtacgtatgcacagaactatacggtttttagcacatagggattagtttagtatatctaatttaatggttgaaaataatggatcattgatttaattgtaaactgatggataaatattttacttttttatataattncccccccccncccccccccccccccccnnnctaagtggcattttaggagtatttgtagaagtgtaggaatagtattaatnataggtgnaangcccccccccnnttgtagtccactattgtttgtagtatattgtttttatattctatttacctataatttgttgatggttgcgcacttagtatcaccctttatcttcggtgttggatgacacacgtgctcattagatatcagctatcgtttggtgcattgtgcatggatatctcgtaagtaatattatttagcgatttgtggacaatggcttgtatatagaattatatatggagataagtgaggacatatgttcgatattttaggttatgattaaccaagaatattgtatactacatatgtttagtaccctaagtaacaaatttaagattgtgttctaaagtgcttatcagattggctactctcttatttatattgaacatgtttcccgaaattgctaaacatgtttcctgaaattgctaaacaatatattatatggtgcatgttttgcaaatactttttatataaaagtttttttttagaaagatcaactaaatttatttttgctttttaatatttaatacaaaattaaacatgtgctaatgacttgcattattccaagtgcctacataaactcacccaataagcttgatctaacgaagtttaaagtaggagataaaggacaacgacacgatgtaaaaataatatatttgatatttaatttctaataatatataaataaagaaaaaacagtacataataaatttactaacctcattttaatatattagttttttttacagtatggaatgagtaatttttgagggtgctatttataactgggttttttcattttcaaaacgcaggtctaatagtgtacttcctccgtataaccttgtaagactttctagcattgctcacattcatttagatgttaatgaatctagacatatatgtgtttagatttattaacatctatatgtatataggcaatgctagaaagttttacattgtgaagcggagagggtacatgttatgtttttttctttttccgggggtacgtacgtgtgtgtgtttttttctatatagtattcgtatgtgactgggtacgtacatattttctttttgtcaaatagtgtacgtgttatggtttttttttcttctccgccggcatgagaagtgaaagaaaagcgtacacacacaaaggggaaacggaggtcagatggatacgtggatagtacgtacgctacggagggatcatacttgcgttggacggatggatcgagattttgatttccttttaagataaatctaacgatcaaaattaatgggtccatcaatttaaaggaaaatcgacggtcagatttctctattttaatagagtgacatgtggcgactcgagagcgtttataggatgccacatgtcgatttaggagcgtttgtagaaagtttaatggacttaaatctaacgatcaaaattaatgggtccatcaatttaaaggaaaatcgacggtcagatttctctattttaatagagtgacatgtggcgactcgagagcgtttataggatgccacatgtcgatttaggagcgtttgtagaaagtttaatggacttttagtatataatagaagatagatagataatagatagatagatagatagatagatagatagatagatagatagaagatagatagatatgaatgtgggaaatgatagaatgccttatattgtgaaacggagggagtaatacgtttaactgcagttctcaacatctctcgatcgacgagcaagctgtggctgctgctgcaattcggcctgcaattcaagtgcagcaatatgttgtgtgcaatttgtgcattagtgcacaagttgagaatggtaatattatttcactcggaagagatggaacagttgtgaaatgcagaaccactcggttcagagaatagtcctggacaaaaggacagaaaatggtccaatggtgacaattgatcatttttacagtgaatggtgagcaactgatcagcatcgaccatggtgaagctgaacctgataagtcgacagcactaggggtgatgatcctagccacccataaatcctttcttgtatatttcctaacatatataagtcagcaagtcaaatgttcttatcgttttctttagtcgatggttcatcgattctgacatcaagacaagaagccaacatactgctagccatgttcctttcctcttggctcacatacggccatttgaatggattagattcagaaataatacaatatctcgtctttctttcttaattacttacatgagttggccggtgcgcaactctgccgccggctaccgcctgctgcgcagagatgcaagtgggtagtcccgctacccgtataaaaacccgcttgctagtatatttttcgtatggtagtacgaaatttagaagaaaaaatgaactagaagtaggataagcgggacaaaaaaaaaagcccgcttgcccggcccgcttgcatccctatgctgcgcgccaggttgagctcctcggccgcgagcgtgccccgggtccactacgctgcagctctccctccgctcgcgccttccttcgtgcccgatagatgcgaccgcgccctctggactccctcacccacctccgtgccccacgccggtcaggcggccaacacgcgcctcctccgccattgtcgacgtttgatgtcgcgattccggtatttgcatagtatggggatcgttggtactaggatatacgcgagactgaggtaaaagagatggggacgaggatttttatataggttcgggcccctgaattgtcaggtaacaaccctacatcctgttggccgaagccggtattactcttattcaccataatcacaccagtataatatgtggggtagcctatctaattgttgtcgacatggcggtctgaaggtctgactcgtagtcgacaacagggtaatcttcctcctcgaatccgtgcccggcgagatcagagatagcgctttcgtctctcccgacagtatccggagacaccgtaggggactagccatgcttatccctgaagttgatatccaacgtcttgtcttggcgtatgttggcttgtatgttgtggcttctgttgttccgtgtcccctctcctcctagggggccttgtatttatacccataggtgtctccttgtcctagtagaactagggaaaccaatatggatatagtccgagtaatccttgtcgtttccatgtagaactctggttgtctttccttatccagaactccctccatatctgaagtcagtttccgtattagacatggtatgtggtgggtcctgccgagatgtagtcgactactattaggtatgtggtatccataaccctgatagtagcccctgacttcaatgcaaatgaacgaattcatattctcgaccactgaccatggagtaactgttatcgagctcaagtgaccattctcggtgagttcagagataacgttagacttcctttatcagcctcgtgcgggcacctaaagggtttgtctcagtccatctccaacgtcaaccaagaaagtacagaacattcgactaagtctcccgtcttgctgtaatcgagaatttggattgaagtcaagaaattttatctcggcgggtacaccatctcttcaatccgtattccttgccgagatccaccaactgttctcgagcgatcgagaaggcgtagaatctgcgacggagccttgtcaacatttgtcgtactcgccttagtcgatcttggtgtagaaccatagagacatggagtcttccacaacgtcgaatagaattttcctgaaatcaatactcagaaaagaatatcaaatagaaatagcccccgggcgaacgctcaaagggtgacatgttatagtatgtatggaaaactgaaaatgagttaaatttacagaccaatgttttgtatatgagcgccttctctcttaccgacttcgatcagtcagtttgttgagtcatacactctccctagcccccagccttgtcgtcggagaatcgttctcggaggagaaggctcttggacccttgacctgccttggttgaacaagcactaattctagcccccagtcgtgaagttggaaaatccaatttccgattacacggcttggttaatacgcacggcgagaactcttacacgaccagatcttacgtggtcttttgtctctacaggatccgacaaggccttatcggctctaggcgcccccagccaaagttcccttaggttcctcggaggccttgtcaagacggcgtaaagggacatgaggataggtttcaatgctaggtgtcgtcatggtaagggatctctaggtaaaacacttagcaatattgtgtatctgatatcaactttgttcgagtagaggtaatgggagaatcgctacaccgttggtcaaaaaccagttgtagccccaactcgaccacttgaaacaaaggtagtgggagaatcgctacaccgctggtcgaggaccaggtagtagtcgtaactcgaccacttaaaagtggaaatagtgggagaatcgctacacctctggtcgataaccaggtagtagtcttaactcgaccactagaagtaaatgtacgagagatcgctacgattaactggttgagaaccagtgagtaggtgtctctcgaccatttggagttggtacgagggccgttatgctaccggtcgaagactagtcgtagctgtccctcaactatccgaagtcatctgaagtcgtggtgcgaggaccgttacgctattaccatagttgtacctcgaccatcaggatttaaggcacgagagatcgctacgtcctactggtttgagaaccatgagtagaattatctctcgagcaccaatggaagctgcggtgcgagagattgctacggtttacaggttcgagaaccagcgagcgagtagaattatctctcgaacaccaatggaagtttgcggtgcgagagattgctacgtacttgttcgagaaccagcgagcgagtagaattacctctcgagcaccaatggaggcgctagagttggtttattacatgtgcatctcatgtggccagcatgactcacatacccaacttatagcatatccggatgtccgttcgcaatcatgtcgggtgatcaagccgacgacgttcgcgaggaattatccgttaacaaccttttctcgagtagctcagccatggctggtgtcgcgaccgagaaaattaccttttcccgaacgctagtgtattaatccccgtcccaggaaaagccggggtacaccacacaaacatgaaacaaaaggcacatctttattatatcgataatatttacattattacaaaggcacttcaggcatgacaaacaaaaataaacagcagcggactagcgggcctacggctccatcttcacaggcgctcaactggggtataagccaggactccacctaagacttcttctccaaagcttctgttactgaagggggaaagattgagcaagaatgagtacaaccacagtactcagcaagtcacaccggaaatgcataattaatgcaagggggtacaaggggataataatataggggttaagttttgcagtaaacagcatttaaaagtcatttagttgcccaaagccattttataaagacgatcctagagctacacagtattattaatcaaggccgtgaacccacacgaacctgccttaacccaaggcctacgatgattcagaccgaactggcaacccgaccctgggtcccagctcgtcccaagccaacccaggccaatcattccacattttagttattaagcaggttttaagaatttaaaacactaacttgggtacattgctaggcttgcccataaccgagggcgcggctattcgaataggttttactctgatcagaggtgtacatctttacccacaagacacgtcttcctcacgtgcaaccacgtgccacataccaccacggcatatggacggaagacatgacatagtttccaacccatcctagccatagacaagagtaccgacccaacccacctacggccggaacccccggacaggcaggcagaattgagcccctagcagcaggacaccagccctgtgccatgacatctcgactaccgggccgcagcccgtgtagccttcatttgtcctagagatgtccatcgacccccgactttgtccatctccatccgtgtacttttgtttataaccagactgagccacaaactaagccttacccacttgacatgtggaagtacggtagtgctttgcaacagaggcccgaagaccgaggtgctgctaacaaaaccatgcaccccgagcccagcctaaaaccattttgagggttttgaatagagggagaggtgtgcatccaattccacaataatccaaccattccatagtgtccaagtgacatgaatattcccaaagtctagagttataaaaccacctaatgttgcctagttaatcagcgaagcatctacctaaattcatactagtggaaccatgaatagagtatccactagctggggttttgtttattctagggtgaacaaggtaataataacaatagcaataataatgtcataacgaaggtaaataggcatggctaaataaaacagtgataacgcgggaatttaaataaagcggtaatgcattaatttaaatcaaaataattttataaactgggattcaatatgctcaagaataatgtgacttgccttgctcaaagagaacggccttccgaaccttcggcgacgatcgcgaaccacgcttcgggaacctccggaacgacagaagctacgcgaagcacacaagcaaagctacaagcctataaagaagcaataacaatacataaaaagaaagcacacggttctttaggttataataaacattaggagacttgaacgggtcgattcagagttcgtatgaccaagatatgatcatccgaagtttaatgctgttatatggagatttgcggattattataattaggctttgcaactataaaacatgtgaaagcgctagcctggaaaagacaggaaggctgcgctgttgacatgcggaccccacatgtcaacctaaaggaccgcggtagaccgagtacacagagacggtccacgggtcgacggaagcggaccccgtgtgtcaactgaggcgagtagccgacaaacggactccactagacaccacgcgggctgcacacgtggaaaccacgtggctaccgagcgggcacactaacacggacactacacggtcacttcccgcacacgtgaacgactaccgacaccggtacacgggtaccggggtcgacaaccgcacaacgggtacggggcgacaacgaaaggacaaggacggggcagcgagaggacggatccttaccaccacacgacgaggcgagggaacgacaacgacgaacgggcgcggcggaggcggccgggaacgacggagacgaacggcgaggggacgacttcggtggcgatccttggacaaaggcgagacgcggccggcacgaggcttgacgacgcggagccgaggacgaagacgacgatggggctgctgcacacttgacgaaacgcgggcggcgaacgcgatcggcttgacggagggacgaacgccacgacgatgaggacgacgagaggacgacgacgacgacgaccggggccggcgaggagacgacgagggcagccggcggcagctgcatggagacggggacgacggggaacgcgccgctgcgaatccgacgacggaggcggcgccgcgagacgacgagccggcgaggacgaatgatgacgacgacgacgaacaccggcggtgttcgggtggaggggaggcgaggccgagggcgaccttgccgctatgatgccggaggtggtggtggcgcagcgagccgacgagccggggaggaggaaggggcggccgaagggacgccggcgacgacgaggatggagaggccggcgcaatgcttgacgacgcggtctccggacgaatcagagggcaggccggggtggaggtcgacgcggcgacgccgagggaggagacggcgcggccggcccacacctgagcggcgcggcaggggcggctggaggcagtacagtggcggcaacgccactggacgacggcgggaacgcgcctccggcagtcaccgcgcgaaacggagggcaggctgtcgtaggctctccagaccttccattatatttgagagatgaagtgaataattcaagtcatcaaacaagcataatgaaacatccgacacctcgagagaggaatattggagacattgctgggcccttagcctgccagtcaacttcagcctgagatgtgcccgtcaaaccactcgaaggcggcgaccagatgtgttacacattcaggagacttgacaaaaatggctaaagatctacaacctctcaaatattcctaactcatactcatgtgaatctagttcccaggatgtgcactagattcacactttcatcttaagcatggttacacatagcaaacacaactaagatgaaagaaacttaagacttacaacaacttaataattacataggccgaccgcccaaatagacttattagagaacagcggaagcttgactacccaaacacaagcacaccgactaagggtataccccattaagttctcatcctagaagaagcaatcggaacccgcatcactcaaagactaagactaaacctgcaaacaaaaggttatatcaaacagcaagagtcagtacattaaacaagttaatgtactggcaagcacaagtcaatcctaccatactacatgtaaagcatatattcaaaggaagacaatatgtagctcaatttcagcataaagcaagttttgtttcgcaattcttttgtaaagaagttgatgcttcaattaacaaaacaagttttaagttttaacattaagtttatcataattccatcataatcaatctcttgttgtcatccttgaacaacaagtcataatatatcatcacactcacacaactcaacacgttttatcaatttcaaatcaagtcacatgttcacattttaaatcataaagcctatactcatgacacatcaccaaagcgctcatgaccgtgagcacggctaatcgattagtttaaagaactctgcagagtttgtacagctttacccacatgatatgaactctctagtttgttttgagtttgcaagactccaccacactcttcatgttgaatgtgatctagaggtcataacgaagcctttacactacttagaatctagccttacaccagcacgatacgtgttcctccatcctaggcatacttggaaatatgtctagaaccgttaagtggcgggcccacgccttaaacttaacgccgtggtggcggacacaacgggaacccacccacgtggcacaataccgttgtattggacagacttagtcacctaaactaccacgtcggggcaaataggaagttcctctgaatcatcgactaattcctcataattatcgactaactcatacacaccggcctaccagaatgcaaggctagtcctaaatagattaatcagcttaggccatcccatactagcacatgtggatgtacgaataactttaaatgggtgacacaagttcggtccttatggacttgggcaaacactccccctatcggtatgcaactaacactatatgcacaccacttgctgcccaagtataaaatcacattttacacattttagttcgcaaatacccatcatattcattttattccagcaaaggttcaagtatcaaaatcacattttaattatagatggaatgaacatttgcatatttctaagcatggctaagcaagtaattgcacatagagcatatataaacccatttgagcacaaagagtgtactctaaccatttctaggggtgttcaaacagcaagagggatnncaattattcaaggtggaatatgcagcaaataggtcataactaccttaacccaatttcaaataccgatatagtctaagttcacatgcaactttgcaaacaaatattttcattcctcaaatcatgggattcaatgtgttcaaaggatgggaggagaaaacttgccttgatcagagaattgttagcacctaatccactccttcaccgattatgcaattatctagataaaggacacgatatccaattaaacaccgaaagagctgaaaatccaaaatgctctaaaatgcatgatttatgcacagtgggttggtactgatctaaaatgaatttaggtgaaataattcctattttattttattccatttgggagttatgaattttagaagttttatcggtttatagtagtatagtcttaggtagtgttatgaaatactttggtaaagtgatttttactagattagacttcataggagtgtgaagttgtgttttctaagactaacacatttggtttcacaatttttggagttataatgatttctttatgcattttacaagttataacgtgttattggtgtatagtgttttatatgttcatgacttttgagttataggttcagaacatgctacttcctgtataagttgaataaaaggaataatttggttatctaaaacatttttagttcacatgtttatggtctttactagtatggttcatattttataaactagagatgctctaatctaaactagcaatatattatattaacctagaaattgttatatgagctaagttcttctaagttttagtggatgaggatggaactatggcttcactggcaatcaagttt

SEQ ID NO: 4371 - DNA, 4851 bp, Oryza sativa
  unsure (1)..(4851): unsure at all n locations
atctgttttgtactcaaaactgttttgtacgtaattctgaaactgaagataagcagtggttagnaggagtaatgcacataaattcagatgttaaaacaagacaaataaggtctttccataggataagtattagtcaagttggaagtttttataatccttgtgcccatctcctgctaggaagagaacaaagtgaggaagactagttgctcataggatgccactctaatctagatcctatggttgcaggcttgcagccttgcaagttactagtacttagcatttgacattatcaaaacaagacaaatgaaacaagcacaacaaggccctgttttttcaatgtctcaccagccaggggttcagaagaagacatgattggcaaacatggccattttgtcttcgtttactgatgcctcagctcccagatccacagtacaggactaaccttaaccaaatgctctactcttaggacacaccaagaatcttaacttgctcttttcatcaatacaatgtgggccaccacaatgaaaaaaaagtagaaaaaaggacagaaattatatagagagcaactacactgaacacagtccaatgagacacatgcatactgtagtagcttcagtctggtcaatttcccatccattggactcactttttttactgcactttttcctgatgaaaacacaaaactgcaaaatactgctacagtgttatacatgtacgtttactctctagatcaaaactgatgacttaattgaactgcgaatgcctgcaataaaagctgacatgaaaattttctttagagaaccagagcttgcatcctgcatgggtttataatagtgtgcttttttgtctgcaacttggaagagtagactgtagaaaaccagcattggatctgttcatgttgatgttattttctaccttctgctgcattgtactactactgtataggataactgaagattgggttgtgtgcacacacagctcactcactgtcagaaggtccaatgcttctggcaatgcagttcatggctgcaagaatcaagatcccaatgcagtttctctgtactctcttgagcccaattttggttgcctgttgatctattccaagcagactacaaacctaccaaaaccaccatcttaaaaccagaattacctcacttggctgaagaacagtagagcaagcaagaaagagttcttgaagaaatacctcacttggcctctacctctttcagtctgcattgaagaaaaatggttagtggttgccttccatcacatgacctgctgccacaagagttaacttctctgcatcttattggcactcctgcatatacacaagaggagtacatttcaagggactctttgcagcaaagagatgacacacatctcactccacacatctgactgcacatgctttgcagggcaatgacaggtgcagaggtaatctcattctgcattacaacaagaaactcccatcaaggttgttgcagccatatgcccggttcttttcgtcttacaaaaggtgtgtttagttcacgccaaaattggaagtttggttgaaattggaacgatgcgacggaaaagtttgaagtttatgtgtgtaggaaagttttgatgtgatggaaaagttgaaagtttgaagaaaaactttggatctaaacatggtgaaattatagattatcacgggcatgcacgctttccaaagcttataaagggtgtgatgttttcagaatcttttcgtatataatttgcttaaaatatattttaaaatgaattttcagctttttagttagttgatttatccgtttgtaccctttaatatcatcacaaatgagatgatctattatctattatctattcagaacaatcaaactgggtaataccaaggctgtgtttagatccaaagtttggatccaaacttcagtccttttccatcacatcaacctgtcatacacacacaacttttcagtcacatcatcttcaattttaaccaaaatccaaactttgcgctgaactaaacacagcccaagatgtgagaaaagtctcctcatcaaagtttccaaataggcagggatgtagcagcagtgtgatagtgccaatgtggcccattggcatttcatttgtcctccatggctggaagagagagagagagagagagagagagatttgcaacagtgcaagttttatggcacataaattgcagggcacagtgaatggccagtttgccttgcattgcttacaaacaagctcacaaccacaacacattgatgacccccaccattgatggctgtggcagcaggaatttagtggcagcagccatttgctgtgctcatggacttggcctgatgctgcatgctgctgatgcagaacattcggactcttcacttgcaaatggggctcaccagtctagattattcaactgagtaactgactttctggggtccacacggcaatgcagtgttggtccataagttcatagatccatttgtggagatcagtagtgcaggcagggtttaccttatcgtttcaaagaaaaaaaccatctctatcagtttgtcaaattgagtaaaacttcaccttttataagaaaccaattaaaaaaacttttataagaaaaccaattaaaaaatcgctcggacttcacaaaccgattctctttcatgacaatcgagcagatcgttaaggtaatggtcataactcataagtgatgcaatttgtaggcttcgaaaatgttaatttttagcttatcagaatttcagtaaaacatttggaaagatttatgcatggcaagaggcacaggccttttcacacacgccgtgtacggaaaggaagacatgtcacttgttctaaagttgcatcatggtgcactatgattttttctgcagagttacatgcgtgcttgcacgagcagcaggtttatccttgcagaagccaagtgctaaaagataagggagaggtacaacacctacctaaaaattcagagaaagcactgcagaaaattgagcagatctcacttcagtttgcaggttgcaatcaaacacactgaagttcctttgcatgtggagattgagtagtttaaagccacctgcttcaatctcattgctccagtagcttcagagttcagacacagcttgcaactatgtccagaagtaggattttactcggtgatttctgattaaccatttgtcttgcttccatatgttgctatgctgcataaaaacctcatgctaaacacaggctccagaaatggggatctagcagcaactcttcttaggtatcgttttagtatgagcatttaaacctaaaggcatttacatataatagggtggtatcagctcatacagcagctaagctataaagtattcaaagtgtagcagatgccacattttgcggtgcctcaggcactcgatgggtcaacaggggaacaggattggggatccatcgcgccgcagcttgttgtcggagagatccagcttgctcatcttctcctcacaccacaggagctgctccttgctgagcttcgccatccttaggacccttgacacaaccttgatgtcgattaaggcaaaaagcagctgaacttcctccattgtggctggccaggtcttgctcttccatcctttcttcttcttgaatagctccttcactttcacttccttctgcaggtttggagggatccattagaaacaaagagtcgtataaagacaaactgtagatatacacggatctgagactgaaagagcgtgtgaacaatcgaatcagctaattgggctcacgttgctaagaatagatgctgcattagtaatatggcatttatttctcgacgtgccacgtttggtaacatatgctgtaaagaaatcttgaaggcatgcagactcaaccaccatgtgcaagtacaaataccatatccatgcaaataactttcagagcttttgtttcatatgagacgaacatcagatctatttgaggaaaaagtgattatactactagcacatttcagaaagagatcatatgaaaaccaagccaataaaagttagcaacaatgaatataaaactaccccgtttcatcaaatataaaactaccccgtgagacactgaataaccagcacccagcagatatgaactaaagaaacctaccaaggagctcgaggttttgttagtcaatcagccacatataagaataagatattaccttatcaagagaggattgaacttgttgaatcgagcttccagtatgactatgaacactcatgagggcactattctttttcttgtcctttttcaggaaaagacggaaagtcatgatagactcctctaataatttgatgaggtcagatgcaaaaattgaaggttccacttgatcttcagcattatatttcccatctgcaactgtatagagaatacaaaaatgaaaagaaatatattaattaaaaacaagaatggcattaattaacagagtcgtgtaaaaattgtgtttaaagaacccagttctcaaatgaatgcaaaaacataaaaaaaaaatcctgtaacaaaagcaaaagtgaagccatggccccacagaagagacaacagtgtttattgcattcagaacttactgccttgctggtagaccaaagtaaaatctgatgcaaggaaatcttttggggagttcagggatttttttgtactaagcatcacattaaacaagatttggttcaaccaaccgattagcttgcatctaggtaatacaatttatacctgtaccaagtcctgctgtgagtctagactgatagaaatctttcaaaatcctatggaataaatgaggaagtttatgggcatggcattctgacacatcttaaatttgcaaagaatgctctt

SEQ ID NO: 4372 - DNA, 7946 bp, Oryza sativa
cagtcttcctaagctagttggagagcatccagagcttgtacgagttgctttgatagtgacgaataacatgagtagatttgctatcttcggaagacctgaacatgtgtacgtgcttgtgttctttcttattccccgagcacatctggacacgccgtcagcatctagaaccgtacccctggttgatcccgatttatgatttttcacgtttgtcggtgttaatactggtttaaaattaaccaagactaaaaaatggaccgataaaacaaacaccaaaattaaccttaggattaaaattttaaaattcaaaatttgattgtatgtaaattgcaagctaaggtacaagggaaatccaactgaactactatattgttcaaactgagtttattataaactactctatccatcttaaaatataagtattcatagtattcaacaaaattaattttagggtattgccttcttcaccgactatacctgaactggccctcatttaactttttacccaattaattttaccttaaaccccaatcccactcgaattgaatgacaaagggagtaactaatactacataatcgaaggtctcccataaaacgagccacagagatattatatcaaaatcattaccatgactaagcatatactgaacatgattgcatatatatactccatatatggaattaattgaacattagtgttattcatgcgcgattagatagaacttagggccatgctaattggctgctagctagctaaatagagctagagttagctactaattacctactagctgtttgcagcaagctgatagtgcaaccttagctactagagctagtggccttgcatgtgttgatcatcatctttactctggaatatgcatatccagctaacaataatgcatatgcattgcgtacatttgatgcatggctaacacaacgatcgatcgacgccgctcctactcgatcgtttcaccaatgaataattcatgatcagtttggctctttcttccaagccttttaatactatagcatgtagtatgagtaagagctactttctgcaaacccaagctcatggaccatgcgtgtactttatgttgcagtgttgcagctaattactatgtctgtttctctattgattttttaaataaagtttaaacatttgtcttatctaaaatttttgtgtaaatatacaaacatttaagtcatacttaaatacttaaagaacatttaacgataaacacaataaatgataattacataatttttttaataagatgaattgttaaatgtatctaagaagtcaacagcgtcatacattaaaaaagatagagtagttgatatagactagtacttcaaaattgaagtatagcaactacaaaaatccaagctgcattgcattccgcgcattcatccgccgaccgatcgatcgatcagcagtgatgggatgcaacatgggacctcttgcttgatgaacaataatatgatcatcatacgccggtgccactacttcttatcgtatacacactcgtccataaattaataattttcatcagactagtatataccgagttgtatgtatgtgtatgctgcctgattaaaaaggctgtcgtttcggacacaggtcaaactttcaaagttaagcaacaaattaataatatatatttataaatatttggaatattgcacacattcttaaagtcccaagcctccgaggtaggttcatatgctatggacttgatcacttgattagaggaacttcatcccaaatattacatactcaccgttgaattcttctttacaaaattcttatctagattccaagactaggtaagtacatagttaaaataaaatatagtacttcccccgtttcacaatgtaagtcattctaacattttatatatttatattgatgttaatgaatttagacatatataactatttagattcacttttgcttccacccttatgttatgatgcgattaaccaccgcatctacttgagagaggatcaaatacacaagcgtttcattccaaccaaatattccagataacagataacggggggatgagggagtcgaatcattttttgaggtgatctcggtgagagcactcccattagatttgaagtgccggccattgactagacgaagaggaaggaccaatttgatcttgaccaacaactcgtgccatgccaatgcttgtaaaaactgctaccgatcgagcttgatctcatgcctggattgattgaaaccagctaattaaacacgtgcaatataattcagactctttaaccgatccaaatcttggcattgtacatgtaatagtacaaaatatgcatggcagatgcatgctctggttggccacatgatcgtcgcgaaacgtgtgatggacgtacggcgatcgggtgagatgggatccccacatgcatatcatcaccgcttcatccgcctccttctttgtcctcatcttaagctaagctaaactgagaccatagagcttaataattgatcaactatatatacatctatccagtgattagtagttcttgttgttgccagttgccttctcttcagatagatagcgagatttgatcgatagatcgagataatgattaacttgtacatgcaggtgatcgatgcgtcctactactagtagttaatttctccaagctattttcaattcaaagaaatagtttcagcctctgaataatggaagcaagcggatcaacctgatcaagacgattaattgcatcataatcaacagagagttatttaagagctagctatttttaggccttatccgtaggctgccttcacatatatctctacacatcgagataacaatttttacagacaactaaaatacattaatatttgtgtagagatggtagaaccaatcgtctcttaaaataacacatgaaaattatacgtctccagtttttttttcacgtgaaagtaaccagatatatagcttgtttatttctagctatttaagttcatattaaatcattactctagtttactaatatattgacgtacaattcttttgcacgttcgggaaaagaatcttactctagtttagtttacttagtaattaaataattagataattaatatgtcgagacttctggtaatttttattctagtttctccactgaccagcgccatatgaaaaacaatttccaactacgatcggcttaatgccatctcgagcgaaaaccatctccacatgtgggcccttatgccagccgttgccacatatatttctttcatcccataaaaaatcaaaatagaatacaaaagcacatccaaattcactatattaagatatgttatatccaatcctatgcttcttttatagagggagtacataagaccacatgagttgcttgtttacactgataccttgtaagttgtaatgtaagttcatgcagcttagttgcaagatatatttgatagcgcagtgaaaaggggtgtgtggttttaaccttgagatcacgtgtttaatatttaacacgcttataatttttttagaaaaaaaaatatttggagagacgattctccctcgtttttatgcagctcagctgccagctcgatcgactcgaccagcttatgcattcagagatggacgatggctggccgtcatggggtcctcctgcagctgggcatggtggttgcgtcgttgcgagcattcgatccgatggggacgacacattgcgccgctagggcccccggatcgatcactgttcatcgacgtctcgtcggcacctaccaatcatcatcatcatccatcacacattcattttcgcagcaaatctctgaataattcagcagcagctcgatccatccatcagatcgcaggatgaagcatgtcatcgatcctgaatttagcctgacgagactgcatttctgtttcatccatactactatatgcaccggcgaaaactatgcaccgtgtacagtgtacagcgtagaattcagagttcagagtctcgtatcctctcactgggtgttaactgaagaatgttctcttgcagtgatagtattagttgttggcatgaacagctaggagtaattaatagagatatgacgagactgcatttctgtttcatccatgcaccgtgtacagcttagaattcagaatttagagttcagagtctcttttcccacaaattttgacaatttgaccctttgcaaaaaactatttttacaaataaaccgccgccaaaacttatttcaaatctgacccttttactcaacgccaaatcgtgtggcgctgaatttagacacctcagcgccaaatagcatggcgctgaatgtacgttggcacgctgacttagtctcccatccgcatggcacggcattcagcgccagctgacgtggcgctgaggtgtctaagttcaacgccacatgatttggcgttgagcaaaagggtcagatttgaaataagttttggcagcggttcatttgtaaaaatagtttttgcagagggtcaaattgtcaaaatttgtgcctcccacaggatgttaaccgaagaatgttctcttgcatatacagtgatattaactgttggaatgaagaattaggagtataattaattaatagagatatgactgagatgttatccactctgacgacaaatcatcaggaatctgtcaaataaagcggccggctatcctgatgaaccctagaagattttcgtcgctggaattgaatctccgggcactttgatcagcaaaacctgatgtgatgccaaaacgagcaccttgtcggctccgcggtttatgcgattggacatcactcacgcttgatagatgagataatgcgtatgctttcattagttgttgtactgcagtacaatttctactcagtcatgatatcattatgaatgaagctttgcattgtccaagttttttttttttgcagataaatgcatttgttaagaccagtgcgaccgatctgaggacaagaattattgcccattgacattgcgaatggtagtgggcaaacataattaaatgtttgttttttacaaaaatatcatacaataattttaattagttcatccttacagctcatgttgcctttttttttgtttttactgtttggcaaaagaattgcacgttactatattagggttttgttgtttatactaaatatgttcatgagtattttagggcctgttcactttgatgccatttttaaccttactaaattttagtaatgttgccaaaaagtagtttgctgcaaatttttggtaactacataacaaatcctgctaaaattttggcaagacaatgtcaaaatttggtaaggttgaaaatggcaacaaagcgaacatgcctttaaacttttcaatagtttacgcttttcgtctttttgttttaaaatatagtaacatagaacacgcaattagacatcagctaccattacaaaagatatattagaacaaaggacatctttactctctctatctattatattattaaaacagctttgaaagaaggcaccacgttcgctgtggaagttagaaatttccacattaatcagtgaaaaagaaaaaaaaagaagagtccaagtagaagtacaatctaaaaatagttaaaattaggaattaaaaataagcaatattgaaacaagttttcatataggaacccaatacgagattaatcaagattcaaaataaaaataaaataaaatccaaaattagaaaaggaaaggagagtccaagtataaatacaattaaaaatagctgaaattcagaattaaaaataagcaatgttgaaagaagttttcatataagaacccaatacgagattaatcaaaattcgaaataaaaataaaataaaatctaaaattagaaaaggaaagaagagtctaagtagtatacaatttaaaaatagctgaaattcggagttaaaaataagaaatattaaaagaagagtccatataagaacccaatacgagattaattaaaattcagaataaaaataaaaataaatctgaaattagcaaaagaaaataaaagacgagttcaagtaggaatacaatttaaaattagctgaaattcggaattaaaaataagcaatattaaaagaagaatctatataagaacccaatacgagattaattaaaatttagaataaaaataaaataatatctaaaattagaaaaattaaaagagagttcaagtaggagtacaattttgaaacaactgaaattgaaaataaaacattaaaacattaaaataacacaatacgatattaactaatttttttttaaaaaaatctgaaattagaaaaagaaaaataagatttcaattaggcatacaatttataaataactaaaatttgtgataaaaataaagattattgaaagaaaagaccatctaaaacacatgacgagataaattaagtaacatgcctataaaggagtagagtggtggcggttgatacgatatatagaaattgttaataaaacactaaataaaatcctaatgacgattaaaaggagggacatcaggcaggccgtaaagcaaacgagtaaggcggtgccgggacttctagaaagtaaaaaaaaacccattgataatcatattcattttttaaaatctcaatgacaataaaaaggagaagcagcgggcgggatgtataagagtatagttacagagccaccgacggttgacgggacttctagaaaataaaaaatgaattccaacgatagttatattcaatctttagaatcacaatgacaataaatagttggcggcggacgggctatagaggggcatagtggcatcgtttgatgggacatctaaaaattataaaaaataaaactacaagtccaatttttaaaggtttaaaacttctaaaaagtaaaaaaaaacaatgataatcatgttcaattttaaaatctcaatgacaataaaaaagggaggcagcgggcgagccgcagaggagtacgatggtaaagctgctgacggtttggcgagacttctagaaagtaaaaaaatgaacccaaacgataattatgttcgatttttaaaatctcaatgacaacaaagagaagagatagtggacgggccgtagaggagtataatggcaacgtttgacaggacatctagaaattataaaaatgaaatccaacgactctaaaagctataaaatccaatttttaaaggttgcaagaagaatgaatagaaatagtggtagatcgagcaagcaaataaagaaggagatgacataaggggtagcaactggtgtgacttttaaaaactacataattataaacacgaggatgataagatttggaatttcaaagtctcatgacaatgagatagccagatagctattttataaattttaagtaaaatcatactaaaaaatattatgattttgtttgggtgctagccgcgcaattacgcgggccagccagctagttaattatataatataacaatataaaacacggaattgacattgtggaacataggggtcggagtctcgaaggtggctacagaggggaaggcaaaaggcccaccaactgcacggcccaatacctgaccaatcgaaacccaacaggccaacactgcgggcaatcccgttccggcccaacttaaatgggccgtccgtaccacggcggagctccggcgagctgccacggcggacgcggagggattcttcgggatcgcagaatgttgggatcgtacgttttcctagtactgaattcaaacaattctcttgaatctgatccaaattcatctctatttcagttgaaaactgatttctacagtacagcaacagagtacacggggtgaaaagatttcccaatttcaccaccacatcaccgggctcgcctgcccgatcgccggcagctgctgctgcggcggcggcatgcagtgctgcggccaccgccggaacaggtacccctcgccgcagccggccgcggcacc

SEQ ID NO: 4373 - DNA, 13974 bp, Oryza sativa
ttcgttgcgagatgtataaattgaatttgaacttgcatgtttgtggatgatatatcacatgttaatacatcttcttaattttttttacattttttcataactatttgagtgacatacaaacaacgataggatatcccctagagggatcaaaatagtttcccccaatatattattcttgcaataaccatcagttgatcacacaaatcttgagccctgttctggcaccaatgctggcctctagcattatacaacttcagaatacaaatttttgaatgctccttaaggataagtattcataaactgaacaaaaattttctgaatgttcttgcattagtttagtaactgggactagtttcatttgcagagatgcagtcccttcttccaggtcttgttcgcttcatttccgttttgctgtcgtccgaagattgaagcaacaatcaagcctcctaaacaaagttgggcttttttttagcagaatatatatgctctctcttttacgactgcattgtttttctaagctttttttaagaggactgatcgattccaactggtggcagagggggataatggggctaagcccgtgtatttccagcaaatgggcagttcgtttcaaatttctcaaacagactagtttggggtattggtggattgtgtgtttttaagtcagcttgttttttgggcaatttttactggacaaaacacaaacgagcttgatgccaatctgatccacaagactgggcaagagaagcgcgcgtgaggtcagcatgcgcgacacgatgctgacacgtgttttatctgatggccccaaattcggctgaagacacacaagaattcagctggatgatggctagacagtccctagctattatttaacttatataaacttttaaattcaatacatgtgtttagtatttcaagctgtgcacctgttccaagcagggcctaattaaattgtatttaggggaaaagtacatgtacaaaaggtttctatgtttctataatactcttacaaacgacgatgtggaacacaagggtgttgattttctataactccgagcaaactaaaaatcaaacggttataactatgtattttttcatcatgcattgcacagctgattcaattatgttcatagcaaaaggggggaaaaaggtgaatttgtattatatgttatgataaaaagaacacttttacaatgctcctgatatcaatcagtcccacttagatcccaacaagagggaaacaagaaaatgtacacacgcactgactactcttgaccagtacgtaaaacaatcacagtaataactactttatctgttttatatcataaaactttctagcattgtctacatttatatagatattaatgaatctagatatatgtgcatagattcattaacatctatataaatatgaacaatgctataaaattttataatctgaaacggaggtagtaataaacagtggtagcagcagctagctagctaggctaaaagcttaaaattaagctagtagcaagcagctgctggaggtgtcagcggatgcacttgcccggcgtggtccatccgaagcctccccggcgcctcgccgccggcggtgccgccgtgtagttcctccagtcgcggaggacggcggcgaggtcgtgcaccttgttggcgaggccggtgcagcagttggcgtggagcgtgcagaccctggccatgtcgcggctgagctggcagaagccgccgcagtgcgccgtgtcgaggaactgcatccggacgtcggcgcggcggctgagctccgcctgcgcccgctccaggacgtgctgctcgttggtccccggcgggaagcgccgccgcgcgtcgcgccaccgccggtagaagtccaccgtccgcctcgccgcgcgcacgtacaggaagccgccgttgggcctgttccggaggctctccgggtcgccgttgtagtagtcgttggccaccgcgatgtccgacgtgatcgcgatgtgccgcagcgggttccggaaccacatgatgtcaatgtcctgaataattaatgcactactattaatactactttcgagttacatgcatcggccagttcgccgtaaaatttggaatattatgtactatcttttgtagtaaatatttaacgtttaggataatatttgatcaaacttttaaaatttaaaccatcaatattttaccaaatgcttagtttagtttcgagaaatggtatacatcgaaaactactatcataattccacaaattacttttttcttagataatgagaaaatctttataaacttactacttcttccgtttcatattataaatctttctaggattgctcaaattcatatatatgttaataaatctagacagacagacatacatacatacatacgtacgtacgtacgtatacatatatatatgtatgtgtatacatatatatatgtatgtgtatacatatatatatgtatgtgtatacatatatatatatatatatatatatatatatatatatatatatatatatatatattcattagcatctgtatgaatgtggataatgctagaaagtcttataacataaaacggaggaagtagattttataaacgtattctaatatataaaattgattgttgaaaatataaaattttatccgaatctttgtcctaaacatcaaatgtgtttacgaccgaacgatgatttgagttgcatgcgatcgacaaccagtttatgctgtgaagtttgtccaggtaaggtgatcatgattattcataccgtgaagaggaagttgaagccgagctggaggatggtctgctggaagaggttgcgcccccacatcatgtcgaggtagtccttgctcatgaagcgcttctcgtcgctgtagtccacggcgccctccggccgccggaggaggtagcagtgcgggtgcacctggcggcaccgggcgagcgccgcggggtccatggccacgatgaggacgtgcttcagcagcggctccgtgccctcgccgagccggaagctctccaggaagaggtccagcagcgaccccggcgccgcgtacgcccggttgatcgacgtcatgatcaccgtcctgtcgtccatcgacgcgttcctcagcacctcggtcaattctgacaatgctttcatctgcaatcattattattatcttttttcagcctttttccattagatgtttcaaatttgaagatcgatcttgttgttttaagaatctgaactgaaagttagtagcaaatctttccattggatgttgcaaatgtgaagatcttgttgttttgtctaagaatctgaactgaaagttagtagcaagtctttccattggatgttgcaaatgtgaagatctatctcgttgttttgtttaagaatctgaactgaaagttagtagcaagtcgagctgtaaaatttcatagaaagttcactcgaatcatttggctgagttgtaaatgatgtaatatatcctatccccacaaggctgcttggacaacaggttagcatattcgttacctcatcagtagtcagtttcagctttaagcttttgggctctgtggatgtgacaaagctacaggaagcttatctcaggctaatgttggaaaagtagaattggcactttggcttgttgatgattggcttttaaaaaaaaaggaaattctagacttggctaatgctgtggaagatatctgcagcattatattggatatggatttgcttgtcgttgcgtcttagagacttatcagctcactgaatgaagatgtagatagaggaataatctaggacgatagaaagggagaccagtagactacctgaccactaatacccgtctattatgcatagttgcaacttccaactatttgcaacgaaatgaaacagtcccaattaattgcacggccattatctattagaattttgaagcatcttgcaagacaataagaacaagaaaattgaaatgaaaaaaaaggtataaaaaccctttttttattatgtaaaagtataattcggcattactcaaggaaactgcactgaagatgttctcatctcatgttcagaacttcagattgttaagcagaaaacgcagaaagcagcatcggtagatcactgacctcgtcggtgacggccggtggagaatcattgttgttccaggaggccagggcggagagcctccagttgatatccatagtagcaatgacgaacgccgccgtcagcgccgcgccgaggaagaaggagatcaccgggatgagcttgcccatgtcccctctcaccttgcaagccatgttcttggcttcttgctgctgctccctgaacaaggtgatcagaaacaagatggatcatcagagaagagttgtgtggtatgatttatatatgcatgcaacatgtagcttttaccactagtttgttggctcgtttgttacaagaccctgatgaatcccctaatgattttggtaaaaatcattaagttaaggtggatacacatcttgtcatatgatcaaatggtttcgcgaaaaatcaataatcagacaacaagatgtgcgaactcgatattttacacgactctctttaccaattctgccccgaattacacttaaaacgactcaacagcttaacgttggcttgccacgcattacttgactgtaaaactctcactcttaccgaacttggccgtaacctgccaaccaaagcgagaacaaaacataacatcaaacgaatcgaccgattgttaggtaatcgtcacctccacaaagagcgactcgctgtataccgttggcatgctagctttatctgttcgggcaatacgatgcccattgtacttgttgactggtctgatattcgtgagcaaaaacgacttatggtattgcgagcttcagtcgcactacacggtcgttctgttactctttatgagaaagcgttcccgctttcagagcaatgttcaaagaaagctcatgaccaatttctagccgaccttgcgagcattctaccgagtaacaccacaccgctcattgtcagtgatgctggctttaaagtgccatggtataaatccgttgagaagctgggttggtactggttaagtcgagtaagaggaaaagtacaatatgcagacctaggagcggaaaactggaaacctatcagcaacttacatgatatgtcatctagtcactcaaagactttaggctataagaggctgactaaaagcaatccaatctcatgccaaattctattgtataaatctcgctctaaaggccgaaaaaatcagcgctcgacacggactcattgtcaccacccgtcacctaaaatctactcagcgtcggcaaaggagccatgggttctagcaactaacttacctgttgaaattcgaacacccaaacaacttgttaatatctattcgaagcgaatgcagattgaagaaaccttccgagacttgaaaagtcctgcctacggactaggcctacgccatagccgaacgagcagctcagagcgttttgatatcatgctgctaatcgccctgatgcttcaactaacatgttggcttgcgggcgttcatgctcagaaacaaggttgggacaagcacttccaggctaacacagtcagaaatcgaaacgtactctcaacagttcgcttaggcatggaagttttgcggcattctggctacacaataacaagggaagacttactcgtggctgcaaccctactagctcaaaatttattcacacatggttacgctttggggaaattatgaggggatctctcagtacaagacctccaaggaagcccacaggttgagccttttctaaagaagagaattttttagccttaatgttgatgattagggggccttgaattggaatctagtacaaaagaattgttctgaaatgttgatattatgcatgataacaaaaaatcaggcatacaacttgcgagagtagtggaacgggaaagaatatgctgcccaaatgtccaagcaaatgagtttgtgcaatgccaatggatgaatcaaatttgcgaagctattctgacgttggaactcaaaaatgaaagatgatgcgtcaatttgaacaaaatctgtattaactgaatgtaatagctaggtagcgaagccattggaaagtcaaaaggagtttttccttgttgtcgctttgcttcgttggtatttgaaaaaaatgaaacgatattaaaaatcttttgcgtactccgtaaaagtgagttgtttgcaagaatttgaagggacataccaattggagaaataaaaagtcagagtcaatgcaattcaaaagacaaaaaatgatgccttcaattcgaaataaaaaccatatgggtttaacatcctattgaaatcctcaatagagaaattcaactccagattcctatgggtgattcgcaaaactgatattgaaacccaaaaggcacagttgatctctgaaaaactgaattcagaaatttaccgtgaagcagttcatccataacctatttatgttaaattctgttggaaacattgtcatgcaagtgtgatattattagtgtgaacaagtttgtatgtacggaatcatgtacgacatgcatgtaggagatgtattacttggtcagctatgatgcatgtgcttgcatgagttagttgagttggttaattagtggctgagccatgtgttcgatgcatggccagcagagttagtgcatgcagagtacgttgtggtcaaggtaattactactaatttagcatttgtatttaaggaggggttcaggaagcttctacagttgaggttgagtcttgaaataaacaggacaaaaaaaatatggtgtttggaaccacagaaaatcagtgtctattcatatttgcgttcatcatgtgtatacatttgaagttgagcgatcaaatcccaacaaaattcagagatttcagtcaaaaataaataaattcagaaatgtcactacacttgtgtaatgtactacttaccggccccaaaaccgtcgttttgtactttgtctgaaactgatgtaaaaacgataaattaaaacgccttccctgaattaattaatcacgacgatcaaacgacctcgtatcataacaaaaataataataaataatcatacggaattgtatgcgattgtgagcaataacatcctaatgatggtgattgaagatctcgaagtcaagagagggaggactcgcggttgatttacctaccgagacgggagttaaccgctcgcggcgggcggcggcggcggcctgcgacggcgagggagtggaggcgacgagagaggtgtgggcgagcagccaccgcggcggcgatgaggagggggtgcggcggcggcggcgtgccggcgtgggagtgcgtgtgttggcgagagacgacgacgccgcggcgccgcctttcgccctctcccccgcgtgcgcggttgggcttgggctggctcgcatgtctctggccgaaacggccgtaattgggccgcgtatcgaaggagttgggccgaattgacgtaaaccgagtacggctccgggccgaaactaccgcgttgctgggattttattgcgaacaaacattattattacctgaaaaatatacatgcataccaatataccatgctccctccaaatctaaaatataaattggacaatatctttctattataatatactctctcggttccaaaatataagtgccaaaataaacatttttaactttgaccgctaatagcaaaaaaataaaaataaaaaaaataaatcatgtaacattgatattactagattttttattaaacaaactttcataatatgcaactctttttatttaaaacataatattgttggtcaaagtatattttggaacagagggagcatccaataaacaaaaaatatatttctatttttattgcagtattttgtaagacaaatctatatatgttgttctagcgcctttaaactaaatatttttaaagttgttataatagttaaagttataaaagtttgatcttaatcttatccaaaacgttaagaattataaaaccgggaggattacgtgcataccaatatatcaatttgaaatatatacatgcataccattttcaaccctcctaaattttaacgttatcgatggtttatttagtttaaaggcctaatttttaccatatcaaaattaattttggcaacttcaatagtatcaattgaatgtttggttggctaccaattttgcacacactagtttaaattctatattgtctcaaaaaaaagtttaaattctattctatgctaaaacttgttaagattttgaaactaataaaattttggtttggcaaaaatttggctccaaacaaaacaagctcaaaatgcacaggcatcaccatgtttgcacatcacatgctaaaacacaactttatgtgcataattatgagcactagaatttacaatattatgtgtctacggactcatatcctctgcagcagcaacgtgcatatgggctcaaataagagtggagtaggacctaaatgtcagtggctttcatatctcgtagagaatttttgttcggcaccccttttctcagcccctctcactcgttttccgcacgtacacttttcaaactactaaacggtatgttttttgcaaaaagtttacatacagaagttgcttaaaaaaccatattgatccatttttgaaaagaaaataacaaatacttaattaatcacgtgctaatatattgcttcattttccgtgcttagtgcacgttgggagccggctgtagcgaacacacccagccaacaatgctgcttccacgatgcgcaaacaattgtcaggaccatatgcatggactttgcagtacatacatatgtaagtttcattagcatgcagttcaatcacaactgaaagtgaaaccacacggcatctgccgcattcaggcccgagaagtgggctctacatgtcacaaatttttcccttttttcacacgccgctgtaactagcgacaggggccttcaaaattcaacacccgaagtttttatcacagcagcaaacactaacacacgaaatcgcacgatttcggtacctccaatggtataccacaaacaaccaaacaccagtatatatctctctcacggtaatgttagctctaatgtgatcttttcacatcgccaaagaagccagtatcaatccctgattagtctgtaccgaagtagcgatcaccatactctcctaaccctgggatcacccggtactcctcgttcaacccagtttcgatctctgaggttacaatcttcagacgagggaatcgcttgcagacacaatggaccccttcaggagcctgttcatcgaaatgccattaccaagtttgcacaaaatgaatcatgtactatatcagtattaaccatgtcaaagagctggagtattttaccgagatgagattgagaaacatgatccgctcctcaggaactccactacttataagaagttctatagcttgatttgccgagttacctgtacagttgaatagttatgataagaaactttagctgtgacttcagtagttctcattccgacaagcaagcaaacatcactatgaaaggagcattggataaattcaacactacctgtaccaagcacaggatccatgagtagaacatgtcgttcagcaatatccaagggaaacttgtggtatatgagctggacaaggggaaaaacaaggtccgttcaaaatttcgcagaaagtgaactatttccatggtattttcaagaaaactacaaagcatttcacctgttgtccattgtccccatcccgatgtattagaattttgcctattttaatccccttacaacaagcacgtaatgcattctccatgctttctccactgcaaaacaacatatataccaagttatttcatgcagtaagtacataaggataaaaataaatcaaagaaatgggtcgtaagtctaactaaactacactgctggtcagcatgggctgagttatgagtaccaaatacatacccctccgtcccaaaaaacagaccaatcctacctacgaacgtggacacatgtgtatccaggttcgtagctaggaattcgtttttttttgggacagagtagtattgaataaagattttcatcactgaacactaaatcaatgtatacacaataatctgcaaaagaacttatatggtatagaaattcactcaggttttattaaccattaaaggaaggttcaacactagaagctgcagataatccaactttttttttgcatttgaagctattagttttcaggaaagcaatggcttaccttcgaataattgacacaccacagagcttcttacaaaagtcaactcccatgtaagtagaccctggacaaaagaacagaatgagtatgacgtcataaatgtgcaaccttccaacatttgtttacattaacataaatggacagtgctacgtgcgtgaaactgtagacaaccagtaattgcagcgctttgctttctctttattaatacaatgccagtgaagctggacctttataaaaaagaataattcatgaagtaattgggtgatcagacaacaatcttttagaagccccagattcaagatttctcttggcaatgaatattgaaccaagatggttagattcatttgattcacagctgcttacattccatatttttccactttgaatggagaagctcctttatcgccataaaattaaaatcagtagtaaaattgtaaaggggttattggagctcttgttgctccttgttatttttcaggacaaaagataataggtaagtgtttgttgaaatttagatgcacaactttatcattttagacctattttattggagcggtgcaaaaacatatttcccattgcttgttgcaaagacacaaaaatggttcttagtaaaaccaccatggattcaaatggctctgggcaaaaccataaacatgcaattggaaatgtcaaatcccacactttcataatggtatatatagcagatccagttttgccaaaactgtccttccatttctacagttcacaaacactattcttagataccatagaaacattgttaagaaaacctccagagcatatactaagttgctaccactaagagataattccaaacatacttaaggtgttactttttctttttctggctggcatatgctaatggatttatatagggcaaattccaagaacaaaaataaataggcgcaaagtataatggaaccagcaaagcacctgttggtgtaacaatctgcttctctgtgaaaggcaaatgccccagtccatgctcaactacctagcaatatatttattttccacatgaataacacatcaataaacagtcagacacattcagtagctatgtagaactagagaagggtacagaggccaaaaagaatgagtgctaccagacgaatcagacgatctgaataaaagacgaaatctggagttgcaatgtcccggtcgcgaataagagtatgcattccacgtatctgttaatcgagtgtttataaccatgggttgggaataaaataacattatgaaacttaggatcgagagaaactattgattgtacctggaaagttgtattaaccacataaacatttgggtagattttgcataagtcatgctgaccaagttttgtacgaatatgttgcacaattaaatctatggcaacatggttatctccccctcgcggtatgatcacatcagcatattttttggaaggaagaacaaaatcatcgaacgcaggcttcacaaacctcccatactacaattcaataaggttcatcaaaagtgtcattacatatgtattacaaacatcagggcatgcagattttgtgacatatttaaatagaaaaagactaaaataacatagacgggtgtttaaattacctgctccagcactgagatgacatctctacctctttcaactgtatcacgccttatacgccgggcaagtctaatatcggcatctaaattgatgcataaaatacaaagggataaaggtgaatgatcacaaacgatattgttaccataatatctattatattatacctaacaaagaggagcaacaaacctgtgtcaacaaaaattttcatatccatcaaatcacgaaccctttgatcatgaaaaactaaaatgccctccaaaatgatgacatctgatgcattaacctaagaaaacaaaatagtcaaaaggtttttaagcctaattaacaatcataattcattaggtttcactaccattaaagaaatccagaaaatagaccaacaacgacactgaacagaaaaagaaataccacccataaattattgccatggcgaaactagggctgggttggttatgaaaaaatttcatgaatcataactgctacataggttgagcaaggtccacagtagcttcttagacatatgatgtactctttatattgcatatccttatatcctttccccgcccacaaaaaaggtcactttatagtatactcttttagcatgtgtagctcatttattaatggagacttcatagtacactacttaactatgtgcctatagattcaatattttggcaccaaatttctagaacagaatgtgaaataaggcacaccagatgccatcaatctacataagacctttgcatacaaagttatcaaccagtaattaatcatagataaaaggtgtaataacaatagataaacaggaattatctttttcacaccaaaggtcaacaacgacattactacctttctaaaactttcagagcatcgacggtggttcttaaaatcatatataggaatatttacagatagcccacttttaagctgtcccatgcactctaaaagttgctctgtatcaaatgcatctgcaaaaaagaaagaacgaaaatatcttagtctcttcccaacgtaaagcagattgaaacctcgagaactcaaaaggcaatcaatttttatcaaatcaagcacctgggtgatcaaagttgtaatcttgcacacggtcagattcttcctcagttaaaccacggtagaatgaatcctgcaaaattgaaactttagctgaagtatatagaataattgcagaaatgatctatcagacatagtcaacaactagtctttgctcttttgatgaagctcttattcaaatgacagcaacttgcaagtacccagatcagcattcacccaactgagcaagaaaccacagccaaccatacaagacacacaactgaatacagatgcgaatatgaaagcaatttcatgcttctagcttgccaatacgcaggcaatgatttaatcaaatgcacattttgttcaagctgctccgaaagaagttcttttcacaacgcatttccccttttgacaacttgcacaaatagcaattctgcctgcttgccttaaagaaaagaaacaagctatgaatggtacagagaagaaaaaatataatactgcacgaaaggccctacatgtttaggcattaggatgcatacaaactgcacatacaagaaagtggagtaccatactcatcctcgaccttgactgttcaaatcatgtcatttttggacctaccgcatcacaatatgttccactccgtaagttattttgtactaacaacaaaccatacactgatcactgcaacaacggattggctgattgaacaaaacgctcgaaacacgaaatctcactactaggcaagcatatgcatatagcaaccaaccaagcagacatgatatgcatcctgacgatgcaacgaggcacaccacacctggttgacgagcacgacgcggtggtcgtgcagctgctggatgatcatgtcgcagaccgtcgtcttccccgacgccgtccctcccgacacaccttcgccaaccacaaccaccaaaattcaaaacaaacaccaccaaggattacgattacgagagagagagagagcgggcggaggagtgcgtaccgatcacgaagggctgcttgctcccctcctccgcggctgcggcggcggaggggggtggcc

SEQ ID NO: 4374 - DNA, 2672 bp, Oryza sativa
agcattgtcattttgccctaaatcatcagccttacttggcgagcgctgttccacttcaacagaatctgcagaatcaagcatatataaggctataatttatctgcatcagcaacaacacacaaccatcaacctccattctctacgatctgaagctgcctttcttcgagaatcaccatacttgattaagtaaaccaaccttctagagcaaaattttatgtatgaagacaaggacttaacaaataaacagtcttccactctaaggtcttaactgctagactacgacaaacaactctgccatgctaacagtgctcaaatatcatacttcttttatgtagccatcctgaaggtttactagatatttcttcagtccatgtgttagtaagtccttacaaatttttctctgtttgactagaattggagctccattccgaaaaaagtgcccgttttctcgttatgatgagaaaaacaatggtggtgtgactacaatactcctctgtttctttcatttattcctcaaaagatgtacatggtctgggaaaccctctatacctgcatatctgttcaaaaatgttctctctccttttatttagaaacacaatgcataaacttaccaccatccaaaggctcagatgttttctctttgtccacatctcccagttctaaactagcgatatgagaaacactgccttcagcaattgctttgacaatttcggtgttactcgtgtcaccctctgggaatagtttgataccagtcttctctcgagacatgcaacttatgtcccttggtggcgatgcaatactttttggcggaggcctctctgatggcagtggaactgagagctcatacattacttcatgggaaactgaattatatgagcaatggctgcaggaaatggtagcagacagttgaacacgaaaaatggaatcaacaactgtaggagatactggaggcaccattgacttctcctccttatccaattcattgagtacaaagcaaagcaattcatggctatcttgcatatcactgcctacaaattgtgcattcaaaacacgaacacgatccaagaacttcgtcgggttcagtgggcgttgtgcattattaacactgtttacctcctgaaagagctcttttagtgcgctacccacgaacccagaaggagcatctgatgctaacatccttgcccgcagtttttcaagcacaaagaggcactgcaataacgcattcacgtagcaagtgttcccaagattcggaatccctctgataacacagccatgcctctttgctaatccagattcttgatcaaatgcctccttgccaaacaccatccccctctcagcattcggtgcacctaggatcaattcgaattcacatttgaagcagtaccccatatatggattactgtaccacaaaccaacccaatggtgttcacacttctgggcatgcagacgggcatgtccatacggttttttcatggcctcagctctagtgcagaaatgcttgttgcatcctgtgcaaaccatgatatgggtattcccagtgatcgtacacccgggatgttggcacgccggaacgttcttggaggcgaagatctctgacacgatcagagtgatttcttcctcatccaatacaaagtgttcgcatcccacttggtcgctgctgctgtcactttctgcctccatgtcactcatctccaagttcagacaacgttcacaaatgaagcagtacagagtatccggtttactgaacaacgcagcaacacaatgcttctccagatgagcgtagaattgggcgtgttcctgggcgtgtccctgcggcttgttcatggtcccgtccccaatgcaaaaaggcaagctgcagtcgatgcacaccatgatactgctcttgtccaccttgctatcgcacatgagacgctgacaactcggggtgaacttggaggccatgagccttgatacgaacattgccatgtcttcctcgaaacgttctaagtgggggcataacccttcctcggtgttgctggtcggcgccgccgccttctccttaggcttgctcacctccggcggagccgtctcgccgcattcgggatcgggcgtggccgcagccagcgggtccaggtccttgcggggggatttgagcggcctccccttgctcgccttgtcgtcgtccatcacgcctggggacgcaagaacaacaagaaagaatcgagttaatccataaaatccccatcgaatcaaacaaagccatacgaaaaaaacagcacaaaccaagcatgaaacaacaaggctaaacggaacaagcaaatcatcaaacaggttggccgccgttaggcgagggacgaccaaaatccaactccaacaacaaaccacgccacgcacgaacccgtactcaggctagggcaaaccacgagagctccacaagcggggaaaccacggaaattccggcgaggaaccacgaacgcggcggattccagcaccaagcaaaaccccaacccgaacccttaccctcactaccaccaccaccaccaccaccaccctaaccacaaccaacaacaacaaaaaacagagcgatcaaccccgcgtcggcgacgaacagggggatttggggggagaaatggaggggaaatctcaccgggaagacgcgaggagggcgccgaatcgatcgggcgcgcgagccg

SEQ ID NO: 4375 - DNA, 756 bp, Oryza sativa
gattattctgcactatctgagtcctcatttatccttgcaatttttgtgcctcagtccctttgggatccccattcaatgtagtgaaagaaaattatcgcaacttcaattgtgttgttgggaattccttttcgctcaaccagcacaggccacaactctaagcattgaatttttcttgttgtttagtacatggattacttcacacatcccatggatttggtacatttgcacataagttgtatttgttggatgttgttgcatggatcatctgcacctatcattggctcattcctgaaagtgtgtcttttagtatttcaatatcttaattttactggcatatttcttcccggagaattgatattaaatgcactgctgcttttaggtcacatctgtttcatttagcaactgtggtacctatttttcggcttctagcacatcaaacaacacactggtttgggacacaagaatagttccattaaaccaaagcagggatgtttcacgaagtaaagacatgcgttttttccggcctttgcattgcctgagccacggcaagcagatgcctactgcagaatatacaagtcaactgcccgggtaatcatcaaatttaagtgtcgaattattgcatctagtgataatttgttgtttaaaacaatgtttatggttatgacctttgcggggctccctatatttattttgagaattagtagcttaaatagcattttattgtctattttgatgaactctttatgaattttgaga

SEQ ID NO: 4376 - DNA, 7961 bp, Oryza sativa
tcctgcagcccggtaggcttttactaaagtgtgtatattttctctgaaatgcattctacttggagtaagttccctctgtggatcttggtttagatattaaattctgttttatatttatgtattgccatatcatccaccaccaaacctggtatactatgtgcattccgatttaggttccttcattaatgataaaaattatgattaactggttactaggaaaatggtttgcggtaaacatgtgaatttcatgtttatttcttctgctatatgtcaatcaatgttgaatatgcaccacgttttttccagggaaaacacaaggagaagaagcacaaaaaggaaagtaaggaaaggagaggacgagaaagaaaagaaaagaatagcgatcgtaggaaagataagcacagcaagaagcacaaaagagagaagcacaaagataagagaaagaacaaggatgatgatagatacacaaatcaaactttggaaaaagcaactctgaggaatgcagatctcgacaatggaaggcttaaagaaaaaatacaacacgaagctgtcaaagatattaaacctgcaaatgagttggttacccaaatcctagatcaagaaggtcatgcaaaccacacaagcagtagtactggcaagttgctccctagtaccaaaagctttggttctgcaggttctaaagggaagaaaagatctttgagcagtgtgattgagaaatccagacaacccacacatctcaatcatgagatgatagagaagaaatatagtgttgcttatgactgtgctagccttgggtctaaacctcgattacagaatgggaggagccttcaagttggatctgccgaaaagcactcgaatacaaatagaaagcacagtcataacagaatggaccgaccacaaagaaatactgaaggtacaagtactattaccacggttgtatcaggtgcagagagggctccaaatggcgtagttacaccaagtccaaattccttgctgagaacagaacaagtgggccaagatccagtggtttcttcccattttccttctagaaatagtgacagcatgagccccagagggctgatggagatcaggaatggaaataatagcgatttccagatcagaatggatcggcaatcagtacgcagtaaagctggagcagttaaaaggaagggaaagactaaagagctgaaaagtaatgatcacaagtatgttgaagacaaagatagggatcggcttgcaaatgaaagaaagactaaagacagaattgaagagaaagaaaaggtgggaaaagttgttgtaagtaagcaggaatgcaaagaacttgattctcttggcgcaagcaagaataagatagatggtttgcagcggcagttgggtcaacttaatgaggagttcacttctgatgatgtcaagaaaaggaaagatgccgaggctaacagttctctacttggtaagatcctcttccttatgagtgcccaaagagcatttcttttcttgttatcgataactgaatcatttgatgtttgacacataatagtatgtttgaatagtccactagatattattttaattccatttactctcacaatatgttggcagtggcagagcatagtatgcgaatgaataagttgccaaggatatctcctactgatcctcgtacaaatggtgaaatattggactattctcaagggagtggacctagttcacctgttgggacgaatacttataaggcagatagatttcaagatagcaaggaatgctacaataacggcgtcactggttctcatcatctcaaggaactgaaaacttcggtttcttcatccaaccatggaagtagccaagtctctccgaaaccgcctcatcctgatgccaagtatctgggccaagtgtactctataccagcaatggatgactggtctaagtgcattgatcaaagctggctattgtccaggggtagtgttgactggaaatcagagatattggaggctgcagaatcaccccgagtctgggctgaagcgcgactgatcgattccgcagacgtagttgccttgccttacgttgttcccctataataatgtggtactcccatcatgatgcacatggcgaaaaacttccagattttgtgatgtgatctggaactcgcctgttcggtttgcttcctgctggctgtacacatgaggtcattcaaaataattctaaattcccatcgcatcgcctaacgaagatcgaagatcagagtgttatacatcaaacaacttctcagctgggagtgttactcctgcattgctctacaatttttgggtcatgtaatttgatctttcacagaatctatagcgaggtaagaaagcgaaaccggcgccgcaaaatatcttgaaactctgcttgttcatatcctgttcttctgattaaagaacagcttagcttgagattgttctgttcacttgcaatttgcaggagtaacaaacgcttatttttgcatttctgtatcttactatcctttctacataaatactgtgattatctgaacaagattccacgatggagtgtctggacttctggagatgtttatcgatgtgatttctgattctgtgatatatgaattgattcatgtgaaactccaataaaatcggaaagcttcgaacaagcattaaaatccagcacacactctattgggccggtctctgcaagcccaaattcaaattagcctgcaaggttacgtgcctgtaattgaatctctcccatatttttttgctaaattttgtttcgttttgaattcaaagcttatctaaaactatctcttcctaaaaatcctcagaccgaagtgatcaacaacctaccaataaaatcataacaacttaacaaaacacggaaaagaaaagaaaaaaaataaattaaaaaaaaaaagcagagatgtcttcttcctccctcgccgccgccgccgccgccgccttcctcctcgccgtcgccatgtcgtgccattgccatggtgatgatcacctcacctcgcgcctcgacgatttcatggcgttgagctaatgcctaatggcttctgttgctttgcattgcagtggcgcgagggtggggcggactcggcgtcaactacggcacggtcgccgacgacctccccacggcggcgcgctccgtcgagctcctccgcgcggcgggcgcgggggcggtgaggatctacgacgcgaacgcggacatcctgcgcgcgctcgccgggacgggcgtgccggtgtccgtcacggtgccgaacgacgccatcccgtcgctcgccgcggcggcgtcgcccgccgccgtggacgagtgggtggcgcgcaacctcgcgccgcacatcccggcggcgcgggtgctgtgcctgctcgtcgggaacgaggtgctctccgaccgcgccaccgcggggaccgcgtggcccagcctcgtgccggcgatggccaacctccgccgcgcgctctccgcgcgcggtctcggccgcgtcaaggtcgggacgacgctcgccatggacgcgctcggtacctcctacccgccgtccgccggcgcgttccgcgacgacatcgccggcgccgtcgtgcggccgctgctcgagttcctgaacgccacgggctcgtactacttcgtcgacgcctacccgtacttcgcctgggcggcgaaccaccgctccatctcgctggactacgccctgttccagggcgaggcgagcacccactacgtcgacccgggcacgggcctcacatacaccaacctgttcgaccaaatgctcgacgcggtcgtcgccgccatggcgaggctcgggtacgggaacgtgaagctggcggtctcggagaccgggtggccgaccgccggcgacgcggacgagctcggcgcgaacgtccacaacgccgccacctacaaccgcaacctcgccgcgcggatggccaagaaccccggcacgccggcgcggccgggagccgagataccggtgttcctcttctccctctacaacgagaaccgcaagccggggccgggcaccgagcggcactggggtctctactacccgaacgcgacgtgggtctacgaggtggacctcgccgggcggcggccggcggcgtcgtacccgccgctggcgcccacgccgccggcgccggaccaggacgggactcccgtgtggtgcgttcttgccggcggcggcggcgaggcggcgaacgagacggcggtggcggccgccgtggagtacgcgtgccggcagcggagcgggacgtgcgccgccatcgaggccggcggcgagtgcaaccagccggacacgctcgccgcgcacgcgagctacgcgttcaatgcgtattggcagctgttcaggaaagctggtggcacctgctacttcaacggccttgcagagaagaccaccatagatccaagtaagttactgctccctccgtttcttgttataaatcgttttgaatttttttagctaaactttttttaagttagatttgtataaaaaaatatagcagcatttcaaacataaagaaaatatattatcattatatattcaatgttacatttaatgatgctaattcggtgttttaaatgttgttaaaattttctataaaattcctcaaacataaagaagtttgactatgaaaaaagtcaaagttattaattatccatttgtgttattcaaaacaagcaaactaatctatagaaattggtgattgctatattgatattgtttgctgtttaagctaatcttcaagttggtgatttgctagttagattggcattactgttttagatttgtgctcattatggttagtcgatgaagtaggttaaattcggtgtttattagtgaggagaaggttttaatgtgttaatgccttctgcaaaacgtaaggaccaattgcagtatcataaaataaaaattatggatcttgaggctaagaaacaaatatagttgagcctccggtgcccatcactcttcactgggatgttggaagctggaatgagcacagctgcatcaatctaacagaatcatataattagtggctgttgctttcaactaatatatagatagctacatgtttattatcatgtactgtatattaatgccgtgccatccactgcttcatttcataaattcttgttggaatgtggccaacttgcaacctgcaaatgtatgcttgtatttttaattttgcaaagggcatgcccaaaaactaactatgatggatttccaattgatcgaaacggccaacagtctatcaattgattttagcattttagtttagttttagtgtgatccaatttgccttgcacattattcttgaaaccctgcctattcctaatttcctgtcagtggaaagtatctgctgcaaagctctgctaattaatgatttcaacgtctttccgccttcaatgagatcaatctaattgctggcgctcatgcattagtgcattagcttgttagataaaagtgaaaaaaaaaacgcgaacgttaggaaaggacctaatatcaaataattagaagaagtgatatcgtctagaccaccatcttatgaagctagctggaaaactcctgaacttttctgtgtctacccaacaacttacaatttatatgcatgtcagcctttgcactcagaagtaaacatgcaaaaccatttgttaacctgcaatgtgatcgcgcagttcctagcttggtggaattcagagtttcagctctaaactgtgctcagaagcaaaatgtatagaaattttatcttcagtctttcactcgtatgctcttatgtcattgtcaactatggtacgactagatctgctatttccatgaacaattttttgtcctctagagaaaagggaaaaaagaccggcaagatatattttttaagataatagaatataatatcccgacaagatatttatcttccgtttacatccttactggttaatgattggttgctaatgtagtaacaagggtgtgttttgcaggccatggatcttgcaagttcattagttctttggattagttatatgcaaaagaagattgacagagcacgatgactggattaggaggaatgaaggtcattgcctatatgacctcagattaattgttctacatgcctctgaagcaagcaaagaatcacctgtgattgatcagcttcaaattgatctcagtttttaaccaagtttttttataactttttttaaccaagttaaattttgtttcctcatctttctcctcaaaaagtaaaagaaaatgttagttcaaaacccaaaatgagtagctttaattatatgtcattcacttggattcaagttctgcttgtttggtagataccaggattacccttagacattgttcggttaatccccaagagaaaaagattagtgtgactgatggaaattaatgtggaattattcctctctaaattttgctcaatcctcttattgatgggattaaacaattctcctcaatcctcttataataagaaaagaggagtaaggttgtgctagtttgtgcctgttgggagcctatccctccggcacgaaaaacgaaatagcttattatcgcataattaattaaatattagctaaaactaacttaaaaaatggattaatataattatttaagcaactttcctataatttatttttgcaaaaaacataccgtttagtagtttgaaaagtgtgctcgcagaaaacgatgtagattagttgagaacaacccaaaagaacacagcttaagtctgctttgcttagcaaagtaaccggacaataaccgtatgtaagggaaacctagttgatacgcaactttgacacaaccaaaataacataaacaaaactacaaaagcgtagcatcaaaaacaaaattgtgggtgaccgttcgttggttggaagagtaggcaaatcaatcgaacaatttttttgtactttacaaacatggccaaacaatctctgaagaaactttgtcgtgagctgttgcaacgtgacaagactcaagctgtccttgccggctccaatggctgtccccatgtttcctccccaatcacatggagagtgatctgatgcacgctttgtagggccccgatccgacggccctcgatcgttggctgtttgatatccaacggcccggatggcgagcagggttcacaaatgcgacgataaccgctcaattattgcacttgcaaatttagaaaccactcgaaccggtcaaatttaaactaaaaggttgacaaattttatccgaagttaaccctttttggtcattaatggttgcgaaagagtaatgtcataatgcacttttaaaagaatctttattaaaatcttggtaaaaaataatttaaccattgaattcaattaatggttggttgaaaatcaagattcagttataatataccacatcagttttttcaaatttttgtatgcgtatgatttccaaatacaaacaatgtgagacgcacttgatagtgaaagtgaggtggcaaacgtgtgactatagggaagcttctagctggagcaatttcttctagaatcagaagctcccttaaacagcccaatttttagtctaaattctaagaaattataatcgtagaatccataaaataaactaaaagtcataagccagaaaacccaggtttttcagattctcagaagctggttatcaaccaattacttctcagaattttaaactccccaaacaggctcataaattcttctaattatttggttgccctattttgtttttagatacgaagaatgcaaaatcacgagacaaaacacaaagcaggacacagtcacacaggctacctcaccaaatcggccggagcaaaggatcctcccttctctctctctctctctctctctctctctctctctctctctctctctcttttggctgcctgtcacgtgggccccaccgtcaccggtgaaagaatcttgacgggttagttacttggttggttggtttgttaccgcctttttgacgcccgcat

SEQ ID NO: 4377 - DNA, 4865 bp, Oryza sativa
tgtacagttgttaacgctcgtgttgaggcagtagtaggtcagcattggtgtacatggtttggtgttaatctgcggcctcgttccgtttagcttgacgtgcatcttctatggaaaatgaagctgagaaataaaatcatgtttatagttttgggtgtatttcatggaaatcattgtgaatgagtttgttggcggcaatgtcgaataaccataatgttttggaaatatcatttggatgagaaactgttggtctttctgcttactgtactatggcataagatttatcaagaacaaagaaaattcacagcatccagataatagagggaaaatatattataataattcgcacgaacagtgctcgtcgatgcttttggcgatgttgtcgccgacgtcgaagctctgcgtctcctggtaatctaggttgaagacgaaactggaggttaacatgttggcaataatcttgcaagcgaccgatatctatatgtaaagtttttaactctcaatccgttttttaatctcttcaataattaacgggaagtcctgcctaagatgaaagtagccattggtgacggccaccttcttgaagttgctctccgccatcaagaagttgaggcacttgctctttagctccgggcaatggtacgtctcggcgtagcctagcgtcgtcgccaccgtctccaccgacacgctctcccacagcttctgtgcacacatcagcttcaacctctccaatgcgtacctgtccgccgccacgagcaagctctcgaaaaaaccggtcgtcgtcgacgacgacgacgacgacgtcgatggcgacggcaaggcgtccgtgtacacgaagtgtagtagagctttgaacgtggccggatcgatgtcgtgcagggtgacgcacggcatggcggcctccgccatggacccgaggagctccgccttgaacaccggcgagcgcgcggcgagcacggcgcggtgcgcgtggaacgtctcgccgcgacggagaacgacacgtcggagcagtcggcgcggtccacgatgccgccgagctggccgccgaggttcgaccgcgggacgggtatagggccgccgtcgtcgtcgtcgccgccgccgccgccggcgtcggcgaagaccacgacaccgcagacgatcgtgaccacgccgtcgacggcgtagagcggctcgaggtcgctccgcctcacgaggtgccggaacgcgccgccgtagccgcgggggtggccggggacactcatcgggaaggccctgtccgagcagatgatcgacggcgcgccgacgccgccgtcgcggcgcatcaggaaggtgtggaagatggccctgacggtgttcgatctcgccggcacgccgatgcgcagggagacgtactcgccattgtcctcctcgcggtagccgcgcgggtagcatctgatgacccacgactgctccccgtcgccgacggcgaagctgttcgtcgtcgtcgtcgtccctgggtactcgagcttcaactcggcgaagctggatgatatcatcatcgtatttttggtgtattattaattaattgcaaaaatatgccgccaaacggacaaattaataaagtttatatatatcgaaaatctcacggacacgctctgcgtatcatgacgtgaactagagtagttcatgacgtgaaccatagtacgttgtaggaatttattttcggcaagataaatgattccttttttatgtacgcatttgagtcatattttgattggtaggagataataagtacttggtgttttatgtttatgctaaactaaacatgtctatctttaactattaatttttaagaaaatgtatggtttaacataataagatgttatgtttttagattcaccatgaaatatatttttgtaatatagatatatttacatgttgtcaaactatatgattttttttattgtttgacttcagatacaacaatgaatttgtcaattttatggattagatatgtcatataattggattcgtaatcaccatagataccacatatatacctaatattatacgataaggtatattgaaatataggaaaatagcagataagaacaacaactcttcgtacttgagggaaggggattgggagtttacacgagggaattgatggtgagattaagataggaatttgatttttcatcccagtctcttgtttggtagaggtaatggaaattgatagggagtttagttggagattagatcattaatgaaaatggatggctgagatttgtttaggcgaagtaaaggagaaatttcctcccaattacctgcccctacccaggtattgaaaatgagggagttcatttctcaattccctatccccatcccactaaaattcccatgtcccccaaccaaacaaaacagttaatagcctcatccctctaaactcccaatcccttctaaaagctccctccaactaaacgggccgctaaggaaatatatataggttgtcaaaatctgacctaaaaagggcaaggtcttatttactcaaagttttaacacgaagtgtagtagagctttgaacgtggccgggtcgatgtcgtgcatcgtgacgcatggcatacggtggtctccaccatcgagccgagggactccgccttgaacaccggtgagcgagtggcgagcacagcccggtgcacgtggaacgtctcgacggaaagcttctggtttttctttcaaggagtaagggcaaaagctctgccgaaggatttcattaagaagggaaaggcctaaggttcacatcatacagattacaaggatcaaaagatcccagacaaaaggcttctggctattttttggtagtcaagtttgtactcgatgaaaccggaggccagcatgttgccggcttgccgccggcgaaggatgaactttctcgagagagaatttttttacccacagcaatgtgaagaagatcgatggtgaggaagcgacggtagttgctgccgataccgctggcggtttaggcggcccatgaagtgcgcagacctagtcaaggcccaagttactccagtctaaagaagtctaaccgcaattcccaagccaaccaaactattcgcaaaataacttttttctttttaaatctagggcctgaacgtttgcttttggagtggttctccagtgctgggaagttatatggttcgttaatcaactaaaatctaatggtccacggagaaaggtatcttccaaaaggtagtaaaaagtgggccaaggtacttaattgatagattgggtggaaggataaataagtaattatcttaattttacagcgataagactactgagagagagtaattcaatcatgagtggcgtgatcgggaattttttttatttttaattttttttattaaaagttttacaaaaataattttccattttgaaaattgacggaagtagtcgcctaccgccctctgggagggtgatttttaaaaatcgtcatcccagagggcagcgaaaatgacgtggcagacggccgttcgctctcgggcgacggccgtcaacgaaatttgcaggcggcccccttgccgccctccgctagggcgattttgtactgtgcggggggccgcctgcaaatgggcggcgagggggcatggaattttgcaggcggcccccttgccgccctgggggaaggcgatttttgcctcccccctataaagcccagtcccccctctctgaaatttcattatattcactaaaaatccaaaaaaaacgaaaaagagagaggggagggcacagaagggaacggcgaagccctgctggttcgctcacttcatcacaggtttgctcccatacatcttttgcatttgtactaatatgttatgtttgagtatatatgttgcgttttagttttagttccatatattttagcatatctgtagcacacagcacatatgtgtagatccagagcatagaatataatagtatgaattgagacatagacagtagtgttaattgtaagatgtagtttagtttgatctggagaatgtaacctacttttagaattttggagaacaatattgtagagaatgtaacttagggcgtagtacagaaatgcgaggttaacgcagttattgttttcatcaggcacaatgtcaaataaggtcacatttcagatagttcacggtgaaggaaatattagatttggtccagatggtgttgatctgtcagattttgtaatgacatctaagggcatcgataggcctgcggagagaacatttcagtcaatttatagttggttgttgagaggatttagaatagaccaagaagtctacacaatgtcagtatcagttgtagtgagtcgtgcaacagaaggttatttttgggaactaatgccgatggacagcactgctgcttggagacggtatgtggaaatggcttttgaacggtcatggcccctcgttatatttgtgtcggtacaagagaaagatataaatgtttcaatgcaaaccgaagatgtagagggtcctatcaatgcaggggatgttgttggaccatcgatgcaaaatgaggaaaatcaaccaagggaggagcaggccatgggcatggcggatgagggggagagagtcggtataattgttgatgaaatggagagggaagattcggataatgaggaagcggacgacgacgcatcatccgatgaggaaggtgatgtaatggccactgattgggcaaatgaggacttctctggacttgttatatcagagggtgatcatgtaccctgggagtataaggagaacgaggtaattgacggtgcaaggtatgcttataaggatgagatgaaggaggcggtgaagcattgggcagtttccttgcagagagagtttagggtggtcaagtcaacaaattatgtgtat

SEQ ID NO: 4378 - DNA, 4966 bp, Oryza sativa
cattttcttctgcacagcactgctcgctacatcatccatcacctgcttcgtcttataatcagtctcccatctccatgcgaccaaccaaccaaacctcatcagatcagggaattaacaagaagaacaagaagaagatgagaagaagaaaaattcagaaaaatgggcaggcagcagcattgatcacgccactgtccggcagctttcgcctctgcatgataaattggtgcagagtttggcgcctcacagcgatgtctaaccttcagaatgtcgagcaggataacgacgcgtctctccatcgccatgcatttccagctccatccatggctaaaattaaaattaaaagaaaaaaaaaagaacccttcccaaatcaaccgtacagatcaggtacagcttcatcaagcctttcatgattcgttggagtgtaaagtcttcactcagcgatagtaattaacctgtgataagattcctagtgcctccatcttgcctagctagttactcctacttacattttgtgtggcagtagtagtttgatgctgatggatggtgaattgctgtggagtgaagtgaggccgagtttagatccaaactttttcttcaaacttctaacttttttattacattaaaacttttatacacacataaacttccaacttttctatcacatcgttccaatttcaaccaaactttcaattttaacgtgaactaaacacaccctgaattttgctagtagctccaagctacggctttcagagtttcagtgagaacaatctttgacggcatgttcggctagtgtccattaatagttatattaattaactactactccatcggttccaagatataagatgaggatattaggatatgtcacattcatctaaaatcatttatattttgggacggaggatattacttaatacgaggaattatattcaccgaattgttgctacggactatttattactacctccgttccaaaatacttatagttttgaatttttgtttgtaacattttaccattcgtcttattcaaaagattatgaaattattttttattttgtatgtaacttgctttgttatcaaaagtactttcagtataacttatcattttttatatttacactaattttttaaataagatgaatggtcaaacattgcaagtaaaaaaaagtcaaaacaacatctaattttggacggagggagtatcccaattttttttaataaccgtcaatgtttcaactcttatcattaattacccataaatgattagactacgatgaatgagatcatgtttatattcaagacaacatacagtttgattatatggtgtttttttagtatctgtaatgttttttagaacaataaattaaagatgaatagtgcctccctcgcaaaaaaaaagatgaatagtgcccaatattagttatttgaaaatggaggatttaagaaataaacctacaaataacttaacttaggataggtgacctaaacaatacaataagaaaattttcctaaaaaatcgtattttcactagtgtcgagcgaataatccatgtcaataatctgatgagtaagttgaaaaaaactagtaggatcaaacatacatggacggttaggtggcgctctccactatatgagactaagaaacagggcaaagtgactgttattttcccaggttcgaatactcccttatatattaaatacggcgtttggcgaaaataattcttatttctttacaccaccgttgttattaaggtacaagatggatacgagggtgacgcgaaacctaatcccagaggattagtaggggaaatacataagcttaattgctttttttttaaggtatctcgaggagattgggcacatgaggttggacaaagacaacaaaaaaaaaccgacccttgatgctgacacgagcgtggaacaccatttgcagaggagcttagcctctatgcttgccggtgcaaggaagccgtacatattgatccggacacgactataacttaaaagaatttcaatttttgcgagtagtaatcatcacgtttattcttgaagaaatatatattgctcgtcgtgacatgttcagatcatgattgtactctcaacgagtgtgacaatcagaattcctttttttttaaaaaaaaagactagtaaatatgtccgtgcccatagagaatgggttggttgtgaatttgtaatctattttaaaagcacatgatcgttttaagaaacattttccctttcttgtttttctcaggtatttttttctcaaattaaccaggttttcttttttttttctctggtaacttttttcttgcggcgatgtgctatgtacaggaaggtaggaggacgattttgcttttgttatgactagtaattgtatagagatatgactatacataccttatttcagggttataatcttataatttttttctaccctatcaatataaacgtcgcactgtctagtacgaatcgttaaaaaaaaatcttgcatcatcttaaagttgatttttgagagttttttttcttcatcgtgatttatttttagcattacctttgaaatgagctccctgaccacaaaaacctgtctaaaatcccgttcctcctgcatccattggcagctaatcgtaaataatgccattgcataatgagatccagccaggtatcgccgaatagcgacgcataacctaccgccgagaaagtcatttgactacgtagacactagacagtcgaaatcattttgtacggaaaaaaaaaatctaagggcctgttcactttgatgccatttttgtcaaaaaaaaatggctacatttagtttgttaccaaattttggtaactatataagaaatcctgccaaattttggtaaggtttttttggcagcaaagtgaacaggccctaatactttttttttttgttattgagatggaaccctaattgcctttcttgtggttaatctacatattttttgcatgcataactaatctcttaatgagcaaattcgacctaaagcaatgtgactgactgtatgggccccacgctgatctgcatctgtagttcagttaagcaacggaatataatatcagatctagaaaaataatgtcaaactgtagctaagttcgaatggaaaaatgatggggacaggcaatgaaatgcaggaccatcagtgataaggtgaggataactatcatcatagacaaaatgcaacagtggtaatacatggtccatccatccagctagctgctaattggccagctcatacataatcagaaagaagaagaagagggtgctttgtaatatctgcaccatatctttatacacaaattaactattttaatttgttacggttatatcaaaatataatcatctcaaatagtaggtaccaaaagaatcacatcgccctacaggcagactatgattaagaaatatcctctcttaagagcctaatgatgactgttagcttcaagagttcagagagcttcactagctttgccaatgggagttttgcacttgggtctcttccctatgtacagattgtcattcttttccttgatcagtgtggcctaagcaggttagaactccattttcatgtggcctgcttgctgctgacctgtggcgattcaatgattcgcgagtcgtcagtgaaatgttattagccaaggtatgcaaaattgagcagagaattatcagttagttttaccaccatggaagtttggtgctgaaaccccattctcctggctctgtccattctcaatatggaaaacactttggagatcatcctcccagaagttcctttgctgagagaagtacaccagctatattgttaggatgctatttctaatgattcttggttaagttacttggatgataagtagtttaggcgcgaataatcacctgcaagtttgcgccggctgttccatcttgaaaagcatactgtgcagcatttgtagcctgagatagagccaggtccaactgattcagggtgcactggctttccatgctgttttgagcaaactgttggaaaacatctccttgttcggcaaaccgaaaagcagaattggagctttctaatgagaaaaccgagctcgctgaagggccgcatgcttggaacatctgaattgtatcatggaaaatgtgagtaattaacaagtcattgagcgcatcacgaaggtatgacaagcaggagatgattcaagctcacatctttctgcagcagagtaggcaggttactgaaatcaagtggattcacagttgctagcttcatggacaggaactgaagcgaaaaaagtaaatacagcaaaattggtcagaatttcgagttccgcattccatggcatgtaacaatttcagcacgcatgtttatgactattacctcaacttgccgttgaagcgattgcacgtagtttatgatctcatcaagcatgagtgccttgccaattacctgcaattcaagacaacatttaggcgcgtcaaaactacaaaacttctacaaactttgctggcaaacacttgctccttttcttctacagattctcatcctgaaatcactagttagtcgatataccttgttgcatcctggaaccaggtcctggagaaccttcatcctctggctgatcctctctcttctgacctaaccaaatgtaacaaacacacaattcagcacaaaccgcggaagaattcgatcgaaccgggtcgaaaatcgagcgaattcgacagcatcatgaacagaattgtaccctctcagcgaggctgtggctgtcagtggcttggcctcgcctcgcccggacatggacatagtccttgggtggctccaccggcttggcattcttccccttcccttgcttctgcccgccaccgccgccgtcctcgacggagctgtcgctcccggcctgctccgccttcggcttcaccgagctctccttctcgccattgcccgtcttgcacctcttgccatctgattccttctctt

SEQ ID NO: 4379 - DNA, 8658 bp, Oryza sativa
ccccccccccccgccaccaaattgagcagctgaaacaggatgctcacatcatggttcttggaccgtgtccatgcacatctcacattacagcaaaaggcttctttcaccttgatttcctctggattctgtcatctcgctttcggttgcccatgagtccgggataaataaacgaactgaatcttgacaaaatggttgatcaagatgttgtctccactaatcttgatcgccatactaagtcttccctggttggaaatcaagcagcaggcgccgaccaacattaaagcgcaattaaggttgcctccaagagcaaggcaaaataatttcttcactcgaaaagcatcactcgcttcctttgcaagcagagtctcacatggccatgtaagtaccaagtccttgcgtttgcatcatgagcagatcgagcactaggcagtgagcgagtgagtggccagtcgttgcgagcgcactagtgcgtactaggcgtcagctttcctttttcttcttcttcagtcgccatcgccgtgatcaaaattttcagatcactcgatgtctcatcgctcttgacagtgtcagtgaagaacattgtttagaagtttttttttgtcacatcggatgtttgaccggatgtagtaaggggttttcggacatgaatgaaaaaactaatttcatatctcgcctgggaaccgcgagacgaatcttttgagcctaattaatatatcattagtatatgtgggttactttagcacttatgactaatcatagactaattaggcttaaaagattcgtcaagctattcctcctccaactctgcaattagttttttttaaaaaaatctatatttaaagttttatgtatgtatccaaagattcgatgtgatgtttttggaaaaaaaaatttaggaactaaaccaggccatagtagatgtgttcagcttctggcctttgagctggctacctgtgaagactgagtatgacgttgcggtgatatgagggtgatgctgcaagcacgattgatcgatgatggcccctgccaattattgagcgatgattaattcgtacagtgcactaagtgtcagtcagtctgaataattttcgtctgttctagtgaggctccaaaacgtgttattttggtcgattcagacgcgtcggacaggcagagtgggtgagcatgataattcactacttctagtgcttgacaagacactgaatgctgattcgtttcggtttggataagcaaccatttttgcattctttccgtgccaaaagaacaccgaaaaaagaggatagaacagttggagcagaagcaagttcagcagcaacaaacagtcttacagcaagccgggatcgagccaacgcatttgataacgagattaattgagtttgcttatcaacgaatgaacggcccgaccgaactctgaagaactcaatccagtttaggacagccaaacactctactgaaccagctgtctgagctagctaggtaggccaaaagcaaagatgaacatcactatggcctttgtttagtttggaaaatgaaaatttttaggtattacatcggatgtttgattagatgttggaaggggttttcggacacgaatgaaaaaactattttcataactcatctggaaatcgcgagacgaattttttgagcaaaattaatccgttattagtacatgtgggttactgcagtacttatggctaatcatggactaattaggctcaaaagattcgtctcacgatttttatacaaactgtgtaattagttttttattttatatatatttaatgctctatgcatgtgtctaaagattcgatgtgatgttctgtgaaaaaaattttagaaactaaagaatgcctatattagcaaagagaaaagagattttacaactactaacctaccctattgacgcagatcatagggccgggttacagcaattctagcattctggaaccagcccaactgtaatcctaatcttttagaccaccagatgtgagccagagctactcatcgcctcatgtgtcatgtcatgcgccacggcaacgcagcggggtggtcgctgtcgcgcgcggcggcggccggcggccggcggacggcgacggcggcggagaagaaggcgatggcggcggctagatcgcgagatgggcgggcggaggtaggtggagcggtttcccaaccaccagggccacctggcgcagcgtgggccccacctctcaacggctttgacctatctcgcgcgccgctgacgtggcgacgcctcattggtcacagcgatccacgtgtacacaaaccttttcgttgcatgcgaaaaatcgagaggtgtttttagctgcagcgtgcaggtgcagtattagttgaccacggcagtgtaaacactgtgcaagactatatctacgtgcactcaacgtaggagtactacgtgtgctcccgatctcgcaaaatcgctcgtgctaattactactttgatctggtcgatcaagtcaaatcgacacagtatcctggctaattgatgcagtatcctggctatggcttgatcggaagaggcaattcgtgatctcctgtacgtttcgtgtcgatctggacttgccagaagaatcagttcatctggtaattaatcaagcaattaattaattaactattaaggtcactgacgtttgatgacattggcaccgatcgaggataaacaaattgtgtggctaatcttcagggctcagggcgctgatcaggtggattataaaatcgtattgtccaatcgatggcaaggtcctgtgattggattggatcgtgtttatgcttaattttaaattggaaaagtctatacgtacgaaactttttattacgaaacatgtacgaagagcacatgcagcctgtcttttcggcttgtatgctctataatcatcttgcaagtacctaagcccgtaacaaatacaggcccacgtatggtgcaaacgaaaaagcaagagttatatctctacttgtctgtaaaaccatgtgctacgaaaatctatacacaggctgcagatgttcaaactataaacaagtaaatcgtgttcaaatcatattgaggaattactactgcatgctcatatcactatcgactaccacacaactaatatatattgtcctttgcagcatcgaagtgatcagctagcatatcaaacaagtacatcggtgcatcaatgtatgatttattattagtgtgggcatggtagatcctacctactatgcaggaagcaacccaatatttactgctcgtattgtggcggcagctgaggcggtgaggcctaggcatatagccgccacctagctcatatgcttgattgaattgaatttttttagaactgattaaatttattttatccttgctttctgcatctccactcaagcgaagctctgaagtttgaatgagtagcatgatattgaacctatcaatttgatatgggcttttcttattgaataatctagagtgttgtaggcctgtgatcttgtgtgggcttctagtgttctagccatggaaatcacgtaagcaggtagttttcgtacgaatttcgtacagatttcttcgtgtgtatagcagggtgtcggtgacatgggaccgggagtatcatgactagaggcttgaggcagacacaatcgcccacgtggcctggcaccctcggggggcgtcgggcccgagggtgatgtgttcgcccttctctttgtctccccgaggggtcggaccgctcccgtctcggccccgagggccgaggcgccccgaccccttgtgggttttgtgccgtgtatatggggtaggtgagcatagcggggctcacctaaccacatttattgtggtttggacgagcgcgtcacgccgcatgtatcgcagtgcagcacgctcgtttatccggtcagtgaccagtcatagaccgatcagatcgtgggttaggtggcgacaggcggtctgacgcacgcctcgccccatcccgtcaggatgagagcctccaagcactcgtccctagccggagccggcgtgttagctcttggagatggcacgttggtcccggtcagatatataccaggcttcatcctaaccattacaagcaagacattgtatgaagaggggcgaacatgcagattgataaactgacgcatggtggacaagaatgaccgatttgtgaccggtctgacactggtcatgtcgtcagcagacagccatgttcccacgtcgcgcctgcttccggcggaagtggaggtaggtatgggccgtcccatcagaaggtcattcggacggcaaccatacaagtctccgtctgtttatgaatagataggataagtccccacaaaaaagagagagatggtgcatgtggtatccccttgaggtataaaaggaggaccttgcccacttagaaggaaaattttttcggatcccagaacgatcgggggctggctcgcactttgtagcttcttcatacacagatccaccaaaacacaggagtagggtattacgcttctcagcggcccgaacctgtatacatcgcccgtgtcttgtgtttccactctcgcgaactttccacagaccaggagcttagaatctcacccagggcccccggccgaaccggcaaaggggggcctgcacggtctcccggtgaggagccccacactctgtcatctggcgcgccaggtagggggttctgcgtgtgttcttctaagctctcgcactctttcgtgtgcgccaagcttttcctgttcagcccaatggctgaacaagcaaaggcgcacaacctctctccgagtgttagcggtgacgacggggagccaaacccacgccgtcgagctcgtactccaccgccccctccacgccaaagtcctaggcgggaggaggcgctcgagagggtcgaaggatccgcgacttcgacatccacgggtgatggaggagggcgccgagatggggagcgtcgcctcctcgtctatggcgacggcagcacgccccagggcgcactccaagctgcgggcgcgctcctacgtcacccgcccgttgtccctgacccggagtctccagcccaacgttggctggacgacgtggccaacttggtcatgacggcacggcagcgcctaggtgctggtgggcggtcctccgccaccaagacctctggcgctgctaccaccggctccgtgtcgtcaaggcggagggcgcggcgagcggcggcggttgctcgccattcggccgccactccttcgtcagcgcctccgacccaggaagatctgcgtggggggccggatgcccgcatcagtatcgagcgccggcgtaatggccgacgtgctgcccacgcaacggagggcgcctcctcgtccggagtgtcacatcaacacggatgcggggatcagccctccgtgcccccggttggtggtgtcggctgtagagcctttgtggcgagccttcgtaacgtccgttggcccccaaggttccggcccaccatcgccgaaaaatatgacgggagcatcaaccccgctgagtttcaccaggtctacacgaccgggatcgaggccgccgggggtgacgacagggtcatggcgaatttctttcccatggccctgaagggacaggcacggggttggctaatgaacttgccacccgcgtccgtccactcttgggaggatttgtgccaacagttcactatgaactttcaaggcacatatccgcacccaggtgaagaagcggacttacatgcagtccagcgaagggatgatgagtcacttcgctcatacattcagcggttctgtcaagtccgcaacaccataccatgcatccctgcacacgcggtgatctacgcgttcagggggggtgtgcggcacaaccgcatgctcgaaaagatcgcctccaaagagccccagactaccgcggagcttcttcagctcgcggaccgagtggctcgcaaggaggaggcccagacttggaacccctccggttccggtgtggcagcttcggccgcccccgggtccgccgctcggtcagggcggcgggacaggaggaggaagaagaggtcggcccattccgacgacgagggtcatgtcctcgccgtcgaaggtgtttcgctggccacccgaaaggggaggcctgcgagcgacaaaaagaaggaagccgacgctccctgacctcggctacttggaagagcgaaggtggcgcgcggcccttcgagccgcgcgctaccagcagagcctgcggcgctaccatcagcgccacgtccgggcccgatcactctgcgtcgacgacctcgtcctacgccgtgtccaaacgcgtgctggactgagcaaactctcaccaatgtgggagggtccgtatcgagtgatcggcgtcccccggccgggctccgttcggctggccacgggcgacggcacagagctgcctaacccgtggaacatcgaacacattcgtcgcttctacccctagtgggggttgggtgtcaggtcttgggctcgggccaaccccgcacccccccgggcgtgcagggttggccgggggcttatcttttttctcttccgtatttcaataaaagcattttcgatttcctaaaggctgtgtctgtgcttttgtttccttttgaagaatcttgacttgaaataggtcactcgtgctcaatcctaccctcgggggctcgggtcggctaaaatcgccaaaaggggcccagaaccgagccgtgccccgggacgtggtgaactccgggggggaatcggcaaaaacccataatcgggtcacccataaccctcggtcaccacgctcccggcctggccagtctcgacatgtggatctccccaggcactagccttgacccgcgccgtttgaggctgggacctgggtacgagcccttgttcaagccaagacacagaaggaccgtggcacagaccatcctcgtctcatacacagaacaaatgaaattgacacaaaaatttcctctttatttgattgcagattaaatcagcctataacaagaagggggcccgaaggcctcggaagaagaaggaaaagctattaagattggcggaggcctgggggctcactccgacgcgcccgggtagccggcctcgccatcgctgtcgtccgcaccgtcgtcaccgcactcctcgttggagttgaaggcaaacgcgagccgaggggccgctcattattgtcggtcggttttcctttgctgatgcgcgcaatttgcgaccgccgggattctgcccgaagagagagagagagcagggaggagaggcccccgagccaaacggcggcccaaggcccccgacggccggagctggccctccgcctgcttgtccgacggtgccaggcgcccccgacccccaggatggcctgagggccactgcgggaaggccgcacctatcgccctctgaccccgaggctaaccctgtgccgactcgacccgggagagagcagggagaagaggcccccgagccgaacggtggcctaaggcccctgacgaccggagttggccctttgcccgcttgtccgacgacgccaggagcccccgacccccaggacggccccgaggccactgtgggaaggccgcccctgtcgtcctccgaccccgaggtcgtcggcacagaagacgagtgcaccccgcgaggccgcttggacaaagagcgccccagggatgtggcccctagtgaagaggatcggccccaccgaaaggtgcagcggcccgtctactttgttagtgaggccctccgggacgccaagacccgataccctcaggcccagaagatgctttacgctattctgatggcttcgaggaaactgcgccattatttccaggcgcatcgggtcacggtggttacgtcttatcccctcggccaaatcttgtataaccgagagggtactggacgggtggtgaaatgggcaatcgaactctctgaattcgatttgcgctttgaaccaagccacgcaatcaagagccaggccctcgccgactttgtggtggagtggaccccagctcccgagctcgtctccgctcccgaggccagctcgagcccatcgcagctgcctcacaccgccctctgggtgatgtagttcgacggcacctgtaggaaccggccccacctgtcaccaggccttagaagtggcgtcacgcccgaccgcttccctcggggagggcgatcgccctggcataacgccgggggctactgtcggtgacatgggaccgggagtatcatgactagaggcttgaggcagacacaatcgcccacgtggcctggcaccctcggggggcgtcgggcccgagggtgatgtgttcgcccttctctttgtctccccgaggggtcggaccgctcccgtctcggccccgagggccgaggcgccccgaccccttgtgggttttgtgccgtgtatatggggtaggtgagcatagcggggctcacctaaccacatttattgcggtttggacgagcgcgtcacgccgcatgtatcgcagtgcagcacgctcgtttatccggtcagtgaccagtcatagaccgatcagatcgtgggttaggtggcgacaggcggtctgacgcacgcctcgccccatcccgtcaggatgagagcctccaagcactcgtccctagccggagccggcgtgttagctcctggagatggcacgttggtcccggtcagatatataccaggcttcatcctaaccattacaagcaaga

SEQ ID NO: 4380 - DNA, 11869 bp, Oryza sativa
catggtgacgtgggcgaatctcggacgtccatttctcgatccaacggtagttccaagtttccactacatatgtggtttgtactacatattttccccaaatgagtaggcatcgcccccgttacgcgctcaaatatcggaataattaattatttgtcactcttacgaggggtgataaatgatttgccactggatccacatgtcatatacacatgagggctcacatgttatacacagcgagtggcagataattaattgccacatcttaaaagtgaaaaaaaagttaaatgtccctcaaatatcatactactagtggctatgaccaaaagtggacatacatgatccaacataaagaagtaaaataaacgagagaggtaggtggtttctccatcaaacagtttgccttgccatcataatcccctcgaagggaagatccatttgaacataagggaaggggtgcatcttccagtcgaaggtaagcaaacctctatactgtatgtatgtgtttttctatgtaactgtgtccgatgaaatgtaaacagagttcaattggatatctagactaggtgaactagacaagaatgtcaaagctaataagaaaccggaggcatctgaacatagaagggaagggggatgagtagatacatcttgttgacgatcctggtgcgtccctcagactggagctgggagcgccagtcgccgccggcgggggcgggggcgggggcgctgagatcgatgcccccagcggcggcggggtcggccccctgggtgggcctccagttgccgccgccgccatccatcctcctcttcgtcttcctcttcttcttcttcgattgcaatttgcaagccagcgaagaagcagcaaccgtggagctgatctgtagccgatttggtgagatacccatcgccagagtcaaccatgacacagcgaaattacttagctgccctaccaaccactaggtaccccgcggcggaacgacgttagtaccaacaggcaacaggtaccgatcaatcatttccatccgattaaccttaatcaatggctgagatttgatacctcccctctcaagtactaagcaagttttaatagtatagcccactattaactccaaatcatcatagccaatgtactccctccgttttataatgtaaagcattctaccattgctcacatcatttaacatatatataaatgtgggcaatactagaataactctcgttatgaaacagaggaagtaatagccgatttatacaatagctacttgctataatattaatacctagtctcacctgtcatacacacattacgtcttggatttcatgctacgcctgattacaaatctgtagcccattgttcttctctctcttcctttatctctttaaaatatgtttatagctggcttatagcctgctattgtacctgctctaaggctgcgtttggcagctggagaaagcatgctgatctactaaatagggtgttttttgcaaaaaaaaaattctatatgtaatttgctttagaaaatcttattaatccatttttgaagtttgaaataattaatactcaattaatcttgtactaatggcttacctcgttttgcatatcttctcaatcgtctcttttcccctcatctcaaactcaccctaaaactcctcttcctacgctgagttttctccagctcttccgcgcacatgcttttcaaactgctaaacggtttataaaaattttttatatgaaagttgctttaaaaatcatattaatctattttttatatttattttagctaatacttaattagtcatacactaaacgctgctccgttttacgtgcgaagcagagggttcccaacctcactccctaacacagccctagtcacctagtcagtcccatcgatatgggtcagtggtgatgcgcctatgcatctgaactggcctagatatatttccgtataggaaagtgaatcgatctacggatctcaaaaaacagaaaaatgatactcataattactcattagtatatgtatacattgcttttcgatctatctccccatctcgcagactgtccatctgccaccaccatgaacatggcgccggcctccggttttttggagctcaaactagattattcggcgaccaacgcctacgccgtcggcgacatgctcacctccgacgtcttctcggccggtgggttcacctggagtgtagactattacccgcgtggttacgagaaggagggcaacaatggtgattacttatcgctcttcctaaaacggcggggatgggacgacggacgtctccttcgtcgtcgacggcgagaggttcgccgcccaccgtgccgtgctcgccgcccggtcgccggtcttcagggcggagctgttcggcgtcatgtccgaatccacctcgtcgtgcataacgctgaaagatatcgacgctgcaacgttcagagctctactccggttcatctacaccgacgacttgccggccgcagacgccggcaaactcaatcatcagggctcctcgatgggcgcgttcttccagcatctgctcgccatggctgacaggtacgcgctcgacaggcttaagctcatgtgtggccagaggctgttgcacagcatgacgtcggattcagtcgccggaatcttggcttgcgccgagacatacgattgcccggagctgaagaacaagtgcatcgacttctttgccgtcgaggagaatttcaggagagccgtgttcaccgatggttttgcgatgctggtgcagaaattcccgctcatagctgctgagctgaagaagaggattgtgaaaccgtagctgcatatatatcttttagtcctctatcgcgttcactgcacttgtgttatgttttttttttctaagttatgtctggctttgaacttgtttttttttatcatgtttaattatattgggggtgttatatgtactagctgaatgctcttgcttttcatcagaatttgtccaactacttcatcagctgatcttggggtttgttggaagcttcatgcatttctttggttccaaatataccaccaggcgcctggaatcgaccatattatcaattgggtatttttatcattcttaagatacttagagatgctatatattctagggagacgactccgtgtcggacgtccgatattccaccaaatatcggacgcccgactgtttacgcgtcatcacaccacctacgtatgcaatatgcaaaaaaaaaaaaagaatcagtcagtcaaatgttccaattaactaacgagtgaaatatcaagttatatagggttaaaaaaaatcagcaactgaaacatttaaaaagtttatgaaacatggtgaagatacacgttaaaacatatcgctatcacatatgaaacaaccaatgttaatggattgaaatatatgtttttctttcatcaaaatataattatgcgatatcctgttgtaaagatttaattacaaagaatacaacggtgtgatcggatcgtagattggataattaatttaagagaaaaatcgttttgaaactagctaaaatgcatgcatgtggagagagaggagagacgctgaagacacatattgaaacatgtatctatcacgtatgaaacaaaaagtgttaatggattgaaacatatgattattttttatcggaatataatcatgcgacattttgttgtaaagatttaattacaacgaatacaacggtgtgatcagattatagattagatgagtaatttaagagaaaaatcgttttaaatatcgttaaaggtgcatgttatatggttggaggtagagatataggcttggatatgtgtatgtgtgtcagaggctgcctgtccgatttttgtcattgcttcgaacgttcgatgagaagcattttctattttctagtgtaaaatttgatacctctagatactataataagtttcttaaggtaccaaaaattatagtgcaaaatttaggtatctcaagtattttctaaaggactgcaaaattcatcttatcatgttcatgtgccgggcatgtatccgaatccaataagactacgacacaacaaatcgatcgacacatccaaaaatcgatcgacacgacaaatcgattttcttattatggaaataccgaaataggagtttgtactatccaataagaaaatcgatcgacacatccaaaattagagaaagagatcacaatacatatatataactcatcacatcggcattatacggtatacacattggcgttcgttcgatatctatctatccttctcagtctttctgctgaaatcacacgtacgtctcatctcagcacacgatcgatcgagcatggcgccggcctccggtttcgtggagctcagactggattactcggcgacgaacgcctctgccatcggcgatcccatcaactccgacctcttcaccgccggagggctaacctggagggtgaactgctacccgcgcggcgacaaggcagacaacaatggcgactacatctcgctctacctcgagctgatcagcaagtccaagaacatcaaggccatcttcgacgccttcatggtggatgaacacggcaacccgtccgatggatcgaacaggttagtgcaggtctacccacccgcgggctatcccgcgtggggatggccacgattcgtgaagcgaagcaatttgtcatcggtgttcgtggtggatggcaaggtcaggatcatgtgcgtcgtcgtcgtcctgcgtgacgacgacggagacggcgacggcaaccgtgtgccgctgccgtcgccgggggtcaccggcggccatctcgacggcggcttattgccgctgccgccgccgaacatcggggtccatctcggcggcctgctggacagcgaggatggtgcggatgtcaccttcgtcgtcgtcggcggcggcggcgagaggttcgccgctcaccgtgccgtgctcgccgcccggtcgccggtgttcaggacggagctctttggctgcaagtccgaatccacctcgccgtcgtcgtcgtgcattacgctgcagggaatcgagccggcgatattcagagctctgctccgattcatctacacggacgagttgcctgcagacgccggcaaactccatcagggctcctcgtcgacgaacgtgttcttcaagcacctgctcgccatggccgacaggtacgcgctggacaggctaaagatcatgtgcggacagaggttgctggacaacatgacgccggattcggtcgccgcgatcttggtttgcgccgagatgtacaactgcccggagctgaagaacaagtgcatcgatttctttgccgtcgaggagaatttcaggaaggccgtgttcaccgatggttttgcactgctcatgcagaaattcccggtcattgttgctgagctgaagaagagggttgagaaattgtagctgaaatatttatatatcttgtactagctctctagctaccacgttgactgctcttctgttatgttttttttttctaagttttgcgatctcttgatttgaactcgggtgattttcacatacacctgatgcagacggatcaaagacctgcatgtgaaaatattttttagcggtatgaaaaaaaatccttttttatagtgtatcaaagatgctcatataccaaattttatataaaaaatatgatatctcccggtaattcccaagtagtacaaaatcactcatacattagcttataaaattattagcaactaatagttgtgtgtatcgggaaactgttttaatcacctaggtggatgtccacccgtttattgcatgtcatctaaatggttatgaaaaaaaattaaaataattaataagatagatcaatatgtaatataccacttcataaacatgcaagttaaaattcaacttctataaattgtaacaattaattttgttatttttgttataactagcaaatatgcccgtgtgttgcaccgggtgaatatcaaacaaacatggatgcttaagattgctttgtacttataacacatgtgcacaaaaatattgaatttggaagcgtacatatcagaaaaatatgcaattaattaaatacaaatttattgacatatttggtatttttaagtaggtatgtgtataattaaataaatttacaagtaaagcaaatgtgagaaataaaataacatggttaaatttaattttattaaattctccatgattagttacgctctttagaattttattggaatttttagagcttaattgttaattttaataatacaaacatcatttaacaattatttaattggaaaaagaaagaaaatccttcattttaggtttgattcgaaataaacacattcaataactataattgtaaatgcttctgaatctttttcttcggcccgagggacctaaaatagacttcttttcgtcccttgccggtcggcctatggccttttgcgcatgcgcgggcgctctacccctccccaggccgcaacctaggcttgggccggaaaagtggcctcgctctcgatccctcttgggcccatttcggcccggttgacggcggccgtccgatctctagggttttgatcggacggccgagcgtcgagatcggggaaacaaaaaccccctccctctccttagccatcaaaaaccctagcccatttccttctctcccttctctcgcttcgccgccctcccctccgcgcccctgatgctcccgtgacaaagcggcggcggcggcggcgcctctctccccgagcgactgcggcggcgacgccgcctctccccccgagcccaagcggcggcagcggcgccctccccccgaacggcagcgggggcagcgccctcccccgagcccaagatgcggcggcggcgcccccccccccccccccgagcagtggcggtgccgccctccccctgtgagcggcgacggcggctcccccacaaccggcagcggcgggggctgcggcgcccagggaggcatcgacagcccgccagcgtcccagcggcggcggtggcggctcgacggcgacctcccctttgatccttttttgatatatttgtgtgtgtatattgcttcctccgattttattttatttgtgtgattgattgaattctgattgggaagtttttttgggtcggggtgatggaattccgactaagatttaggagaggcgagggggacaaaaaaatcaccgcacatatgaggtgacgaacgaaaaaataagaatatttatattagttatatatttgtagaagttgaatttgaacatgcatgtttgtagaattgtatattacatattaatttattttatcaaatattttttaaaaaatttataaccatttagttaacatgtttttactctatagtgattagaatccggtgtgtatccgcagtttcgtttcatttgttttttgactatcaatcgcactgacacgcaccaggcgtccaggcgtcgtcgtcttcacattctcgacgctttggaagaggcgttgtatggagacatcatggatcttctcctctccgcggttggaactccaaagcgttactaattactccctccgtaaaaaaaaaagaaagacaaaccttgattttcgtgtccaacgtttgaccgtctgtcttatttaaaaaagatataaaataaattaaaaagacaagtcacgcacaaagcattaatcatgctttatcatctaacaacaataaaaatatgaattattaaaaaaaattatataagacggacagtcaaagttggacatggaaacccagggtttatctttttttgggacggagggagtagaccctgtttagatgggactaaaacttttaatttcctatcacatcggatgtttggaaattaattataaatattaaacgtagactattaataaaactcatccataatcttggactaattcacgagacgaatctattgagcctaattaattcatgattagcctatgtgatgctacaataaacattatctaattatgaattaattaggcttaaaaaaattgtctcgtgaattagctttcatttatgtaattagttttataagtagtctatatttaatattataaattagtgtctaaatacagggactaaagttaagtccctggatccaaacaccacctaatactttgcatcgacctaatactttgcatcgatgcgtatgcatgcattgctgtactataaattctctctttagcagtctttatgtcataatttggctcatagttgattttatttgagcaggccaaattatctaaaataacttgtactatatgtgttaagtggtttgctggaaagacattatctaattatgaattaattaggcttaaaaaaattgtctcgtgaattagctttcatttatgtaattagttttataagtagtctatatttaatattataaattagtgtctaaatacagggactaaagttaagtccctggatccaaacaccacctagtactttgcatcgatgcgtatgcatgcattgctgtactataaattctctctttagcagtctttatgtcataatttggctcatagttgattttatttgagcaggccaaattatctaaaataacttgtactatatgtgttaagtggtttgctggaaagacaaatttatgtgtgtcaggattagttgtgatgcactgggattatatacgtaattgatggaaggccataatggctgacttagcttggagacatatgcttggatcattgaatttcacagcagacaactcggctcctgtactgatcgattgcatgccgaagctgtggatgtgcgtggttgccaggagtggaagatagatatttttggtagtttatttgttaggattttctggtaccttgtttccgtagatttctcgtctgcgccgtagcagtgcatatacccttataatcttatacatatcaggggttttagattcgaggacgaccccgaacattaccgatctgctatttttctcgttcctttacttttccgttattttctattttacttttatgcctgagttatagcaatcctaggatttggttgatctttaccgttttgcgctgaaaaacggttgtgcttctctataaaaatgaggaggttatcctttgctagtttactcggaaactagtcgttcgtcgtcacgtaagtacgatattatcttctttactaatttgctcgtaaattagctgtgtgattccatgaaattgaattaatctcgaaatcggttccgctagccgattttgatctatcgattttggcaactctgttaattataccgtaaatcgttaggtgatcttgtgttggccgtgaaaaagtgtcaaccagcagatcaaataataatactactactactcaggcggtcaggtcccatagacgccagtagcaacatggtgtcctccggtttcatcgagtacaagtttgactaccaacaaatccacaagctagccattggcgagagattgccagcaacaacaatctcgacaggggagcacaatgcgaagatcatgtgctacccgcatgggtttgggtacggcaatggtgaatacatctctctcttcttcgtgatgctgaaacagattgaccccaaaatcaaggtgatctttgaggccttcctgattggaaaagatggtacaccatcctcgttccatgcgaagaggactatgcagtgttgggcgtcccaggatggctacgactggtttgggtggcatcgctttgtgatgcgaagcgatctcgaatcactcgacggtatggtcacattcatatgtgggctcgtagttctgcgcaacgacgacgacggcgacgaccatgtcgccgtgccgccgtccaacctgggcagccagctcgccgccatggtgggcagcgccgtcggcggcgagacgttccacgcgcaccgggccgtgctcgccgcgcgctcgccggtgttcagggcggagctcctcgggtccatggcggaggccaccatgccgtgcgtcacgctgcgtgacatcgagccggcgacgttcagagctctgctacacttcgtgtacacggacgttctgcagatcgaaggctcttcgtcgacgagtacaactgatctgcttcagcgtttgctcgcggcggcggacaggttcgcgctggagaggctgaagctgatgtgcgcccagaagctgtgggagagcgtgtcagtggagacggtgatagcgactctgtgctgcgccgagatgcacagctgcccggagctgaagaacaggtgcatagatctcgtggtgacgaaagacaacttcatggaggtagcggtaaccaaggactactttcatcttgggcagagttttccgtcagttatcgaagagataaagccacggcttaagaagtgaacgttgaaacattatactccctccattccaaattgatctatatataacgtttagcccttttattacgtcgatagatatcataattattatttgaatattgcttattagtcttataagttgcaaaactgcatattaatccgtcgcacctcgtgcatttcttttaataattccgcgtttgtactgtctattcacgtctgagaattggttgtgttggtatttggttggtcatatgggcgtgacgacggcgggcaggtagaagacctccttccccacgccactccttcgatctcgaagtggttagcaccaatctgcaaccggtgggcttgcttgttgcacatgattggtggatgcatcgctctttcttttttttccgtttagatgttatggctgttttgggcaaatgaatgagccgaaatgcaatttgagatgctattttttgagatttgttcttgtctgttttttggggaaaattttcaatctgggtatgacaccgagttggccacggcttatggagacagaaacgcatacgcggtctcaccgatacggatgaaaatagcttcgatttttttttgccctttattttatcaccaatcgaccagagtccggagatgatctgtttacaaatcctaattaaaaatttatctgaatcccctgtcgtttattcctcaccagaccgaacaactcatcgctactttcggtagtataaattgtcctctctctcgtatgatcaaattaattctccttttgggatatccgcacgcaacaaaacatacgccgccggcgaccatgctgtcctccggtttcatcgagtacaaatttgactacctagaagcctcttggatgactgtcatcggcgaatgggtaccagaaagaagaatctcggccggggagcacaatgcgacgattgtgttccacttctactcgcatgcagggtgcaagtacatctctgtcttcctgctgctggatgagaatgagatcgaccccaaaatcagcattatctttgaggttttcttgatggacaaagacgggaaaccttcctcgcaccatgcaaagaggaccatggggccaaacatggagacagcatcgggtctccggttcactgggtggcgtcacttcgtcaagcagagtgatctacagccggatcatgtcagcgacaaaggcacggtcacattcgtgtgtgggttcatggttgtgcgcaacgacgtccacggcaatcctatccccgtgccgccccccaatctgggtgcccaactcggagctatggggggcagcgccgacggctcggacgcgtcgttcgccgttggcggcgagacgttccacgcgcaccgggccgtgctcgccgcgcgctcgccggtgttcagggcgcagctcctcggctccatggccgaggccaccatgccgtgcgtcacgctgcacgacatcgagccggcgacgttcaaagctctgctacacttcgtgtacacggacgttttgccaccattgttaggtacatccgacctgcttgagccgcttctcgcagcggcaaacaggtatgcactggataggct

SEQ ID NO: 4381 - DNA, 16171 bp, Oryza sativa
caagaagtctacacaatgtcagtatcagttgtagtgagtcgtgcaacagaaggttatttttgggaactaatgccgatggacagcactgctgcttggagacggtatgtggaaatggcttttgaacggtcatggcccctcgttatatttgtgtcggtacaagagaaagatataaatgtttcaatgcaaaccgaagatgtagagggtcctatcaatgcaggggatgttgttggaccatcgatgcaaaatgaggaaaatcaaccaagggaggagcaggccatgggcatggcggatgagggggagagagtcggtataattgttgatgaaatggagagggaagattcggataatgaggaagcggacgacgacgcatcatccgatgaggaaggtgatgtaatggccactgattgggcaaatgaggacttctctggacttgttatatcagagggtgatcatgtaccctgggagtataaggagaacgaggtaattgacggtgcaaggtatgcttataaggatgagatgaaggaggcggtgaagcattgggcagtttccttgcagagagagtttagggtggtcaagtcaacaaattatgtgtatgaagtgaggtgcatgaaggaagattgtccgtggcgtgtccatgcatataagggtaaatggaatgattattggaaagttagcattgtgaccgagcacaagtgctacttacaaggggtggagaagtatcaccgaaacatcacttcagcttttgtggcaagtgagatgtacagcagtgttgttggtaacattggctttgaaccaaaatcaattattaggcacatcgagaacaaattcaagtacaccataagctatgcaaaggcctggagagccaaacaaaagattattgagatgaggtatggcacatttgaagcttcttatgataatttgcctcgtttgttagccaccattgcccagaggaataataatacttactatgacctacatacatttacatcggttgatgatcgaacaaagagtgtgctgcaaagagcctttttctcattgggtgcttgcatcaatgcttttgtgcattgtcgacctgttctatgcatagatggaacttttatgacaggtaaataccgaggtcagatattgacagcaattgggtgtgatgggaacaaccaggttctacctatggcttttgcatttgtagagagtgagaacactgaaagctggtactggttcctagagagagtgcacattgcagtggtgcgtatgaggcccaacgtttgccttatacatgatcgtcatgcgggtatgttgcgggctattgactacttgcagaacggttgggatgagaagggacttccagctaagtggcctgatgttcggagtcggtggtgcatgcgtcacatgggtgcaaatttctacaagcaattcaagaacaagcatcttatggagctctttaagaggctctgtgcacagaaccaagagaagaaatttaatgagttgtgggacaagttggatgagttgacaacgaagcaaacagatgagcaatctcgcagaccacaagttgaaggtgacgagcctcccatacctcttggtgcattacatgatgacccaccaacaatgagaaggaggtcagggtcgtccatcagaaatttcactcagtggattgagaatgagcctaaggagaagtggtctctattgttcgacaccgatggatctcggtatggcataatgacaaccaatttggcagaggtgtacaactgggtaatgcgaggagttcgggtacttccattggttgctattgttgaattcatccttcacggcacgcaagcgtactttagggatcgatacaagaaaattggtccgtccatggccgataacaacatagtgtttggcaacatagtgacaaagtacatggaagaaaaaatcaaaaaggcacggagacatagagttgttgctcaaggcacacaagtgcatcggtatgaaataatgtgtgttgataggagcaggcgtggtatctatcgcaagcaagccgtgcaggaatgtgtcttgaaggcggatggtggatgtacctgcagttgtatgaagccgaagcttcatcaccttacttactcacacgttcttgctgctgccggtgattgtggcatatctcccaatgtgtacatctcaaattatttcaggaaagaagcaatctttcatacatggagtgaggagatatatgggttcgggatctcaggatcttacacaacgctgagtgcccaagttttttacattccagatccatctaagttaagggtgaaaaagggtcgacgccaaactagacgcattagaaatgatatggatgagtcagaagcaggcgggaggactttacgctgcagcaagtgtgatctgcgcggccatacttacaagaaatgcccgaagaatgcagaagttccaagcggcgcagatgctagtccatctggacaggcaagtgatggtaggcgaccacctggtgaaggaacaacaagcaggcgcgcaaggccaaggcgtcgtcgcgcagcagacgattccatggtgtaacaatgctatcgatttaggaaataaaatgctgttgtgatgtgatgagtgttcggactaaatacttctatcgtgtaatttcaattgaatgttgttgtaatgagtacctccgactattgttgtactagtagtattgcgaactattcggtgttgtatcataatgttatcgtgatgagtgttcggactaagtactcatatcgtgtaactgcagttattgttgtaatcagaaatatttcgtatggtaacacttttgtttgtttgtactcttgtttaatatgtgttagtaattcgcttatgaacatttattacttatgttgaactaattatttatatgtttctgatcaatctatttgatgcaagtatggcgtacgacacaccgacgctgttgaaccgtgggattgacaggaaccaccgctcgttcctgtcagcagtcgagggtgcacagctcggcaccttccgtccacgcacgtcgcgcgagtggttgcgtgtcgacccccgtcacgttccttggtacgcgtatgttcacatttcaactcaactttgctttgtgttgtacttatgtttgaagtttgctctatacaggttgcgtgcggcaggccttctaccactttgtaggcttgttgaggcggcggcggacgaccgtgacccagcgaagcggtgggatgcagaccggtcactccttgccgctctggtagaccgctggagacctgagacgcacacgttccaccttccctgtggggagatggctccgacactgcaggacgtgtcgtacctgctcgggctaccgctggcgggagcaccagttggtcccgtggacggtgtttttgggtggaaggaggatatcactgcgcgcttcgagcaggtgatgcgccttccacacctaggaccggccaacacccttcctccatactctacagtcgggcctagcaaggcttggttgctctagttcactgtaagtaaataagttgttattatcatacatgcttatttgcgatcaacagagtgttttgtactaacatttcattcttaattgtaggcggaccttctgcaccctgacgctgatgataactcggtccgacgctcccttgaggcgtacctgttgtggttgttcgggtgggtgatgttcactagcacccacgggcacgctgtggacttccggctggtccactacgcacggtccatcacggatgctcagccacaggacgtgccgcagtggagctggggttctgccgtgctagcagccacgtaccgtgccctctgtgaggcgtgcacgaagactgacgcgggagcgatcatcgctggctgccctatgttgcttcagctttgggcagccgagaggtttgccataggtcgaccagtggtggacagcgcaccctacggggttggtcgcagcgcgcagtggccagaggacggtcccacgatggggacttactggtgtcgacgtggggttagtgcaacttcgctgcgttataagtttatcagtcgtcttcttttttttcttcacataacatgtctaattccgatcatgtttattgcagcgtcgttacgctcacgtccaggtgagacgaggttacccggacttcgtgttcgagtttgaccgtctccagccgagcgacgtcatctgggagccgtacacagaagaggccgtcgctgcgagagcaccgctaggactttcgtcgttgtgcacacgcgaccaggcttactggctcaccatcctgctgatggtgttcgacattttcgttgagccttactgcccgcagcgtgtgatgagacagttcggacttaggcaggtgtttccgggcaacgtgcagccgaccgtcctccctgccgaccactcgtgagttcggattgttcatttctaaatttttatgataattacttcatcgagccatataatttacctctcttcacaggttgactcgacggggacagctagcaggcgcactttgggctccacgtgtacagcagtacgttgacgactgggtgttagctacagaggaggtgatcaacgagctcttcccacacacggaggagaactaccgtgactacctttgctggtacctttctcgcactcgtgcgcgtgtgaccttcactccagacgccccagagccgcacgttgccgctgtgacggacgcgtatcccacgcaccgtgaccgagactacttcgtgggggtacgtcgaatttgtattagttcttacaattatttcatttatcttgcataatataggacaactactgaattttttatttccatcttgcataggctgatgccgcacgggatatcagtgccgatatcactgcagtccaagtgaggttgaacagaggtttgcacttgactgacgttgagcagagggtgaccttcgaccggatgcaggagaagatgcgtgcggtcatgcgcgtcttctcctgtcgtagcgccgtggacgtcgtacctccagctggtccggtacaaccacggcctcgcgcgcctaccgtcggagcaggacctcgacctacggtacctgtttcgcatggtactgctcagcccagaggtttcttaagttttgtttctgtttttgtacgaaaacatcaccccgtcgtaacttgatgttccatcctcgcaggacctcgtttgccttcgagcgcccctagcttcggagcagtgcgacctacagcaccggtttcgcacggtacagttcagcccagagattagttcatttttatttcagcttttgcacgaatatgtcaccatgttttaacggcacgtttcctcatcgcaggacctcgtctgccttcgagcgcgttcgcaggcacgaccggcgcttccgcgagctccgcaggggcgttcgccacctcttcgggcgcgttcgccagctcttcctctcacggagcgtcgatccctcgcccacacggtactttactttttattaatactattaaatacctgtatgaaactgatggtccttgtccagcaggatttgcagccgagatcttcggtactggggcctcttcatctcaagccggtaggactggtcctactagccagttctacgacgacgacttgcacggtgcacaccaccacgacgtactaggctcctctcagcttggaggagctccagaggcgcacactcaggagcagccagaggtcacacctgtacaggcaggacgggttggccgtgccgtacccccggaccgactcacgtactcccaggggcacattagggcgcagggtaggagggacaggggtaagaggcctcgtcagtagtgttctacctcttcagtccttatgtgaccatttcttttggcttacaaacttgtaaagcagtactacttttgctattactactgcagtactacttgtgtttgtctcgtctacatagttcttttcattcatatggtgctagaacaacttatgctcacgacaacacactttcggcgcttcacggtagtgtcagatccagtagcgcgcacagtccacaacagcacacatgaaaagcggcagctcgagttgtcactatcaactttcggcgctgcctgttgacataaagtgaatcacgcccacgcgtgatcgtcttgtcacatctaatgaataatgtatctcattgagttcacatatattgcagtgaaaacgacgctatataattgacaatctgaaggcaacctcttcatatcttctttcccactagcacacaacacacgaaaatggaagcgccattccttgagcgtctcaactggcgaagcgatccttttgctagttggtttccaccatggtgtgaccgtcctttgtgcgattgtggggatggatgcatactcaagtcttccctcatgatacaaactcggggcaggagattcttccaatgcgcgaactttgatcaggtatgcttcatctattcgaagttcaaatggataaaaaaaactaacttcttcgtacacaattgtaacatcttacgcagacatatcgtccaatgtgcaacttcatcgagtgggtagacatggagaacccacaaaacgacggaacccgtgcttacccacgtagtgaaacaagatcggactacctaaggcggaaggatgagcatgaacgtcgaattgctgctgaggctttagaatggcacgtaaatcccctaggactccccacgtggcgtgagcgtccggagtgtcgttgtggtgactgttgttaggtgataaggtctgtaaggcaccgaactcgaggacaaaggtgtttcgtgtgtccaaacattgtcgacaatgatttcgtggtaattacaactattcttttcatcactcctcagtactatcattaacttaactatcccaaaatggatgtacataggaggatgtaaggaaatgtcaattcgtacaatggattgacacagtcagagttacttcaagtggcgggccgataacgcaacctgaaccgaccatacagttcattcatgcttggatggagtacgaacgtcgggtggaaattgcaagcttagactggaggaacaatccattagggttacctaaatggtccgagcgtccaaagtgtgggtgcagagatcgctggcaggtggctacatcctttgctgaacaaacatttcgaaggagatattttgtctgccccaatgtagacaacgatttcgttgtatgtctaaccatttacaaaatccgctatgatttgcacaaaattactacccaaactgaataacattactatttttacagggcaatccaaggatgggtggatttactcgatggatcgacaatgtcactccatcatatcatggccagaagataacagagtcagaaacacaagtagagtatcaacgattgaaggaccacgagaatgcaatgcattctgaccgacctagaaggggccgataggttaccgcatgcttgatttgtcgggatcgacaaatttgtaccgtgtatcgatggcacttcttatctatcttatcattacaatgtttaattatggtggtgattttttgtatgcgtaagactaagggcctatttggattgctaccaaaaacatgccctaccaatattttggtaatttgaatagtacttgtgtttgatttcgattgaagtctattcattggtaatacgtaatctagatttgagattatgtagaacattcttcactacaattttacattttggcagcaaaccaaatatgatcaaatgcaattttaccttaccaaatatttggtagtgccaaaacttgcttatattttggcactaacaaaatgtttgtacggtaacattccaaataggccctaaaaaataataaaattgtattttaccagtcttggagattttaatcttgtatagttttcaatataaaaagatttgataactattgatatttatacaaaaatataaagcacagtataaaatcgccctcccctagggcggcaagggggccgcctgcaaaattccaggccccccgccgcccatttgcaggcggccccccgcatagtacaaaatcgccctagcagaggtcggcaagggggccgcctgcaaatttcgttgacggccgtcgcccgagagcgaacggccgtctgccacgtcactttcgccgccctctgggatggcgatttttaaaaatcgccctcccagagggcggtaggcaaccacttctgtcaattttcaaaatgaaaaattatttttgtaaaacttttaataaaaaaaattaaaaataaaaaaaattcgcgtgatcggcagggggtctaatgcgccactaacctcacgattagtaattgtgtaattaatgataaaactgagaaactaattgataatcgtgtacatattttcctttaatctatacggtcatattgtaacaaaagagaaaaaatattctcatactgttatattcacgccgtttcatattataagttgttttgactttttttctagttaagatttgttaaacccgaacaaattcacatgaaaaaaatagtaacacttaaaatattaaattatttttaaaaaatctaatattaaatatattttgataatatatttgttttgtgttaaaaatgttattatgtttttatataaatttggttaaatttaaataaatttgattagaaaaaaatcaaaacgacttataatataaaatggaaggaatacattccaagtcacaacaaaatgggaagaaatgattgacatggaaattgaatgattgccacgaacaagtatcgcaagcactacagattaacagaagccgcagaggcagattagagacggaaacatacattggtaggaagtcacagtactatccacgtttacaatttttttattcctaaactatccttattgaatcaatggtgcgtgttcatccgagagggaggtactggaggtacctctcaagcacagtaaaagcgttttgtgcactctcttcggtgaagacctgatagtaaaattgagtaccaaaaaagagaagagcgtgccactgattcgcagttttgcaggctaataacaacttatcaacatttagaacatctaattgacgctatcaaccgaataaaagggcgaaatgtagaatactcttgccactaaatatctttcaggtctcatctctcaagtctcaagccgttcttttattggtaaattggaaccatgccattataattttgcaaagtttaagatatgtcatcggtatctcaatgatatatagaacccacatgagtcaatgacacgtgggtcaggatggcatatcttaatttttacaaaattataatggcatagctctaatttttccttcttttatctcttcgataactaagggaaaattctgtataagaagaaagtagccgtcggtgaccactaccttcttgaagttgctctccgccatgaagaagtcgaggcacttgctcttcagctccgggcagccgtgcatctcggcgcagcccagcgtcgtcgccaccgtctccactgacacgctctcccacagcttctgggcgcacatcagcttcagcccgtccagcgcgtacctgtccgccgccgcgagcaaacgctgatgatgaagcagatgatcgctcgtgctcgccgtcgtcgacgacgatgagccctcgatgatctgcagaacgtccgtgtacacgaagtgcagcagagctctgaacgtcgtcggctcgatgtcatgcagcgtgacgcacggcatggtggcctccgccgtggagccgaggagctccaccctgaacaccggcgagcgcgcggcgagcacggcccggtgcgcgtggaacgtctcaccgccgacggagaaggacacgtccgagccgtcggcgctgcccaccatggcgccgagctggccgcccaggttagagggcggcacggctatggcaccaccgtcgccgagaattacgagcccacatatgaatgtagccatgccgtcgatcacataaatcgactcgagatcgctccgtgtgatgaagcgatgccatccaatggagcgatgccatccgatgaaacgatgccatccaaggaagcggaagccggaggatgttcccctaattacatctatagagctattctttgcacagagtgaagatggtttaccatctttgttcatcaagaagacctcaaagataacattgatcttggggtcgatctcagtaagcagcaggaagacagcgatgtactcaccattacggccctcacatccacgcgggaataacaaaatcgtcgcattgtgctccccggccgagattcttattccgggcaagcactcgccgatggcaagcttctgggtttcgaggtaatcaagtttgtactcgatgaaactagaggccagcatgcttgctgccgtgtactccatatttgttgtatgggggcactggtggagaaaccctttgtagtcccggttcgtaacccccctttagtcccggtttccaaaccgggagtaccaatccgggactaaagatcgagctgacctttttttttttcatggccctgttgctgcatggtttatatatatatatatatatatatatatatatatataaaccatgcatatatatgtttcaatacatatatatgcatacatatatatatgtatatatatattatattatattatatgtatatacatgcataatatatatgtatttatacatatatatgttatgcgaatgcatatgtatatagatatatatatgaccaaaatatatttacattatagaaaatgtgtacacatgcatatagaaacatatgtagtcatgtattaattacaatccattatatgtcctagctagctacgattttgacgtagtagtactcgctgctagctcagaagctaaggaccggtgaattgtgtttccgtcgtagtagaattcacccttgggatcaaggatttcttcgttgatgaatcccatgagttgttcttgaaccgccgcgataaattccttgtgtgtggtcaggttatccctcatgcgaataaactatatgaatgtatgaaattgattagtaattaaacaagaaatcactacgtaatgaaattttgaatttatttgtacgtacatcgagctctcttgtggtgatgatttggtctgcaaggcagtggcaatactcgcacacgtaatagccgcacaagttagttccctgcttttgctttgcgcactacaaataaatgacaaacaacgagagatctaattaatatacacttgtatgtatttgaatcggagaaatataaatgtagagcatgtgtactcacagaaaatttgaacttccgcctaagtctttctctccatttgccgcggaccaaatgacggaaccgataccaagccctacatggagtttaaagctatgattcgtagtagcaattaacataacaagattttcttaattaacaaaggaacttatgacggtacctgtctataagttcgaaaaccttgtcaaacgtagactcttttttatccattgagtcatatacgttgacggtgcaggcctccaggtcgatgagtaaaagcacccagtggaatctgcaatgtgcgtgggatgcattacatatgaaacacttagcaagttcgtacgggaatgaaatttggtatgtaggaagacagtaaaattaaactaactctatgttgtatggcaacagtatgaacgtcttgtaatgctgcgccttcaggagatggacgagattgtcctctgtttcttgtggatattggtcgagcattgcgacgtttacttttcgagggtcgatgaatccagtatcgaaaaccctccgccgtcgggccctttgaatctccattctacaatgataaaagggagtatattattttctatagtctacttatatacaaggacctaattaattaaaggaggtgtatagtaagaaatctaactgaacgatatacttacaaaatccagcaactcataatagagacgtcgagggcgtccagctggtatagttcgtagattcccctgaaattgttccagagaatgtcatctccttgcaagaagtccgtgtccctgatcctcgctccgatcatctctctaccggtggcgctcatctccatgtacagctgatggaacttgtacatttatgtgggtagggactgcagcagctcaggcttgacaagcggtttaccgagttcgtacatgtatttcacttccgccttttcgattggtgcgactcctagcaattgatccgtagttagaccggtgtcagtaataaattgttctatcatcatttctttaccggtcaccaacggctcgatctcctggtttggttgctctccaagctgagggactggtttggactttccagaagatgctttcttcagcgttcgctcatagtccgatagcttgatggcctccttgacagatgcagacatacccctgaagaagttcctgacactgggggtctataggaatcttcttttctggacttcgaggcttgaattgtctcttgacttctgatgcaacgtaagcgtcaagctcctcttgcgtgcaatcgtaccccgggtccttgttcttggcggcgtcaactttcgccttcttcgttgcccttgtgtgggcaggcggtggagctgggggggcccttgactttgaaggtgccggaagaggagcttgcgggggagtaggtgtaggagcacgaggaggagtcggtgcaggatcctgaggaggagtagatgctggagcctgaggtggagacggtgctggcggagcatgaggaggagacggtgcaggatcctgaggaggagatggcggagccggaggagatggtgcacgagacgccgcttgtcgcccagggaggatgatgtaccgcctgcgccatagaataatggcatggcatgtgtctcgtagatgcgtctcaccgtctcctccagggtaatccagctcgaggtcctcgtacgcgccttcgaccaactcaacttcgaccttcgagtatcctgctggaatcggcctgcagtggtaagtacctgaagggtccgttgggatggccatgcccgacgccaccttcatgttgtgagagattatttattagtaatcaacatatataagcagcaactagcggaatggctaaatcttacctttattgataagttcttgaaaggaatatgcagctcacatggtgtccgctgagtgatgtcatcaacgggacaggtcgattcgtcttgtgtttgcatggcgtccatgctctgtgatcctacctgccccgttgaggcgcagctgctatggtttcctgacgggctcaccattgcaggaggaatggtcggctggggatcatgggaccgatgtgcggccatgcgttcatcaaccttccttgccacctcctcttgcatgttgagttcgtagctcgatacccggaactctaggtctgcaatcttcgcctcggtatctctcttgctccacatccgactcctgtacgtgtggatgtcctccttgaaaccaatcttccaaggaatcacccctttccctcgtgttcatcctggatgctctggagtctgcagggcgagtgtcagctcgtccctatctctgtctggtcggaacgtgccctgagaggaggcttccactgcatctgttagtcgtcgcgcagcctctcgtatctgatcgccgaagaccagtgagccatcagctgggttgagcgttccaccgtgagcatagtaccagaacttcgatcgttccggccaattggctgttgccggttcgatacccctctcaatcaagctagcctccatctactcccacttcggcatcgcgacgctatagcctcctgaccccaagtggtgatggtacttcttcttggcggcattttctttgtttctttccatcatcgcctgcccttgttcacctgtcttatatgcaacgaactcgtcccagtgatcccttagctttgggaatgtgtcgaagttcggtgtctgccccttcagtatatacttctggtacagatctcccttgaagctctgaaactgttctgccattttcttcagagtccaccttttcactttgtcctctgtacccgcaggaagggtgaatgtctcgagcattgtggtccacagcatctctttctccgaatctgggacaaagctctcatgatctccgcgtgcccttgttcttcgccagtacaccgtactgacaggcacgttatccagcacaacctaaccgttgtgacgtacatagttcttggcggcttcggccggggcactaggacgtccatcttcttccacttccgttatgatgtgccgaccctcaagcttcttcgctgcacctcgttgcccgcgtgccctcttttgtccaacggagggttgactaccactagcctcctcctcctggttcccctccacatccttttccacgtgcccctgctggttcccctccgcatccctctccacgttcccttcctcgttcaagtactggtttggatcctcgttcccctcttcttcattccagtactggctgcttccctccgcgattgtatcgtacaatatctgttcctcatcgcggtcagccatctgttgatacaagaaacatctgctaagtcacgagacatttatgttttaacaatctaagtcatatatgctaagtgtaaatgtcgtacattagaaccctacacaaccttacgtgctaagtctaattacaaatcgtgatataagctaagtctaggtgacgtatattatacaaccctagctagtaaataattatatactaagtctaattacaaataaaataatcttatattaaaactcaaataatattacatgctaagactaaaatagtcatatatatgctaagtgtttcgtgcgtatatgctaagtctaattaagactacaatagtcaattgctacttgtcgcaccaattccgtagtcaataattacatactaagtctaattacaaataaagtaatattatattaaaactcaaataatattacatgctaagactaaaatagtcatgtatgctaagtgtttcgtgcgtatatgctaagtctaattaagactacaatagtcaattgctaggagtcgcaccaattccgtagtcaataatgtcatactaagtctaatttgcaataaaataatcttatattaaaactcaaataatattagaacactacacaatcttatatgataagtctaattacaggtctaataatcttaattaattgcattacaaatataacaatcatttatattattacgtcacttgcctgctccaattccttctagggctagctcttccactcaggcttgacggacgactccgacaatacgtcttttctgcaagatacaaaaagatgtattaggataaatgcgaagtaacatatatatatatatatatatatatatatatatatatatatatatatatatatatatatatatatatatatatatatatatatgtatatatatatatatatattgcatttcacgttaacgttcgtcctcgttcgttcgctcgttctcattcatgttcgttcgcttgttctcattcacgttcgttccctcgttctcgcttgtcttcgttcgatcgttctcgttctcgctctcgttcgttcgatcgttctcgttctcgttcacgttctcgcggcaacgtacgttgacgtgttcgttctcgctctcgttcgttcgatcgttctcgttctcgttcacgttgtcgcggcaacgtacgttgacgtgttcgttctcgctctcgtttgttcgatcgttctcgttcgttaacggcggtgtggcggcatcggggcggcggttggcgcggcggcgtggcggcggcggcggcggcgtggcgacggcggtggtggcgtggcgttgcggggccgtggcggcggcggcgtggcgtggcgtggcggcggcggcgtggcgttggcatgcggcggcggcgttgcgcagcggcgaaggcggcggcgtggcgcgtcgtcgtcgtggcgtggcgtctcgtggcgggcggcgcgacggagagagatcgagatcggagagatcgagatgcatgaagggagatctggcggcggcggctctcaccccagagatgcggcggcagcggaggaggtggaggcggcggcgaggacgacgagctcgagacgacggcgagatacggcggcatcggcgcggggatttgccctaggcagtggcggcgaaggagagaggccgagagagatcgatcggccgaaaacgtctaagtgttggtgaagaagacgagggcgcaccgggaatatatatacccccggatct

SEQ ID NO: 4382 - DNA, 11032 bp, Oryza sativa
cgagctcggtaccccgcgctggaggagcgggcgcggcggcacggcgcggagtacaagataccggacggcgacctccgggagcagatcaaggcggcggcggcgaaggcggtgcgcggcgcctacgccgggttcctcagggcgaacgacagcgcggtggcttccggcggcggccggcgggagttcctgccggtggacgccattgaggggatggtgcggcgggtgttcgacgaaatgggcgacggcggcggcgtcgccggcagcgctggccggacgaggagccgacggcagagtggcaatcttgaggggtttgagggctaattgaacccacagtggcgcatttggcgccaatatatcttttaaattttgatggcgttttcatttaagtgtggattagaatacgttcgtcaatttgttctctttgtggattatggttaagaataagaatgcattttattcacaaatatgatcaaccaggtaaatcccaagatttaaacgtgataattaaatttcatgatatcagtttgccaaggcagcatactgagtttctaaccattgataattaaattatgagtgaaatgcactttatgccatattttgttgttaaatttttattttagatcaccctttattcaacctttttactttgaactactccctttatttttattttaggttataagatgttttgactttcgtcaaagtcaaactgttttatccccgcaaaaaaaagtcaaactattttaaatttggccagtttatagacaaatatagtaatatttatattataaaattatttttattaaattgataattaaatatatttttataataaatttatcttgaattaaaaatattactattttttctataagcctaattaaacttgaaacagtttgactttaaccaaagtcaaaacatcttatattgaaatggaatacttttgctatacaatggatcacctcaaatcatatcacaacaacctcgaacacatcaataacaactgccggcgaacttcaccatttatacacatgccgtacctttgccaaaaagacattacgtatggcaagtgaagaattaagaatcttaggatggcccattgtgcaacaaaaatgaaaagattagacataagatgataactttggcaataaaatatggcccaaagtacagttcgttcttgaattatataccttttcttcatagcggatgaacagcttctgcctataaatctagcaaatatatgcatcacaatatcacatgattggacacatcaaattggcgcacagctgcgattcaagccactaagcaagcgattacattaccaagcagtcgataatttatcgcatacaagccactaaatcttcttttgcaaacagctacccaactattacagtaccattattgattctataaataagcaaacccctaacatagatacactgatgcacaccactaaactgtatctagcacctaggctaccacctaatgagagtcacttatgtacaatctgaaggagacaagagttttgttagcccttctggaagcactggaggttgttcatcttgagggctccaggcatacacctccagtgaagaaatatgctaatttttcaagaatctgactcggtgtctcctgaaagtatcaaagcataaatagagtcacttgaatgttgcacttgaaggttgaagaaaaccaaagagaggatgcagttagaagtaaaaagtagaagaggatgatcaccttcaccacaaagttgctcaactcggctcacaatatgcttgccataggtgtacttccttaatgcttgcagatggcccttcacacggctgagcaggagctctctctgttgctcgttgcatgtttcaagtatcttctgaactacatagtttgcatactggtccttcatcatcgcctaaatgtgtaaaaggttgttagcaaatcaattcgtacgaaaaccgcaggaaagaatattgtggaatctaagagatgctatattagatatagtgaatagtatatcggtttttatctaattttttcgtggatgctaaaaacacgggatgctactgcatactggttatcccgctaattcaggctttgctccctgtgcctgagagagggagggagagaactgaatgaaaatatttgatttacagtatcaacttctcaaacataccagcaagttatcattgccctcagtctgcttcacaatctcccggatcagaagatctcgctctgtcatatccccatgttgaaagcacttctctatcacatttgatgcgaatttgttttgactcatggtaacaacctgcccagccaatttactgataatttgggtcctttcatgtccccttcctctttccaaaacatgctacaaaagagaaaggaaaaacaacgagctgacaagtaagaatacaagatgacataaaattgagttcagtcacttcattatagcatcattcactaaaaatatgcatgtagatttcagtgctaactgccaacaaatgagccaacacacttcataacatgcaatgcattctacgtctgttacacacagtctgatcatttactagtcaagaaactgtttgaaattatcatatttcagcaaggcaggattgactgattgacagggtattattccgcagttgtgatgggtactgccaaggaaataggaatttgggcagcaagtattgcatcagcttgtagacaaatttacctgtgtaacatagttgccatactgatcttgtgcgaggacgcaagccgactccagtatctcatctattatgcactggccttgtgaatcaccaccgcagtgctccaaaactctctaccaagtaggataaagattaatgagaaagctggccaccaagctctagcacagaacacatctcaaatattattctgaaattacctgaataacacggcaaccatatgggtgcattgaaaggctggccacctgcccccgaaaagcagatactacaaagccaatatgttctgtaggaacacattcaatgcacttctgtataacatggttcccattttgatcacggacacatcgcataatgtttccatcaagctcacgaactagttctattttttggtcaagttccataacttcaagagcctacatgttttaaaatacaagttaggtaaatatagtactggtaacagatcatagatggtactaagctgcatctcgtattctcgtcgcagtgttgcatgtatgtgcatccatgtcatgccaatgaacattcgccaggtccacacaatacttgcaggaggacataaaatagctatttctaggcatacaaaagtagtttattttgaattccccaggcaaaatttccccaaaatactgtaatgattgcatacacagatatagaacatggatacccttatgtatctcgtgtacaaccgagtacttctaatctcgtgtaccacttgtttctcgtgtacaactgagtacttctactctcttaaagacatttcttaatttctaaaatattttagttctcttcaaagttctcaagttcaaaaggctgaggacctatggaacattcagtagagctagatggttaatgtaaggttgatagtaacctttaatactctgcatataatcgatgttaaaaaaaatctaaataagctacatcagaacttcaaatcaataggcaatagccaataagtaatacacctttcaagatcagaagtatagctagcaaaggcacacagtcatagacaacctgaaaccatctatcgctaacccatgtattctatggtattgtccaaccagttatttaagtttaaagttttccacagataaacccaaaaatctgctataaaaaaaagaaccgcatacccacagtccaatatttttatagttgccatcaaagtattcaaaagcattcttgattttaggaaagataaaataagaaaaaggtaaagattaccttttgaattactcggcatccatacatttgaaggctcaaaggtaaaacatgaccaacaagcttagtggcaagatccctcctttgttcaggagttccatgttcgaagaactgcagatattatatgtcatttcttcagatatgataaaactcagagttgttattggtcacaaagcatagttatgtaagatgaagtgactagaccacaacatgcaacacatgatttttaccacagacaataggcattgacatattaactcttacagcagcataccttttggatcacataattcccaaacacatcagtcattaatgatgaagcatgagggagaacttctgaaaacacagatgccttctcttcagcagtgcagttctctaacttctgttggatgaatcggctgccatgttggtcagcgctgaggtaaaaaatacatcaggaattaatgaccaaaagttgtatatgagtagacatgtctaagacagaacaactaaaaggaacacctcgagactaacctgtattctactatatggcctgcaatatcagatagttcaaccctgcgagccctgttagacttgagttcttccaggaaggaacatgcctttgggtcatcgaatttctccctttctcgctgcccttgaacaccagaataagcggtcatatttcttgagggagtttggaatctcacagaatcatttctcctaccaggagaaaatactccagtgaaagtctgtccctgaaacactgggcttgttgggtaagtcattggtgctccaacatatggtgtcatgccttgataatttggagcggcccctcctcttctggctgcaggagagttataaattccagttcttggaagttgaagcctctgatcagatggatacgcaggctgggataataccttttggggatcaaaactatcagcaggattcccaacaacactaacccttggtcccattgtattgtattgatttataccagcatatgaaagtaaagaaggatgctgaaagaactgaaagaagtttgggtcaggaacggatggctgcatggtaaccccaagttgttgtccatacattttatatggctgaacaaattctgctcctgcactaagattccctggtgaaggaaaaccagatggtctaccactaaagcttggagtaatagggctgtcaacaggtgtagcaacagaaacctggggagcatagctagtcataacaggtggtaaagctgaaccactcaaagcatatccagcagttccaaatggtgttggcaatacactagccggatgcaaattttgatagtaagggcttccaaaagaatttggtgcataaaaaggtgttgtcataccaggcggtggtaaaaattgctgcatgtcaccagttggtaattttaattgagtatgcgacaagttctcaacaaaaggaacatggggaagatgtgttccttgaggaatcatttgaataggatcaccctggactaaaggtgaggggccaaactgctgcaagacattgtccggccactgctgcttaacatgtatggtatcatggctatccaaacttatcctcagattcttcatattggagttcacagtatctagttcagtcagaatagaaccgctgccaggcacatcattcccatgcttgatgtctatgctaggcttctcttgctgagaagtttgcatactggggttgttatcaggacttgatgaactgggaacagatgtagatgaaatactgttgctatgtgtacttctcactgtgttagtcacaggaacaggtgtccatgaattcaacccagatgtcttgacagcatcaattgaaaaattcgttgatgagttaatgtcagaatggtcagatataccatcaccagtattgctatttgatggatgagtagaactgtcatacaaagaagcggctttctgctgaaaactctcctaaaaagatataaaacagatgatgagaatatcaactataatatgcatgaaaataaatcaaagcaatacttcaaacttcatttgcaagtgaagacaggaaagaaatcaataattcattatcaaaagaaacaaccaaatacgatttggtcaaatcccaagctcaacaatttatcatgccattgtacactagtgactttggtagggtgcatatgagaatgactatggattttaataaaatacctccttttatttattttacagtttcatagattaactaattaaacattatgaccttagagatataacagaaaagtagagttgtccatgacatgaaatattcaaccaccaacgatgttctaatacagattagcacaattggtagcatcctgtaacacataacagagttattatactatagatggtaaataactaaagacactacagaactccactccgcaaagaaggaatgccaaattgaactttgatcagttataaggaatcttgacaagctcttgaactatagcaaaatagcaaaggaaattccaaggtttaagtagggctggttaggctagtgactttcagaaaagcaaaatagctgatgaaaatgtcataattatttgctgcctgctgcaaaatttgctgtgagttaacaacttaacactaactggtttggacactccaaacccatgcaacatgtggcagatataaaacactgtatggcagcttagaaatagaacactgcaaacatcttcaacactttttgtatggtatgtacaataatagcagagaaattcatgatcatttttgaactagaagattgaggcaattaactgtagatttacgataattatatagatgtaagtgatttggcaatttggatattgtactttactactgatagtttgactgtcacatcgcctttctcttgttctcaaatactagctaaatacccctgtgttgcaataggatttacaataaagcccaaaaggcaaaataaaagtattcccactctaatcatcatatcatacttggtacaattttgtacatgtatgtgagctacacagttgctcgtagcgaggaacaattgatataaattatccatattgtatttgattcatatagtgaacattggccactaccaatattcaaagtagtatatagatatgcactaagattagagtgatcagttccccataaaatgggaaaccttaatattttctcaccaaaatagtgtcatatcatcctcgaactcaagttgaaagactgggtgacattggtagtggttcattagcaattttggaagatactttgtgaaatcaaaacataggacgataaaatacataaatatttttatgtgagacatcaggggagcaggagaggtttggatcatgaggagcactcaccgatgcaaaatctccaagattcatacaagtataatggctatcaaagttggatccacttttaccagaaccttgggcatcctctgctgaacttgaatccaaccttggtgacctatcgtcctcaggctcttctctgtgtgttgacagagtagatcgaggaataaacaaggaacctttgttgctgtcatcttgagaaaccactctccattctttaactttgccaacccggttcatgaagcgtctgctctccctagacataagtggtggcggaagccttgggttcaaattgaccttggagccataatagtcacagtatgccggatcagcacgtagctgctcctcagatttggaactgtccgctacgtttcccagcttcccccctaaagtggcttccaagttcccactctgctgacctatcatatgaccaagagcagcaagagacccttccatgctaggcggcgcacttccactgcgatttgggacagactccctccagcccccataaacgccactgttattgtccacaaaccccagaccttctcctgaaagactacccagtgatgagtcaaatgcaccgaagtccttgctccagttaccagaccccgttcctccaattaaccggacagcgctctctgtagccatcacactgcaaagagaaactgaatattcagtgttcatccatcgaatacatttgcaatttccattccccactttgctactttccaagtctggctattcagaatttactaggttcgataatgcattaggtaacaatattagattggtgcaagcaaacaagttcccaattatacttcttgaatagggtaaagaaacaactgtggataaataaaaacattaagctacacaacctcaggacctcccaaaaggatacaaatgaggcagtaaggaaaacttgtgatttggtggaactggctaatcgtaaaaatgaagatttttagtagcacaataaaaggttatacataatactaataggctacatgttgcagtccaccagccacaggcgaacgtaacgtgtggaatgagggggttaagctgaacccctagccaacccaaaaaaaaaaaagaaaggaagaaaaaaaaaaggaaacttgcaccgaagtcgttgctcctcagaaaggggattgggacgaaaccggatggggtaaacggagcagtaataaaaatcaatccaagaaggaatttttatccattatatctccaatctacaccgcgccggctcacgaggtggcgcggaggagaagggctagggcttggagagaggaacaaataccttcagcccgattccacccggccgcctcctggctatctcctccgaacctgctcgccggccgacgaggccacaccccaccccaccccaggaggagcagcagcctagagccagaccgtggatgttcgccgccgccggagggggagctcggagcagcagggtgaggcccgtggtctccggcggaggaggaggaggagagagagagagagagaaagagagagagagagagagagagaggcaagggtttggagaagcaaaagcgaaagaggaggaaaagagaagaggagaagagcagaggcgaggggtggcggcgccgctcgagtcgagtcgacttgagacttgagacttgagaggtgagctgcggtggtgtggtggcgtgcagtgcgagtgctacgctctctgctaggctaatcttctggggttttactggagtaatagctcggaagtatattctctctttttttttagtttatttaaattgaaatgagtaaataaattatatctaataaagttgtacttatctatcgtaatccctccgacgtaaggtagaggagctgcgtccgaggggagaggggtggtggcgtcgcttgagtcaagtcgagttgagcgaagccctcgctacagctggtgctggtgtcgtgtactggggtttcacaccttttatttgtagttcataagtacattcttattttttttctttatttacatcaaaatatgtaaataaataggtataattaagttgtacttatctgttttttcaagaatatcaaatgataaaactttaactatatttataaacagttggttctaataatttcgtttggctaactggttttcttttttaatttatgttacaaataataatatcattatgggctgcaatatataacaattgggggaatcatgaaggttggataacatgctttatctaactataattatattggtcaggtcaattttaaaaaacagttgctttttaaccaaggtaaaactgagagccaccgcctaacgatatggacggttgccccaatctcatcggcgaatagtaataattttttggtgttattgtaggaattggaaattgatttttttcaaacaaataaagttatactcgatatagagatatttgttcgtgttcttaaaaaaaataggtagttgttctcattttctttgtgtagtttccgtggttctgttagtaaatcgtctctcctaagcgatgatgttatttaaactgtgttgaccttgtcttgtgttgctgtagttagacgtatacgttttggaagatacgtgaagggaaggtactctactccttttgcatggaaactgcttgactcgttctcaaactgtactgtagacaatcttacgatgtttccacttaaatgttatgaaatgcattcggcagtttcttcattaccacatgttgtcatatttgagtacgtaaatactcgctccgtttcaaaatatttaacgccgttgactttttagcacatgtttgaccgttcgtcttattaaaaaaattaagtaattattaattcttttcctatcattttgattcattgttaaatatatttttatgtaggcatataattttacatatttcacaaaagtttttgaataagacgaacggttaaacatgtgctaaaaagtcaatggtgtcaaatattttgaaacggagggagtaattcacgccttccaatcaatttaagttatatacgaggagtactgaagcaagtctaattataaaacggtgcaaattaatcaacaaagccaacgaagccaccggttatgctgaataaatcaatacatcatccatatagcaccgtgtattgtgatggcactactaatgacattatttgagatagttaaaattgatgagtactttttccgtttcacaatataagagtttctagcattgctcatattcatctagatgttaatgaatctagatatatgtatgtgtttagattcattaacatctaaatatatataggtaatgttagaaagtcttgcattatgaaacagagagaataatcagcttttttttatgatacaatagctatttaagggtatagcaaatgaattaattagttaaaaaagttattctaagatttttttttttaaaaaaacacaccgttcaaaatatcggaaaacatgcaaaccaacatcccaaatctgaaatcagaaaaagaaataaaaagagcctaggtacatgtgatttatgatgtagcatactttgtccatctaaaaaaactcaatttaaacgagaatgtgatatctcccacgtctagatttttataataggaggaatcaacagcctcttcttggttgagtttattttttatttttaggggggagtaggtcttttggcaagaggtgaaggaaacaattagtagtgcagtagcttgctggattaaatcaactaattgatactgctacagtttctgccagatagctcatgagtaatttacattttat

SEQ ID NO: 4383 - DNA, 4039 bp, Oryza sativa
ctataaataatccgtgttgatatctgaactataaatgaaaaggaagaaaacatggagaagcagccttgacttctttaaaatggcccacacaagatagtgcaaagttttatactgatataataggaaaatttttataagattacaactctaaaagatagtaaccggaaaaagaaacaaaaaatcaaacacgccaccaccacgagttgatagctcctagctcacacaacctaggcctacaaggaggtcacaaacgtccgggcaaacaccgaaactacacaacaccaacccaaccgtcgctaagcgtgattgattgccgctagatctaaaaggatatcgcaaacgccccgccaaaacaccgaaaccgctcagaaatcgttggcgaactttcgattatccttttgcataggggttgagaagaggaagctggcaagagagaagattatcaagtcgttcctcgcgcataggtacaaaatagtttgattctctcgattattgtactttttatatattatccttatgtactgaactcctcaattattgcagcaagttgagttttgtatgactcctattatctatctattactcctattatactggagtggagtatagtttagtgctatagactgatttggatcactgcaggtttgggcgctcctttttgtgtagtttaattaatcgatggtgcagatcacgcctgccttagtttaggctttttgctagctcctgtcgtcgttaatcattcatctgtcaattacaaatcacctggatttggaggagtctggaagcccctctctaaaaaaaatataattccctctgagttttgtccctcctttccaaacaccatcttggttgtcttgccggccctgactcgatagtatagtacgttgtgtgtgttgtgaaaaatgtgaagtgcatgatgcatgattacgtgcatatgtttttctggataattcggatccggccgagtcgatcgtttaccgtgctgatccatgtcccacttgtattatgaaaacttttacctttttgtgaggatatgaaactatttgtttatttgcggaacacattaagaaaatttgactctcattacacgcgtaaacactcacccctacgaatgaacaccttataagtatattacatatcttaaaattaacgaagtcattacgaacaacacgtcgacggatatatcacctaccacagaagaaatataaagttataaataccagcatcttttgagagactggactgacatattttaagatttaatgtgtttgtactgtatttatatatgtgagaatttagtgaaaaaatatggagcggtagtccctttggtttaagtatagggtgtgtgtgagtattcacaccacataggacgaaaaccaaaacaacacgtggcgtggatgctctggtttggttttaacagttgaggatgcccaataagcggttttgtagtattgggatgtgaatggaactcagccgctacatggggatgctaagtggactttgcttagtcttcaataatctgctgatagaccgtgggcttagctactccctctctcgggccgaatttacgagcccacaacaaacggcccatatttgcttgcggcccaccaactaaaacgccctcttaatcctcctcctcccccaggcgtcgccggcggctagattccggccggtgatggaggcgtcggcgtcggcggcggcggcggcggcgctgtgggggcacaagcacctcccgctcctggcgcgcgcgtcctccaaggagtcggtggagtacatcctgcaggcgctctggcgcacccgccgcaccggcctcgacgccgccgaccgcgccgtcgtccgcgacatgctccacctcgcctccgacgccgacctcgaccccgtccgtatccgccgccggctactcatcatctccaccacctctcctcccgtccccgcgctcgcttgtagctgatcccatctctctctcgcagttgctggtttgcctcagggtactgattcgcagatgcgtccatgggaacatcgggaaggacgaagtcgccaagcttttccccgaggaggtgtcgcccgagctgcagaggctgctcaccttgcttcttcagaagtttcagccggagtggcaagaggatgttgccaaggatcaggtaaaatcaggcaaagttctagctcactggtcatttcattttgcttatgtgattagctcaagagataattgtcccaagctaatgtttctgtggttggcatgttcatagtttgtgcattggtgtcaagataaaatgtggtcactggtcactattgatacatggattttggttcttgttttgaccttcggagataattcaagataaaaaccagcaagttctagctcactgatcattttgcttctgggattaattcaagagatatttgtttcatcttctgttctaagagtacctggtgtgcagtgttgaatcggagcctaagctccaattaggcaatggttgacatgttcatagtttgtgagttagtgtgatgataagaatgtgcttgttggtcaccattgacataaggatttgcttcttttttttttaacgcaattagttgtttcgtaggcatctgcatcacggccagaaacaaccgaatgcccttcaaatcaaaaccaagatacaacagagcagccagctgctggtgctacagaggtatgcttgaaacacttgttgtccaagatatatatttgtgtcattatcttgtaatctatatatatttgtcattatcttgtaattttgcttaaaacttcatggtagagtctcactgactacgctcctaacatttctacaatcagattactcgtttatcagaagttcaatcagattacttggatggatgacctgatactgtaaataattgtcttttctgcagattcagaatggtgggaaatcatcagttgtggaaaaagaactgaagcttcagttaaccaaggatactttagacaaaatgctcgaggatatgtactcaaccaagggccaagcgtccaacactgtgagttggccaatcccttctgcaataacaaattttcactacattcttgcatctgaatgttactttcatacttttgcagggcaataccaatggacatgaagagactgcaggatgcacttaggaaaatggaaaatgctgtttttgtcattttagctttagctccagggacattttgcagcagaaaaactgtaccagataacatcccgtgtctctctgcgtcttgtgatagatatttttccccttgggcagtttgatctaggctttggtcactgcatccatttaccctaaggagcaaatgtaggtttagaagctttccttgtagaagaagttagtaggtgattcatctgtaaattgaaatccattggaagtatcagtgtcaacgcatgctgaaatccttacatttccacatatgcggggaatgttaatgtcttgtcacatctttgcaactgaatttactgagttttttcttttatcatatggagcacaagaactgcaaattttccattagaagacaacataaatactggagtacgtattaatcatcttcttaacatcactcccaaaaattgtgtttcgtctcatataagcccaggccagcaacacgattccaacatagtactatagtacaggagcacagtctgcgagaatcatcgaatgctgcaataacttattattccgggcactataaactcttgacttctgattccaagcagtttacttatttcacattttggatcttcccacgcacgaagaattctgtattttgatccgatgccaagatgtgttgaggattcctctcaggttccatacgtcttccaccttttcaggttgaacatttgctgctgagtccacctgtttcacacaagatgcattttcatcagaattatattattcatgcaaagcaccaaacgttgggtaaaatagtaacccagccagtggtggatatcacttaccgccttagctactatctcagcgtttgctggaacgtctaatgtagcctcgaatagaacccatgcccacttat

SEQ ID NO: 4384 - DNA, 5138 bp, Oryza sativa
ctaacttatcacttcattaaaagaggcaaaataaaaggcaggagaagttttaaatattgatagcttcttgtggtaaaagattagtgcaaggaaaaatgacaatatataatatacctgcacagggaaatccatttgtggcctcctagttgaccaattaatattgtcccagtctacggagggtggaaacatcttgtaatctttttgcacaaaaaaaccctgatcgatcacagtaatcagtgtcgactcttaaaataatgatgaggtactgagctgaatttttcagtaaacctggcattcttcttcaattatgttgatactgtcaagccattttacagagcgtgcgccaattactccaggtacaacaacacgaagtgggtatccatgatcacggtttagggtctgtacacatcatagcgccacattagaaagccagcaacagcaaagttcacaaaagaacatacatgcatccagaatcccagattccgagcagagtgtctctgcccaacatttttttccacgtctagtgcactgtgtgcaccagtaattgacaatcactaccacattaagttgccatagactgggtcagcgtaaaaaaaaagggctactagtggatattgatacttagtagtaatcaatatttcaggtgctgcttgtgctaaccattctgctttaggaagaaacaactatatgaatgtagcatgtttactacagtgcagcgtcagtacagaaaatattatattatatttaatcacatctaaaataaagaaatggttatatctcagcatatgtaattttgaataaaatagtgtgctagataatattataatggattaatagcacaaactcaaaaagggagaccggagaaataaacataagcatttgcaaagtcaaacattttgagaaattctaaaccgcatagggaaagttatcaattttcatactaaaagaaaaaaaaacaatgttctttcacctctccgttcatttcgtatgcaagtaacacatcagcttcaggatctgttgcctgctttagtggaattgatgccttatagggaccacctttttcttcctagaaacaaatggcttgagattagttcggtaggctaaaagaacttctgcgggtagataaggacttacatactcactttgcacctgtcaacactgacaaactcaacatgcttgcctcctaaagatgtgactgagctgagtttaggtattccaactagttcaaggacatcagatagctttgctcctccccatgttgctgggaacaatatgaaagaagaaaacatagtacgattattacaactatataaaattgtgtccatttcatacagataaatctaggaggacaaaacagtcccgtatcagtaatttatgcatgatataacaatcactgagcagggtactgttaatataggaaaaacaaaaggtaaaaagaaatgacttattatggtcggtaaagttatatagcatgaaaaagaaacaattctaggcctagctaacaagagataatccttgcaaatccctccaatcatacgataataattatctctataattcctgctatcagaatgtagttgtgtagtgatagcatgcctagatcccacaaagtgcattatcttctggacattagtgacgagtagtattcagtaacacagtacatcagattgcatttctaaaaccttgaagacaacactcttcagtacatactataaacatggtgtatttcttaccatttccaagagcagatatgtcccacccaacgcctctcactttccgtaccttactcattgcagtcctcctgttgcctgcacactacaaattcgatgttgtatcgttatgttactaacaatgtcaatattatccatcagataaagatttggggagagggatttgtggcaaacctgtaacgttgcagttacatcatactttgggagactcctgcatgtgaaagtttgcatcaattctcaaaacaatattttgtttagtcataacaaaacataaaatgaagtacttacctaatgtcagccatggacagctgcacattcttgttgacaataccagtaatggaaacactgtatctgttgattcagtcaaactgaaaaaggtaaggtttgttacaaaacataatgataaatggcaacttatagttcatgctgacaaccttgagaggtcatccacaattggtatcggtccatggtttctcttgtagaagaaatccaccggggtaatataagatgaaactaatgctgatcgatgaggctcagcattaaatggttcctgccaacagttgtagtaaagtaagacttgctaactttatatatataccgtgcacttgtatactatgatagtgacagaccatatagaaaagcaaattgggttattctttccctcacatatttatcctaatgtacaatcctaatcaacaatgtaagagttgttctcgattggctggttacataataactttatagcatggaacaacatcacaatttgaataaagttctgacttagaaggaagattataatgaagataaatatagcttgtctctttcttatcttttcttttaagaatcagtctgttgtctgcaatactgctgaccaaggacaagcgcaaaagtatccgagcgtgttccaataaggaatcgacaaatgcgatagcaatgttcatccaagttattacgaaatatgtagaaaaaaaatcagagacttgtttacttcaatatttaggatccagttccttgtcaaaggtatattcagaaggggatcctctcggagagtgaaccgattaaacagaacgaaatgccccatttctatgtcttgcaaaacaatccatgaacagctgaagctaatctacacgacagaaggcccgcagagcagccttgtagcacagcacacccgagtgaattgtatcgtgaacaaacagaacaacatcgcaaaatcggctaatcctaaaacccacctgctttcgctcaagccgggaaacggagaatcggagatccatttctccaccgagcaagcgagcaatgacaagccaaactaccctacacatccccgcacttcactacgcaacgcgttgcgtctctgaacatgggcactgtgtacagcataaacggagaccgcccgcgattccggcgatccagcggcgtgggtggacgaacccgacggcgggaatcgtccggccctccaaggtggcgaacgacgacgcatgcaggatgcaggcccccaaccccgagcaaaccccaccaacccacgcaggttgaacgacgacagatttcattcaggaacagcgataggccggtgggagggcggagcgaacggacgaaccttggagttgatcttgagggcggggtggcgaggcggctcgtcggagtagctcgccggcgcggtgagccccggcatctcggtggtggaggcgaggcagaggcgatggatggatggatttgccacgggctccaactccaagtgggccggagtttttttggttgtgtggtgatcgactcggccggcaattgcgaggctgggtgacggctgtcacttgctgacctaacattttttcaggtccatgacatgtgggccctctccaaatcctttgtgctgttgtgttttgctcaggccacatcgtttggcttttttactgataagacaaaacggcttattaaggaataaaaataaatttattggtaaaatttatatatatgtgttcttgtgacttaaaagctaatgctgtaaaagaaactccattgaaaatatctcaaaattaagtttgaaaatctaaaatttggctttttctttgactgtttaggccatccgatgggaggcctcaattgttcgttctggagcagaaaaccaggagaagtatttctaaaggaaatattaattcttttgcaataaacattatttatacattcggttcataggattcaaaagaagatttttcataggaaagctatgccaattctccaaaatgtactaattccatatgaataaaaacatccactccatcctctcgtttagctcagtgtagaaaaaattaatatgttccaatcattttttttgcacgtgcattcctacattatttctatgtttttcctattcttgtgattgggaaatcccgtgaaccgaataggcctaagagattttattttgcttgttttttcgcagggccggcgacgaagaggagcctcatgtaatgagatttagatagagttgttacaaattacaataagcactgtgaaacataggaatcttttatgtcgttcctgcgtgagccaagccaaaggatcgaaaagattgtaattgagtggattcttttttcctctgttttggtgaagggatagcaagttttactgtagttttccttttggtggattcctttggattcactgtggtatagtgtcaattccaaaggattgcatatttatgtactttaaaaaaaatcctttcaaccaaatgaggcttgaatcttcttggagaaaacaaggctcacagtacttgtttattactctcttttatcacaaacatttgatgttcggtgttagatttggtcaaaattaaaaactttgattataatttctctaatgcttagtttttttaataaaaaaaaggtatgcctagatttgcctcaaatactttgaaacttattggtttttataaacttattttaatataacattgatggccggatttttaaaggtttgattgaatattgttctaaatgtcaaatattcatgaccggtatttggcatgacaaattcaaaacgacgagccgcaaccagagtaaggccttcatgtctcaaacttccaggcccagcttatacacatggatcctcccccttagaatgtatcataatgtttgacctaattctttttatgataatcaattcaacctcaaacatttatgggtaagattttgtttttcaattatttcctttgaatcagtagaacatcggagtgattgtgcgctctacacggcccctacttctcaggaccttgtaggttctagctgcatatacatacctccatatgctaaccattttcatatgtcaacatttgtatacataggtgccctcatgaaatatacaattcatagattttgtatctgatagcagcatagcaccaaatctccactatatgct

SEQ ID NO: 4385 - DNA, 14436 bp, Oryza sativa
tatgagtgtatgagaggtatgaccgagtattaatgatgtagtatatttttatataggtaactattgtatgaatggactattagattgactatagatgatttagagccagcaattggctatactattgaacttgctctaatggaatttcaacggcggccgctagctgatgaaatccggagtagattgccggtttggcgcggcccatgaaagagtgcatagtcaaggcacaaccaattctactctacagattacagaagccaaaccgccaatatccaatcaaaccttacaattcgaagaacatatttcttcttgatgtgccgcgttaacattggtatgtaccaatgaactcgcctattctacggtgaagacttaatattagtataataaatagtataaaaatgcagccatgcatggctcatggattaatttgcagctttgcgtctaaaaactaattatagatgcaaggaaattcacgataccaacgtactctccatctctaaataaataagtgcaattttaattaatcaaatcaagcatacagagtgaaaaagagacaaggggaagaaaacgaggagaagggagtgctattaaaaacgagaagaaaaaaagtaaagtacttcctccatcggataatataagacgcgtacgtattttaagattcaacctttaaaacatttgacgaacacttaatataatatgaaatgcattttatttgttaaaaatatgtcattagattgagaattaaatttacttttatatggttataatttcgttgctacaaaccttcaagtatatgagaaattattagctaaaaattagtttttgagaccgtgccaattttgaattataagatagagggaatagtagtaataaagaggtctaatggaccactctaaaactacattattaattagagactaatcttcaagttacaactatacttcctctattctattctaaaatataagtcacaaccactcttaacccaaaactaagaaataattattatcacattatagttcggattatcctaataaatagaatgcatgtacccaattaaattagaaatcttgatgattagcatttaaataataatattttaatggaaaatatgtgttagttaatgacatacatgcatgcacgtcttctattatgaaataactttaaaaaatagttgtgtcttatgttatggaatagaggagtacttatttagaaatggaggggtaaatcccagcctctatatctaggacatacaactagctaggataagacatgcgagtaaaattttatacttagttataaatatttaatgtttaggatgatatttgatcataagctacttaccataagtttggtattaaataaaaataagtgtataaaatttaatagggtgaatagctaattgagtccctcgagttttatcgaaggctcaatttgatccttcacgtttcattttgtccacatggctcctctaaatatttgctttggtttgaaatcatccttggcccacttaatatgccatatgactatttctagttaatatttctattagaaaatattccttttgcctttaatttgtatacaactatataccagaaaagagaaaaccaagatgaataaacaacattgcagatgtacttcccattatttcaacatgtgcacatatcgtatacgctttctagtacataatttattttcgttttacataatttactatgtattatctataaaaaaatcaagcatgtaatttttctcttatatatgtgaatgatggggatataagtgtcatttatcaagagagttgttggttcaaggatatgtttgaactaaaatgaaaacaactcgaaggactaatacgggtaaattgaaacattaaggactaaactgagcctcaaataaaacttgagggaccactttagctattcacccaatttaattggctgttgatggatatatatagcataaatattttaactaaatttgtatttataaaatttaactcttaatttacagacaaaatatttaggacttgaggaaatgcacaagtgaaatctcaagtttcaatcgtcgcttttatctcctcgcaacgggaaactctgcccaagttgaaagtagcccttggttagcactacgttcttgaaattgctgttcgccgtgaagaaatcgagacatctgctcctcagctctgggcagttgtggcaaccgtctcggcacagatcagagttgtggcaaccgtctctaccgacacgagctcccaaatattttgggcacacataagcttcaggctatccagtgcagacctatttgccgctgcgagaagcggctcaagcaggtcggctaaaccgtttaaacgattatccattaaatatttaatgacaagatgatacaagtaaaattttatagttagtcataaatatttaatgtttacgatgatatttgatcaaacttgttgaaactattgccatcagttttttacaccctccaggctgataatacttgtagttttagataagggtgaggtcaaactttagaatatttgattatgaattatttttaaaatatttattttcaaatatggtgactatatgtataaattagtattaaaaagtactttaataaaaccatatatttgttaacacttttatacatattataatgaaaaataatggacaaagttggtttttggagatcattcaattgtccaaaacgataagtattatcaacccggagggagtattattataataagattataaagattaataggctgtcgatggatagaatttaaaaaaaaactaaactaaaatttaaatagatcttattttacagataaaatatttatgactcgaggaagtgtataagattaagtttaacaatatagccaactactagctccaaaattaaaacattatctataaccaacctaatagtccacccatacaacagttaattgtatatatatgtaccacataagtaattaatgtctaatcaactaatctctctcatatagtttgtttgagcccgtactggagctgactataaatttgtagctcacttttcttcaaccttcatcacataaacaaaaatatgatacggtataacttatatatcccgcttaattttggccttgtttggatcctccgagctattaaatagccctccggaatcttgctatttagaagtattaaatatagattaccgacaaaactgattccataacccctaggctattttgcgagacgaatctaatgatgtatattaatccatgattagtggctgattattgtagtatcactgtagcaaatcatagattaatatacctcgttagattcgtctcgcaaaatagcctaggagatatgaaataggttttgtcagtaatctatgtttaatactcctaaataacaagatttcatagggctatttaatagccctccagatctaaatagggcctttaatgtacttctcaaagaagtcgcaagtttcaatcctcgcttttatatcctcaataaccaacgggaaactctgaccaaggtgaaagtatccctcggtaaccactaccttcttgaaattgctgtcagccgtgaggaaattgaagcatctgctcttcagctctggacagttgtacactcggcacagatcagagtcgttgcaaccgtctctaccgacacgagctcccatagcttttgggaacacataagcttcagcctatccagtgcatacctgtttgccgctgcgagaagcggctcaagcaggtcggatgtacctaacaatggtggcaaaacgtccgtgtacacgaagtgtagcagagctttgaacgtcgccggctcgatgtcgtgcagcgtgacgcacggcatggtggcctcggccatggagccgaggagctgcgccctgaacaccggcgagcgcgcggcgagcacggcccggtgcgcgtggaacgtctcgccgccaacggcgaacgacgcgtccgagccgtcggcgctgccccccatagctccgagttgggcacccagattggggggcggcacggggataggattgccgtggacgtcgttgcgcacaaccatgaacccacacacgaatgtgaccgtgcctttgtcgctgacatgatccggctgtagatcactctgcttgacgaagtgacgccacccagtgaaccggagacccgatgctgtctccatgtttggccccatggtcctctttgcatggtgcgaggaaggtttcccgtctttgtccatcaagaaaacctcaaagataatgctgattttggggtcgatctcattctcatccagcagcaggaagacagagatgtacttgcaccctgcatgcgagtagaagtggaacacaatcgtcgcattgtgctccccggccgagattcttctttctggtacccattcgccgatgacagtcatccaagaggcttctaggtagtcaaatttgtactcgatgaaaccggaggacagcatggtcgccggcggcgtatgttttgttgcgtgcggatatcccaaaaggagaattaatttgatcatacgagagagaggacaatttatactaccgaaagtagcgatgagttgttcggtctggtgaggaataaacgacaggggattcagataaatttttaattaggatttgtaaacagatcatctccggactctggtcgattggtgataaaataaagggcaaaaaaaaatcgaagctattttcatccgtatcggtgagaccgcgtatgcgtttctgtctccataagccgtggccaactcggtgtcatacccagattgaaaattttccccaaaaaacagacaagaacaaatctcaaaaaatagcatctcaaattgcatttcggctcattcatttgcccaaaacagccataacatctaaacggaaaaaaaagaaagagcgatgcatccaccaatcatgtgcaacaagcaagcccaccggttgcagattggtgctaaccacttcgagatcgaaggagtggcgtggggaaggaggtcttctacctgcccgccgtcgtcacgcccatatgaccaaccaaataccaacacaaccaattctcagacgtgaatagacagtacaaacgcggaattattaaaagaaatgcacgaggtgcgacggattaatatgcagttttgcaacttataagactaataagcaatattcaaataataattatgatatctatcgacgtaataaaagggctaaacgttatatatagatcaatttggaatggagggagtataatgtttcaacgttcacttcttaagccgtggctttatctcttcgataactgacggaaaactctgcccaagatgaaagtagtccttggttaccgctacctccatgaagttgtctttcgtcaccacgagatctatgcacctgttcttcagctccgggcagctgtgcatctcggcgcagcacagagtcgctatcaccgtctccactgacacgctctcccacagcttctgggcgcacatcagcttcagcctctccagcgcgaacctgtccgccgccgcgagcaaacgctgaagcagatcagttgtactcgtcgacgaagagccttcgatctgcagaacgtccgtgtacacgaagtgtagcagagctctgaacgtcgccggctcgatgtcacgcagcgtgacgcacggcatggtggcctccgccatggacccgaggagctccgccctgaacaccggcgagcgcgcggcgagcacggcccggtgcgcgtggaacgtctcgccgccgacggcgctgcccaccatggcggcgagctggctgcccaggttggacggcggcacggcgacatggtcgtcgccgtcgtcgtcgttgcgcagaactacgagcccacatatgaatgtgaccataccgtcgagtgattcgagatcgcttcgcatcacaaagcgatgccacccaaaccagtcgtagccatcctgggacgcccaacactgcatagtcctcttcgcatggaacgaggatggtgtaccatcttttccaatcaggaaggcctcaaagatcaccttgattttggggtcaatctgtttcagcatcacgaagaagagagagatgtattcaccattgccgtacccaaacccatgcgggtagcacatgatcttcgcattgtgctcccctgtcgagattgttgttgctggcaatctctcgccaatggctagcttgtggatttgttggtagtcaaacttgtactcgatgaaaccggaggacaccatgttgctactggcgtctatgggacctgaccgcctgagtagtagtagtattattatttgatctgctggttgacactttttcacggccaacacaagatcacctaacgatttacggtataattaacagagttgccaaaatcgatagatcaaaatcggctagcggaaccgatttcgagattaattcaatttcatggaatcacacagctaatttacgagcaaattagtaaagaagataatatcgtacttacgtgacgacgaacgactagtttccgagtaaactagcaaaggataacctcctcatttttatagagaagcacaaccgtttttcagcgcaaaacggtaaagatcaaccaaatcctaggattgctataactcaggcataaaagtaaaatagaaaataacggaaaagtaaaggaacgagaaaaatagcagatcggtaatgttcggggtcgtcctcgaatctaaaacccctgatatgtataagattataagggtatatgcactgctacggcgcagacgagaaatctacggaaacaaggtaccagaaaatcctaacaaataaactaccaaaaatatctatcttccactcctggcaaccacgcacatccacagcttcggcatgcaatcgatcagtacaggagccgagttgtctgctgtgaaattcaatgatccaagcatatgtctccaagctaagtcagccattatggccttccatcaattacgtatataatcccagtgcatcacaactaatcctgacacacataaatttgtctttccagcaaaccacttaacacatatagtacaagttattttagataatttggcctgctcaaataaaatcaactatgagccaaattatgacataaagactgctaaagagagaatttatagtacagcaatgcatgcatacgcatcgatgcaaagtactaggtggtgtttggatccagggacttactttagtccctgtatttagacactaatttataatattaaatatagactacttataaaactaattacataaatgaaagctaattcacgagacaatttttttaagcctaattaattcataattagataatgtctttccagcaaaccacttaacacatatagtacaagttattttagataatttggcctgctcaaataaaatcaactatgagccaaattatgacataaagactgctaaagagagaatttatagtacagcaatgcatgcatacgcatcgatgcaaagtattaggtcgatgcaaagtattaggtggtgtttggatccagggacttaactttagtccctgtatttagacactaatttataatattaaatatagactacttataaaactaattacataaatgaaagctaattcacgagacaatttttttaagcctaattaattcataattagataatgtttattgtagcatcacataggctaatcatgaattaattaggctcaatagattcgtctcgtgaattagtccaagattatggatgagttttattaatagtctacgtttaatatttataattaatttccaaacatccgatgtgataggaaattaaaagttttagtcccatctaaacagggtctactccctccgtcccaaaaaaagataaaccctgggtttccatgtccaactttgactgtccgtcttatataattttttttaataattcatatttttattgttgttagatgataaagcatgattaatgctttgtgcgtgacttgtctttttaatttattttatatcttttttaaataagacagacggtcaaacgttggacacgaaaatcaaggtttgtctttcttttttttttacggagggagtaattagtaacgctttggagttccaaccgcggagaggagaagatccatgatgtctccatacaacgcctcttccaaagcgtcgagaatgtgaagacgacgacgcctggacgcctggtgcgtgtcagtgcgattgatagtcaaaaaacaaatgaaacgaaactgcggatacacaccggattctaatcactatagagtaaaaacatgttaactaaatggttataaattttttaaaaaatatttgataaaataaattaatatgtaatatacaattctacaaacatgcatgttcaaattcaacttctacaaatatataactaatataaatattcttattttttcgttcgtcacctcatatgtgcggtgatttttttgtccccctcgcctctcctaaatcttagtcggaattccatcaccccgacccaaaaaaacttcccaatcagaattcaatcaatcacacaaataaaataaaatcggaggaagcaatatacacacacaaatatatcaaaaaaggatcaaaggggaggtcgccgtcgagccgccaccgccgccgctgggacgctggcgggctgtcgatgcctccctgggcgccgcagcccccgccgctgccggttgtgggggagccgccgtcgccgctcacagggggagggcggcaccgccactgctcgggggggggggggggggcgccgccgccgcatcttgggctcgggggagggcgctgcccccgctgccgttcggggggagggcgccgctgccgccgcttgggctcggggggagaggcggcgtcgccgccgcagtcgctcggggagagaggcgccgccgccgccgccgctttgtcacgggagcatcaggggcgcggaggggagggcggcgaagcgagagaagggagagaaggaaatgggctagggtttttgatggctaaggagagggagggggtttttgtttccccgatctcgacgctcggccgtccgatcaaaaccctagagatcggacggccgccgtcaaccgggccgaaatgggcccaagagggatcgagagcgaggccacttttccggcccaagcctaggttgcggcctggggaggggtagagcgcccgcgcatgcgcaaaaggccataggccgaccggcaagggacgaaaagaagtctattttaggtccctcgggccgaagaaaaagattcagaagcatttacaattatagttattgaatgtgtttatttcgaatcaaacctaaaatgaaggattttctttctttttccaattaaataattgttaaatgatgtttgtattattaaaattaacaattaagctctaaaaattccaataaaattctaaagagcgtaactaatcatggagaatttaataaaattaaatttaaccatgttattttatttctcacatttgctttacttgtaaatttatttaattatacacatacctacttaaaaataccaaatatgtcaataaatttgtatttaattaattgcatatttttctgatatgtacgcttccaaattcaatatttttgtgcacatgtgttataagtacaaagcaatcttaagcatccatgtttgtttgatattcacccggtgcaacacacgggcatatttgctagttataacaaaaataacaaaattaattgttacaatttatagaagttgaattttaacttgcatgtttatgaagtggtatattacatattgatctatcttattaattattttaattttttttcataaccatttagatgacatgcaataaacgggtggacatccacctaggtgattaaaacagtttcccgatacacacaactattagttgctaataattttataagctaatgtatgagtgattttgtactacttgggaattaccgggagatatcatattttttatataaaatttggtatatgagcatctttgatacactataaaaaaggattttttttcataccgctaaaaaatattttcacatgcaggtctttgatccgtctgcatcaggtgtatgtgaaaatcacccgagttcaaatcaagagatcgcaaaacttagaaaaaaaaaacataacagaagagcagtcaacgtggtagctagagagctagtacaagatatataaatatttcagctacaatttctcaaccctcttcttcagctcagcaacaatgaccgggaatttctgcatgagcagtgcaaaaccatcggtgaacacggccttcctgaaattctcctcgacggcaaagaaatcgatgcacttgttcttcagctccgggcagttgtacatctcggcgcaaaccaagatcgcggcgaccgaatccggcgtcatgttgtccagcaacctctgtccgcacatgatctttagcctgtccagcgcgtacctgtcggccatggcgagcaggtgcttgaagaacacgttcgtcgacgaggagccctgatggagtttgccggcgtctgcaggcaactcgtccgtgtagatgaatcggagcagagctctgaatatcgccggctcgattccctgcagcgtaatgcacgacgacgacggcgaggtggattcggacttgcagccaaagagctccgtcctgaacaccggcgaccgggcggcgagcacggcacggtgagcggcgaacctctcgccgccgccgccgacgacgacgaaggtgacatccgcaccatcctcgctgtccagcaggccgccgagatggaccccgatgttcggcggcggcagcggcaataagccgccgtcgagatggccgccggtgacccccggcgacggcagcggcacacggttgccgtcgccgtctccgtcgtcgtcacgcaggacgacgacgacgcacatgatcctgaccttgccatccaccacgaacaccgatgacaaattgcttcgcttcacgaatcgtggccatccccacgcgggatagcccgcgggtgggtagacctgcactaacctgttcgatccatcggacgggttgccgtgttcatccaccatgaaggcgtcgaagatggccttgatgttcttggacttgctgatcagctcgaggtagagcgagatgtagtcgccattgttgtctgccttgtcgccgcgcgggtagcagttcaccctccaggttagccctccggcggtgaagaggtcggagttgatgggatcgccgatggcagaggcgttcgtcgccgagtaatccagtctgagctccacgaaaccggaggccggcgccatgctcgatcgatcgtgtgctgagatgagacgtacgtgtgatttcagcagaaagactgagaaggatagatagatatcgaacgaacgccaatgtgtataccgtataatgccgatgtgatgagttatatatatgtattgtgatctctttctctaattttggatgtgtcgatcgattttcttattggatagtacaaactcctatttcggtatttccataataagaaaatcgatttgtcgtgtcgatcgatttttggatgtgtcgatcgatttgttgtgtcgtagtcttattggattcggatacatgcccggcacatgaacatgataagatgaattttgcagtcctttagaaaatacttgagatacctaaattttgcactataatttttggtaccttaagaaacttattatagtatctagaggtatcaaattttacactagaaaatagaaaatgcttctcatcgaacgttcgaagcaatgacaaaaatcggacaggcagcctctgacacacatacacatatccaagcctatatctctacctccaaccatataacatgcacctttaacgatatttaaaacgatttttctcttaaatactcattcaatctataatctgatcacaccgttgtattctttgtaattaaatctttacaacaaaatgtcgcataattatattttgatgaaagaaaaacatatgtttcaatccattaacattggttgtttcatatgtgatagcgatatgttttaacgtgtatcttcaccatgtttcataaactttttaaatgtttcagttgctgattttttttaaccctatataacttgatatttcactcgttagttaattggaacatttgactgactgattctttttttttttttgcatattgcatacgtaggtggtgtgatgacgcgtaaacagtcgggcgtccgatatttggtggaatatcggacgtccgacacggagtcgtctccctagaatatatagcatctctaagtatcttaagaatgataaaaatacccaattgataatatggtcgattccaggcgcctggtggtatatttggaaccaaagaaatgcatgaagcttccaacaaaccccaagatcagctgatgaagtagttggacaaattctgatgaaaagcaagagcattcagctagtacatataacacccccaatataattaaacatgataaaaaaaaacaagttcaaagccagacataacttagaaaaaaaaaacataacacaagtgcagtgaacgcgatagaggactaaaagatatatatgcagctacggtttcacaatcctcttcttcagctcagcagctatgagcgggaatttctgcaccagcatcgcaaaaccatcggtgaacacggctctcctgaaattctcctcgacggcaaagaagtcgatgcacttgttcttcagctccgggcaatcgtatgtctcggcgcaagccaagattccggcgactgaatccgacgtcatgctgtgcaacagcctctggccacacatgagcttaagcctgtcgagcgcgtacctgtcagccatggcgagcagatgctggaagaacgcgcccatcgaggagccctgatgattgagtttgccggcgtctgcggccggcaagtcgtcggtgtagatgaaccggagtagagctctgaacgttgcagcgtcgatatctttcagcgttatgcacgacgaggtggattcggacatgacgccgaacagctccgccctgaagaccggcgaccgggcggcgagcacggcacggtgggcggcgaacctctcgccgtcgacgacgaaggagacgtccgtcgtcccatccccgccgttttaggaagagcgataagtaatcaccattgttgccctccttctcgtaaccacgcgggtaatagtctacactccaggtgaacccaccggccgagaagacgtcggaggtgagcatgtcgccgacggcgtaggcgttggtcgccgaataatctagtttgagctccaaaaaaccggaggccggcgccatgttcatggtggtggcagatggacagtctgcgagatggggagatagatcgaaaagcaatgtatacatatactaatgagtaattatgagtatcatttttctgttttttgagatccgtagatcgattcactttcctatacggaaatatatctaggccagttcagatgcataggcgcatcaccactgacccatatcgatgggactgactaggtgactagggctgtgttagggagtgaggttgggaaccctctgcttcgcacgtaaaacggagcagcgtttagtgtatgactaattaagtattagctaaaataaatataaaaaatagattaatatgatttttaaagcaactttcatataaaaaatttttataaaccgtttagcagtttgaaaagcatgtgcgcggaagagctggagaaaactcagcgtaggaagaggagttttagggtgagtttgagatgaggggaaaagagacgattgagaagatatgcaaaacgaggtaagccattagtacaagattaattgagtattaattatttcaaacttcaaaaatggattaataagattttctaaagcaaattacatatagaattttttttttgcaaaaaacaccctatttagtagatcagcatgctttctccagctgccaaacgcagccttagagcaggtacaatagcaggctataagccagctataaacatattttaaagagataaaggaagagagagaagaacaatgggctacagatttgtaatcaggcgtagcatgaaatccaagacgtaatgtgtgtatgacaggtgagactaggtattaatattatagcaagtagctattgtataaatcggctattacttcctctgtttcataacgagagttattctagtattgcccacatttatatatatgttaaatgatgtgagcaatggtagaatgctttacattataaaacggagggagtacattggctatgatgatttggagttaatagtgggctatactattaaaacttgcttagtacttgagaggggaggtatcaaatctcagccattgattaaggttaatcggatggaaatgattgatcggtacctgttgcctgttggtactaacgtcgttccgccgcggggtacctagtggttggtagggcagctaagtaatttcgttgtgtcatggttgactctggcg

SEQ ID NO: 4386 - DNA, 20228 bp, Oryza sativa
tccaaaatcatttatattacgggacgaagaacgtagtttgactagttaggtttcttgtttgtggaacgaaccccacccagttgaagttctaaacttgacacgagtgctcgcatttatgactatttattcttttagtggtaggcaacgtacccatgatagtgaggagtccgtggtgactttatcaatctcaagatatgtgagcttagttttctggaggtgtgctcataggggtagggtgtgtgttcataggggtgagtggatgcgtgttagcgtgccgatgacaagtcatgtcacaacgctgttgatacgaaaaacacacactagcctgggagatctgcttagctccagtgcaggtccaagacgttgatgagatgcgggcgtgccagtcagtttgatcctgcaactgacaagatatgtaaacaagatatcaataagccgatcggctgacaagccgatgaagtaattccagccgataccgataccagccgatagcaatagggtttcgagctatcggctatgtgtttgatgtggggtctgacaattgatgtagataacaatataaagtcaatcagctgatgatgatataatataacaataatataatccagtagaaaccaatcggctaataatgatagagtaatcactgatccgaaggttaaagcatacatcggctggaggtctgatgtcataaaatccacaagattagataaacatgaaacctttgttgtcatcggctaaatccaacttatatgtatatgcaatccttataaaccgatgcaacgtctagtaacttatcggctagcaccccgataaaacactagcatgaacctatcggcttaacaagatttatattatcaacaacaatctagtaggtcgaacctaaccgatgcagcacgagattgtatacgataatctaatactcgatgagccgatagatctgtataatgtgatggatataacaaatctatttacaacagcattgtgattgtagagatatatcgactaagacagaagatcagacttaactaagacagttccaactaaaccgatgtgtctctaaacacaatgcaattagagatagaattgagatatcaggtaggcaaatatatcaaccaaacaagagcgatccaagagatcgaagcgatgcagccttgaacaacaccaacgtggccaatagattcaccagggccggcgaaacgtaggacttaccccttcgccggatatcgaactgaaccgatgcagccccacatcgggtgcctaattccgctggatgataattaaagacctcgggaaagagggtggcgatgcgccaagagtagttgtattgatctagagattgatagattatagtgaccctatgtgcacatatttatacccatgtgtagatactagtccttgtcggataagaaagaaactttcctaaagataaaaggaaaacataaattccttattggacactgaacacactttcctaaagataaaaggagactaacaaactactcctaattaatagataacttgccatgccgcatctcccttaaactcggactcttctggataaatttcctttaattgatccaactccaccaagaacacaattgctggcgatttgacgactcccatcggccgattccaagactctgaagccgatactgactctaggccaatgatgacttcgggcttacaaattctggcgttaacaagcgcacgcttgcatgcccatccatgtgtgctattaattaattaggctgtgtttagatccaggggtgaaaaattttggcgtgtcacatcggatatacgcacacatttgaagtattaagcgtagactaataacaaaacaaattacagagattccgcctgtaaactacaagatgaatttattaagcctaattaatctgtcattagcaaatatttactgtagcaccacattgtcaaatcatgaaggaattaggcttaaaagattcgtctcacaaattagtcgcaatttatgcaattagttattttttaagcatgtatttaataattcatggaggtatttaaacgttcgatgtgacatggtgaaaaatttcgaggtgggatctagacagagcattaatagtagtattaagtcatgaaatgacgtatggatgaattaaattcagtcgtcagacggcattaattaacaacactcccccgacgagcgtaataaaaatgcccgacattaattaattaacaatgtgcataactgtgtatatatatgcatgctaaaacagagcgaggccaattagccgtacgtacgtgatcggtgaagcttcatgcatgttactcatgacatgacatttcaaacctaattaaattgactgatgtgtcatgtacatgtgataaattgtgtataacataattaaattgactatggaagcagcagccaggggtgaaaatggggcgggtaagatcggatcacaatcagagttttcattactgtcggtaaccgcggttaccgccattaccgcggggtacggtaatagaaataccgcagtatcctccttaatttcaaataaatttagaaaataatttgaatttttaataaattttgcacggtttcgtacggtttttcacggttaccgcggtaaccgtgcttaccgccggggcgcggtaaccctggccccgatggtttaggaaaccctcatcacagcattctcatatcctaacctacatcttactttaaattcggaatcggatatgggtagtgtcggataacacatcactcatcccgtattctatcccatattaatttcttcgaatcggattcgggaacggatatttttttatgtccaactcatgaatatttaatgtaagaaaactattaaagtgctaaaaaagatacatcaaggaacaaattatataatattgcacgtgagctcataaaaaatagtgattaactaatcttttattatgtttataggtgaatttataatagattttcacatatgtttcataatatgtgacatgcgggcgaatacaacccttcctgtattctaatccatatattttttttacagatttgggttcgaactcggataatatcgggtatcccattttctctcccatattcctcccgcaggcctcggatcggttgggcgggcgggaaatatccgccccattttcaccccctagcagcagctactataccgatcgaccacatcacgtacttatacgtatatatatacgtacggacacaaatacaactatatatgcaagggcagatccagtgattcatctgtaaagtgtggacctacgtacgtatctacagcatgcacgtattcgtgtgtgtgtaataggtgttaatcgaaggacctatatatacgtaatactacttccatttcaggttataagactttttagctttgttcacattcatataaatattaataaatctaggcgcacatatatgtctagatttattaacatatatataaatgtgaacaatgctagatttattaacatatatattataatatgaaacggaggaagtaggagttatggtgcccatcggttggcttatttagggaataaaccaaacgacatatttgcaaacgaaaaataatttgtaaataaaacttttatatatgtattcttggcgagctaaaagcaaaggctgaaaaataaatttcgataaaaaacctcaaaaccaactcaaaatttagggttaaaaatttaaattttggctgataagcataaccacaatcgaaagatgataggtgacgaataaatttttgtcacgtgagcgtcacagattatgaactgtgacgaaattttatgtttttgtgatgtaaaagaagcgtcatttatcataagatttcttgtagtgaggccacatatataggttgtaaccgtgtcattgcatgatctaccgaccacacgagagtatactgcatgcatgcagacgatgtatacgtactcgtaaaggaagtcgtttaggacaatgtttaagtcaaacattgggaatataaattatgaataactctcaagttgttaagtttgaaaatataaaaattatatgaatagatttgtcttgaaaaatacttttataaaagtatacatatatcacttttcaataaatatttttatagaaataaaaagttaaaattctgttttggagaccgtgtcgctaaccaaaacaactttttttatgagtacggagggagtacacggaggttttaattaataatgacggtggttctggtattgtacgtgcatatgcatgagatatcagagtactgtacgtactaggtgagatgggcagatcgcaattaaaggtttggtttggtttaatttggtttggccctgtatacattatactagtttctgattattggaccaccctctgcatgcatatgcagctagcagttttttgcaatgcagatcgaggcagataatatttagagatgcagccactactgtacgttactagtactactgttgcccgtgtacgtgtgcatgggcaactcgttaaaaaccctagctttatgagatgatccaagataggccggctggccatcgatcactataccaatacaggcttagagctagcagggtacaataacataatgcaggtatgataatgcatgcaggcttatagctagataactattctgagctcttgaggggatgttccctggttgtttacatatcacttaaatagttatgaaaaaattttagaagatgtattaatatgtgatatatcactccacaaatatgcaacttaaaattcaactttcacatgtcacaacaaaaaaaaagaaattaatttacagctagttaacgtatatttatagtcaaattttattttttttcgttgcgatatgtagaagttgaattttaagttgtatgtttgtggagtgatatactacatgttaatgcatcttcttatttttaaaaaaaaattataactatttgagtggcatgcaagcaacgagtgaatgttctttccagagtgtaaaatttactcccgatatactagctcactattactacgctagtggataattagattttagctatatatccatggcatgatagtcaatagatatagctagtttttttttttgagtaatagatataggcatatagctagttggctttactattagctttgctatgttcggacatgttaacttttccttgaattcgtcatattggtgtacctaccccccctgcaggtaatctgcttatgttatgctctaactagtaaaacctgctttatttagatgagggaagaatcgtactacacatttgttggaaggacggacaacgataatcaatttctctctttttcaacatggccatggaaagttttttaagagtaggtaaaatagcaaactattaaccaactataaatatattttaataagataaaaaatgagagagaagagcagcgagctacagatctgtagccagctgtagcacggactccaagacgcaatatgtgtatgatatgtgggaccatatattaatacactacaagataattgagctattgccaccaaattattacagcaaaaaataattcgtagcaatatattatactattgcaatgataatttttctgtggcaaataattattttttattgcaacgatctacaatcgttgttttatttagtacttttgttgcaatagaaaatgagatatcgccacaaaaaatcgtactattgtaaaaaaatgttctatcaccacaattttaatttttgtagcaatttatatagtacatggtacttttcactattttttgttgccacgatcaacaaattcgttgcaataaaaaaaattgttatctcataatttaacttaattttttcatatggacacggattaagacaaattttatatagaaattatagctctcgacgagatctacaattttataggtgataactttttcatttgaaatcttttagatattcaaatatatgattcaaatctcagttaactaggctcaaatggaacgatatgtattttccaacagaattgatgcgtaggtgagttggtaaaggagagcacacctgaaggacaggtcttgggttcgaatcctatctaagacacaaaatcaaaaagataagtagataaatagataggatgatagattaatatttgtacttttaatttggtacgtaaaactaatgctacatatggagtggtggcaataatttttattacaacgatgcgaagtgttgcaatatgactttttgccacatccattccgtggcaacatctaaatttattaccacaaaataaaaatcgttgcaataacctattaccacgttgtttattaccacggctagcaacgatcttacaattgtggcaacatgtatctattgccacacttttagtattgatgccacgattttttttgtggcaacaaatgatttttctagtagtgatagtatagtaaacaactattgtataacttggctattaaattggctatagatgaattggagctagtagtgggctatactattaaaattgctctaatatgatttgacagacgtttctagggctcttattcgtccgaacacttgaccctgactccacattaacgactgtccttccacccaattccccacatccttgcatcgcatctccaacccctacctccacgcatccaagggtgctacaaggctacaacacttccaacttgtttagttccaaaataattcttcaaactttcaacttttccatcacttcaaaactttcctacacacacaaacttccaactttttcgtcatatatttctaatttcaaccaaactttcaatttaaccaaactttcaattttggtgtgacctgaacacagccgtcacatcgccaccaccagagttcaaaaacaaagctgggacgtaatcccgggcgtgacgagtaaaaatccaaaatttaaccattctgatttgccatgcgtgcatcgacgtgtttttcaagctactagctactagtagtacgatatgtttaatgttcaggcacagttcgaaatctgcatggatcgatatcgatgcattccatttaacatcgtatcgtcggaccaggtctcggttcgcagtggctgaaaaagcacgaggggttgtttagatttaggggtgtaaagttttaacgtgtcacatcggatattatataggatgtcgtatggggtatttggacactaataaaaaactaattacagaatccgtcagtaaaccgcgagacgaatttattaaacctaattaatccgtcgttagcaaatgtttactgtagcaccacattgttaaatcatggagtgattaggtataaaagattcgcgtcgcaaattagccgtaatctgtgtgtttagttattttttagtctatatttaatactttatgcaggtgttgaacgtttgatgtgataggatgtaaaagtttagagtgtgatctaagcaggccatgaatcactaacgaggcaacagcggcgtgcactgtggaatcgaccaattgatcgatcgatcataggtctcggtggatgatgaatttggattggcggccggcaaatcacgcatgtagcaaaaaggaggaagcagcgaaccaaaagtcggacacaggcatgtctgagatagatacaaattaacggccggtctttgtaggcagtcaacacctaacagtaggatcgatctaaacctatagatgtaaggagacatatatactgtgtatctaacgtacagtacactgtattacaacatatataaaactaggtgatacctcgcgctttgctgcgggattcatgtatgagtatatgttaaatatgtcgaaatgatgaaagttaatgttgagaaaataatgcgaggaagatgatttgacacatatttgttgatctctgtagtataatattatagatgatgtgttatgcttacatgagatttaaaataggctagaatagtaattggtagtaagtgaagatgtggcatgcttgtataggtttttaaatgggctagaatagtaatgctagtggatgatgatacggcatgtttgcatgttgaactttagcttctaataattatcagtgggtatcaattatatagaaagtatatatactactttcgtcttattaaaaaagcaacttcagactaggaacctacgttcagattcatgtttagaaattggttctacgttcagattcatgtttagaaattggttcttttataggacgcaagaagtatattggataacctccatcatcggtataagggtcgtatggtgtcagtgcggggggtgccgtcactattcagaaccttagaaattagagaccccaaatcttaattacatgaagcagtactaagcatacttaattagtgatatggttaaaatattaaagcccagaaggtccggagtatgacccagagctaaggccctgtttaaaatttttcaccctctcatattgaatgtttggacacatgcatagaatattaaatataaacgaaaaaataacaaattatacatattacgtgtaaattgcaagacgaatattttaagccctaattgctccatgatctgacaatatggtgctggtaatgatggattaattaggcttaataaattcatcttgtagtttacaggcggattctgtaatttgttttgttattagtttacgtttaatacttcaaatgtgtatccgtatattcgatatgacacgccaaaactttacacacgtgaatctagtcacaacctaaaagtggaacttaaagagtaatacctaaagctaaatcgattaccataatcacattttacaagtttttgtgatttgccatctgcctttctacgtaaaacagtcaatctcacctacttctagtagaaacattttacagttgggccgagtttagtttcaaatattttcttgaaacttccagctttttcatcacatcaaaacttttcaacacacgtaaacttttaacttttctatcacattattctagtttcaaccaaactttcaattttagcgtgaactaaacacaccgttggtagaagtaacagtgctagcttcccttcatggcttcatacaataccgttgattcctcggacccacttaccacaaacagaactatacagaacattaattactactctgtatttactactcggcccttaattactctgcgggcctccccagctctacaatttatgggctggcccatctgtctcccagatataagatgtgccccttgcaaaaagacattgatataagatggaccaaggtgacaaaacgaaaaattgaggctcagtgaactgaaaataatctggtgaactatgtcgattcctggttacattccctggcatatttacaacatgtagtatatatactggtctagctgagagtagcagattcaggagtcaaaagaccaggctctggtgaagtaattacaagtttacaacctcctatgataggacagccgaagagtgactcaagctgctttatacgcaaatgttggtcgcgactcttgttcctcatcttccgctaccatccaatctagcttagggccctaaagcaggaaaaggaagacataagggcctctgtgcatttatacaaaccgcataaaatgcagttgaagcatccagtattagctaattatgccaatcataagtcaacgaaataggtcacaaatatgaaatagataagcattacgagataatacataacggtgtgtttaaatgcagtacatatcatttgccaaatgtcaggggatagaatgagaaatttccttttgcttgatagtatagtcatatggtaggataactttagtccattaatgaaaatgcatacctttccctgacgaatgatggtagggtagcttcccgtcatatcaaccacagtagacgggtcagcaattctagtacctccatcgacaatgaaatcaaggccctgaaaatggaatcaccaattaatgaagcgtatcacgccaatttgtgtttcagcatgacccaggaatgggtacacaactgcacatcaaagtaacgcagaatggacgctatgatagttttactagacattccaagcagttcgttacaatttttacctttttacatataattacatcaatcatatttagtaaaaaatagcttcatgtgaaaatagccagcaactgcaactaacagagtcacacccacaattgttttgtaagtcaggactttttgcttcagttactaccatacaagccagagctgcagagcagatcatagagacaacttgtataaaaagcctagtagatgataactatgaaatctacaataacgggtcagcatgtactaataacaatatcacctataattctttataagaaaacaacaaatgacactctttaaaagatcaatacagtggaaagtgtaacgccattgatacacaaaagctcttttaataagatcataatgtgcatagtttctagtgtattgatggaagtgaagatatatacctgttgctcatatatatcagcaatgataaccgggtcaagtatccattcatcctctgacagagatttgacactgtaaatacaggaaaaggagtatgactatgagtatattgtttaagaaagaaaagttgataacacgacatctcgatcattatcaattcctcattcctttcaaacgctaaagaaacctaagctccagaaattactaaaaaaaagagagcacaagaaatctccgttcgtttttaactgacaagaccaaaacagagaggtacatatgcacgatatagtattgtgaatgttcaaacatgccagcagaaaaaataaagtactttctccaaactatttgatggtattataattcagcaatataacacagcatgtcactacatagagcaggaaacaaataaagtaaataaaaaaaggtagttacagcctagaccaaccttgtgcagatcaaaggctcatcaagattttgcaatattgcttcacatatggggtcatctggaagtcggacaccaacctgcctccttttcgcgtacctagtagatgatccatgccttatgcattgtttgggcaattccttggttgcaggtaaaataaaggtgtactgcacaggattaaataaacaggtcatttgtgaagtactacaaaactatggccaagggtgaaaagaagatatgcttacaggcccaggtattacacgcttgacagcacgaaatatgttagcttgcccttggttagtgcctcgaggaaatccggttgtgtaggtatcaatgtctcgtagcgagcggcacaagatgctgagaggctgcacaattcagaactggtataaatacacagaatctacaagtaggaggaactgctcccaggttgtgttttgcttgagaataatcatcaaactcgtacaaaaacattttttacgtctttgcatatcttgcctttgaatctccaatgcctttgatcctgaacaagataacaaatcacaaatccccgttagaactgaaatgcatgcttgcttctgttattcaacatactaacagatcaaaggctcagttgtacctgcgaaggcgctcgacagagtcattgttactgagatcacagacgatggagtagctggaaaaaatgatactataggtattatttatgttcccagtgcattatgcaaaacaataagagatggaaaattcaacagcacatttatgtatctaaatatggtcaaacaaaacgcacaacgaattaggaccaatgcaagctactactatcagtcttctataagttgattttgagtggaaatcaaggcttaaatcacaacatttgcagagaaactattcagagattgctgtgtctgcccattgacgagcatgtacttgaatgggcatgccatacttaatattgagtggaaatgaaaggcttaaatgacaacatttgcagataagttattcagatattgccggcgtctgcccattgccaagccaagcatacacttaaacgggtgcaccgtgggtatcaactatcaaccgcaattctgcaaagtcgcggaacgccacctcactaaactagacagtggcagactcctagacaagcaaagcaaccagacgaacacgcggtgagactgaaagcggtgggcgtacacggtgtcggtagggatgatgccgacggcgccgcggttgatgagttcgacgacgggctccagcttccacgcgtcctcgccggatggctccacctgcacccgcagcatcccggcatcccctctctacacacgcccccacccccaccaatcaccaccaccaccacaacacaagttcagcacactggagttagccgcgacggcgacgagcagcggatagagagagagagagagagagagtaccgtgaactggcgctgggaggcgtacttgagccgcttggggttgcgcttgtggagggcgacgacggcgaaggaggcgcggtggggaggaggcaccgcggggaggcggagctgcgaggaggaggaggaggaggcggcgcggcggaaggggaggcgcgaggaggacgcggcggcggcggcggcggtcgccgtggcggtggcggtggccatcggagagggtcggggttgggttgggttgtcgccgagtgggggaatccgccgcggtttatgccgttctcgtgatcgaatccacgggcggcgcgtgcgttgggccttgggccgcacaaggcttcactcagcccacgtatttttctcgtgggctctacggtgaagtccacgtattttaggaaggaatgaactatggaagaattttgtagaaagcttataggaattgtcagcatgaaaaaaattccaatggaaacctaattgtattttaggaattactgttcgagatgaacgtttcaaatctacaattttaaagaaaaaaattgcaaaaaaaaaacaccccaaatgtcatcccgagttgagtttaaggttatctccttgttgcatatactctttagaattcacattgatttgggattcctgctattgtttggtgttttttccctcttcatgcatactagtatgttgtattacctagcatattccttaatagaaatggccttaaacatatttatttcttagcaataccaatacttatattgaatctaacaaaaaaaacctaacaaatgtcgaaccctgcgaaacaaacgcaacaactcatctcttcgtcgcttcgatgtgtaagagtggagactcatgatcaccgtcgttcattgacgtgctgaacattatgacttttatgagtaggcatgcatctgcaacggcaatatcatcagccctgtctgatatgaatggcgaccacatctccttactcgtgagcgtatgtgggatttgcagctatgatgatgagctaagcatataggtaattgggtgaaaaagaagaaatagaaaaaacatagcatataaaaatgtacaacaaagaattacaaaagcacaggacaaccgttggaatgaccatttgattgggtcgcagaaaaaacattgaaatttgaggagagataaagaattaaaaaaaaatcttttcatgagattatacctcatgttaaatttcctctaaaatttgtatggaaagatacattccgaatttttatagggttcgtctctctttgattcaaaggactactagtctatcaaacaaaaaggcaaaggccctcttcgtttttgaattaaaatggcatatttttcaaactgctaaacggtatatttcgtgcgaaaactttctatatgaaagttattctaaaatataagattaatctatttttcaagtttgtaataattaaaactcaattaatcacatgttattaccatatcattttacgtgaaacacttaatcttcatcttcaggagattcaaacatcaccaaactctacctacgagttcgtagttaggattaaattttttttgggatggatagggtatgtaggaaaatttcatatagaaatgaaatcctctaaaattcatatgaatttcatttgaataaaggagcccgaattaggagagaacatttgtaacaaacggtcatataagagaaaataaactcagggttttttatgatttccccaaatttttgtaacgagattcgataaatttcgaaaaaaaatgtgtcgagccgcggctaggtgaaaattcgcatacatttcacattgccttacgaacacaaacaaaccctcccggcttgtttggcaacttgagagaagaggattgggaatttacacgagggaattgatggtgagattaagatgagaatttaattttttattacagtctcttgtttggtagaggtggtggaaattgatagggagtttagttgaagattagatcattaatgaaaacggatggctgagatttgtttagcgaagtaaatgagaaattccctcccaattacctgcccctacccagatattgaaaaagagggagttcatttctcaattccccatctctatcaaaaaaaatcctatatcctataaccaaacaaaatggttaatatagcatcatcctctgaaactcccaatccctcgtaaaaccccctccaaccgtcccaaaaccacaccaaaccacgccacgcccccctcctccgactctccggccaccgcccgccgccggccgccctagccggcgcaaatgccggagccgcaggccatcctcccgctccgcgcgctcccgccggacgcgccgctcccgcccccgctcccggcgccgttccactccccgtccacccccgccgccgccaccgccaccgccaccgccacgcccgccaccgccacagccacgccggccacgccccccaacccgcccgctccccccgccgcgccgccgcccaccttctcctcctcgcggcccccgcacccatgggagatcgccgcgcgcgcctggctcgagtccttccccgacggccgcccgcccaccgaggccgaggtcgacgcctacatcgacgtccaccgccccgagctcccctccctcccccgctcccagctccaccagcgcctcctcgccctccgcggcgaccaggtaacccccttctcctcgtgttacccacgggagattcgcacattgcttacgggattatcaggtgtatccatcgattttaagtcaaattggatcgattagcttgggcacttaaccataatggagattctggtagcgtctgggttgagcaattttttgtatcagtcaagtggagtctgtttgtgaatgttcagttgcttgattgctactagtcatggaacaggtctgtcaagtattaatgtatgttatcatgctagaaaggctgatggacttcagccctttgaaatggatctgttcagtgttgatatggctgatttgcctttctgaattgcagaatagctgaactgggacagattggaactgttagagctaattaaacatttgaactctttgcctctttggttaacgatgtttgtgagcttcctagggtttctatcatgtagaactgctgttcgccaggcctgttggatttagctgtttaccagatttttccaattgatcactgattcagactgacattttattttcacctatgcgtaggttttagatgcagaccaaagtgctttcccgtataggttccagcggactgatctttggaagcctgtgtacaagtggttggaatctcttgagctagagtcgctagttacatcaaaggagatatcggagtggcttacatcaaacccacagataatggacaggttggttgagaagcattcaaaatatcatttgatacactacacccagaggatgcacttgaagcttctgaagaagagggggaagataccgaaggtacataatttctgatccactttgatggggtagtgcaaaaaaatgttatattttcgctctatttcctaaaggtgttgctaagcaaaggataaaatatttatgattttttcataaaggcctatcaaaagttaattatattttctagtagttggtatcttcttattgctgaatgttctacccatatttagcacccgagtattcttccttttttcattttatctctgtttctattattattagcttacgatagcaattggaaagaacctatggcacaccgatatgcaatatagttatatggctgtaatgatacagtagtttccctaaagcaccaatttggcagttcagatgtatgtgtgtgtgtatttaaaagaaggaagttgataatgatgggtaagagttaagtgcagtcgataccgcacatgtaagattaaacattagtctgtaagtaggaaaaactgttccaatgttccatagagcatagcacaacttcacaaaccataacattatgcacctcaaagaaatagatatgtgcagtagtttgtgtctttggtgagggtggtggcagactggtggcttgagaatggtaattacagttagacactgggcctcaattagcgagattttatgtctattgtaccatatatttatatgctatttctacatacaaagatctggttatattgaggtgttgttatgtcactttggcggagcatttgtctatcatactaaggctgagttctttcccaaactttcccaattcacctccctcgttttccgcacgcacgcttttcaaactgctaaacggtgtgttttttgcaaaaattttctatacgaaagttgctttaaaaaatcatattattccactttttttaaaaaaaatagtaaataaattaatcataagaaaatgcgtcgctccgttttatgtgcgcccaacctcacctcccgaacacagcctaaagaatccagtctcctccaaaggagcacctattattattttacaatgaaggagcactaggtttttttttttcaattggattacttcagggctcaggcagttgcttttcaaggaattatttgaagtaattgtatctcatgtagcaatttgatgccagtttattgcatagactcatgcacactatattgcaatcatttttctattttcacaagtgtctcttttaaatatatcttgctacaccgttggttccttgcaaataattattttgtccttgctcttacaattcttgaattggcatctttgttgtcccttttctaagatgctaactttacattatttgcatttggtcaacagagtctacaactttctgcggctagagccacggtcccagcgagtgcttctccagttaccccacaagaaagcacaccaactgtgaggaaatctctacctccagtgacaggttatcctttcaatgattttgcatttgtttcttgaagtgacgttttctcatggtcttctaaataatacagcatcctatttgttttccaggtgttagtgcaagcagatttgtgggcggcgatgctcctataagggacaagaagatgtcactatccaaaaaaaaggaagctttccttaaatatgaactgtacgtcactcttagcttagctaaccctgggttatacctctgtttggtttttttaattgcttgcactaaaatattaatagtcgtgtttcagtttgacagacttgcagaatcagttgaccagtgtgttgttaaagaatcgccgcactgttgctattaaagaaacagattttcagaagccagagactaatgtaagtatgcaagaaggggctgctactgcaagcacatcaacccctacagaggtgacgaagatttattgcaacgaacagccaaaccaaggagcagcagacaatgaatttggccagaagagaaaaaggaaccctataattgtaacacctgcttggtgttatagtgaagctacaacaggtttgtcctttcgcttggtggaaagattaatcatctgttgttctatttgatacaagctgagaagtactacgtcctattggtccaacacattttctgtgaaagtttgatttgttattttgtgactatgctttcatatgtcctactggcatactgggatgcacctaggaattctggtgtgttgccattttcttttcacatgttcatccatggctacataaattgtattgaagctctgcattttcatcagctatatgattgcaatattttatatttgttgttaaaaaagaatctgtatcttcggtggtaacaggaactttgcagcaataacaaaaatatagtcaacatagaaatggtgcaacacgttacgatatgtggaaaggacatgttaatctgaaacagagagattgtattattcagcactcagcagttctctgttactttgaatctgtagttgtagtttccttatttttaatatcataattgatttttgttgattatttttattaggatggaattcacctgcggtccagtttgaaggtcctgctgtacatgtcgtgaaacaaagttacctatcttggtgtccgacttcatgtgcttatacgtcaagcgctccttctgctcagcctcatgacagggtatggatctcaaattaatttgcatggcactatgaagtccaaagagttgtcagctggcagtttgctctggtcttctttttggttatgcaatttcatttattcttttggtgtacatttacattgcattctccattatgcttttaagttttaattcaacacactattttctaatttttcttctagtatgcttccattggaaaaggtgaaaaaaacatactgtctacatctacatagcttggcaactttgacaggttgctatattgacatcatctggctggagttgtatgtatgtatgttgtgatgttgacaatattaacagtgctaaagttttatattggaaaatgcagaggtggggaaaattatttttgggttgtagtcttggatgcttccagaattgaaaaaacatttcaaaatgttgaatatccggtctacctttttcctatatctcattgaggccataaagaactcatatgcagctcacttagcatatttttgttggctctatacatgcattttcgtttaataccaaagcagaaagccaaaatctctttgcggaactaaattaacgtgattgatcgtctagctgtgcttgattatgataatttttttttaatctaacctatttatttgttttctattgtaatggctcagcaaggtgtacgcaaagttcttgatgtaaagtttcatccagaagggttgcctcagcttgtctcttgctctaatgaggttggtaatagaactgttcttggtgcattatctagtcaatattttctagcagagagcagaaatcttcgatccgaagaagaggcctggaaatgagtgtgatattctttctgcgtattttgatggttacctttgggacatcattacagtgtctccataattattggattgatttattcataaatcatagtgctattccattaattcaggcaccgaatgaattgttgcttttcaatcttctttctggaagagctactcaacttagaggccacaataccaaggtatgctgaatgagtaatttgtatatttactaaatattttctgggatactaaatccataaatacctttcctcctttttgcatttttgcttaaaaaatatatatgctatcctacctgtacctgggatagaaaaaactttatagagtttaagtccatgttcatggaaaatacaaatgatttgtttgtcaaatgttcaaccatgtctcttcaatccttacatcatgtctgtctgccctgcatatgtacttcagtaattaagtgaataatgatgtggtactactgcagcataagaaatttacagttacaataatcatgcacgtgcaacaaacatagctttcaattcacagaggctgattgtttgagagtttttttgtacttataggtttttatttgttgcttttgctatgctgattattttattttatttcctcagatccaggctaccgcatttgcggtgaaaggagcaagcatagtatcttgtggttctaatctattaaaggtaactcaagacttttattttctttcttcagttctaattgttgctgaaataattagcaggaaaacattatgttgattttttttttcatatatggactataggtatgggattgcattacagggtcttgcctctataccttaggtggtgacgatcacaattcagtgggacatactcaaaaaattaatgctatggctgttaataaatggcaatcctgtaagctaattcttttgtcagcctttctgtactgcatctagtagattcctacatctgttctgtttccgtatgacaggtgttagttttgaattgtgaactttctatgtgattgatctgataatacgtgggaaagaggcaaaaccttgacttaatgggttgtataggcca

SEQ ID NO: 4387 - DNA, 9716 bp, Oryza sativa
acgccttcctctgtgttaaccactaatagccatgcattatataattgaacacttaatgggtaactagagcacataatttttaagtaaacttcatggcaaaaaaatttgaatttcaataaaatgcattttttttctgtttaccaaacagagctttcattcagtatcaacacaaacagaggttgagcttaaacaacaactaaacaggtcgaacgtctaatatatgtaagcttataaacaagaagttgcatgtacctccatttagtacaataataacaagagtatgcttacgattactacatagtttcatgcaagattttctgaagaattattggaatgcattcatctgacagttaaaaatataagtctgtatgttgtagtgttactctgagtgatctctgttcatttccacaatacatcatggtgcaatatctctgaaccgagtgaaaggtaacattggagaacaggacaagcttttcggtgagagcaaagcacttgaattttagctgctgcagagggcaaatggctatctatctttggagacttcacctcctgctgtcttaattctgagaaacaacagcatgcatccgacaagaatcacattgtaattttgttgtaatgtacggcaatttgcagaaaaagaatggcagatagcatttctgaatcacacattcgtacaaaggctactctgggaattaacccccttttcttcattacttggggaatttcacagaattttgggggcaatgcataactcaagccacatggcatggaatgtctgccccccttgtcaacaattactggcttaaacaatccaggttgaataaagccaattaactaatgcttctaatcattggcacaaaatggcctcttagctagatgactggcatgtgtgggatttcaaagaagaaaaaaaaaagaaggaaatcccacactgcctcacagcacaagaaatttattctgtagcaatgcctgccatgttgaacaattccaggcatgctagactgctagtgctaggtgtgcagctctggagccaaaagaatgtccttccatgcctcatagaacatccaggtaatgccggaggtcggcatcaccttcagggagcttgcggcccatccgcggtaaagtcccttgatgccctcctcttggaacacctcagctaaggccgcgatcatgtggggcgggcatttcccttgcagggttccaaccataagccgcttcctcgccacttccagagggaagcttattgtacttgcagttagacctagaagatccaacatcaaaattgtgaaaagaggggtatactcaaatcaaatgctaaacttctcgtgaattatcccatttctcaggtttatcagaatttttgggaattaaattgttagctagtgaatttctaatcagcaggtgaagtggcactgaatgctaacctgaaagagctccaataatgagtagctcaggacggctcaaggacttctttttatgtgcacggcaataagaagtcttgatcgtctcatacatgaaatagtagcaggtgctataaggaagcatgccaactagtgttgggcagaggccagcatagagaccaccaataccatcagtttggtatatcttgttgaaggcaaggccgatacttggataagcctcacggttgacagtcaggcggtcctatgatagaacatcagagtatcagactgatgtacatggataaatggcttgccagcagaaagatataaaaaataatcagactcaagctacgtaaaactattttgaagtttgtcagtattttgcactactttgaacatagaactacaaaacctacagtttaattaaaaaggaaatatagcataaaacacatcatgaattccaattttcacagctggaaaagccaacagatagtttagaccattaatacgctgtagattatgaagtaccttaagaacctcaagaggatggcacactaaggtgctaactattccagcagccgcaccaccaacagcaattggagagagcaagtgaagtggtagctcaattttcaaattgccaatttgtatatttgggcacccatcttccttccatttctcttgtgcttctgtcatgctccttttgacacactcaaatgtgccaagctcaagtgcttgagttggaataatccgaagcatatttattgtattacctgcccagagtccttgccagccattttgttcgacgatctccacaaaactaccaaaaatgtgttttgatcctaccccaacaaccattcttgtcctgaaatcagacaccatgtaacataatgcataattcaacagcagtcgattgaaaatatttttttgtaaaacacacacacacacaaaaaaaatgaccactccttttttttattttgtgactaagcttaagcttatatgactatgagtactttgttagtaaatatccgttgttcataataaaagaaacaatcaagcaactactatattttgattctaacatttgaactaaatggtgcatacgactgttcaacaaagccgagaaacataatggtaaagaactgatctcaattatgtttataaggcataattctagaaatctcctcaagtgtaccaacaaaaaataagcaaagcaaaaaagaaaagcagctggtactccaagagcctacttaatcaccaagccaactaaaccatgtaatcagaaaagaagacaatgttacagaagtgagtaaatgaatgcagtgatggatgtaaagtgaatacctgatagtttctagaggagcaagaacagctttagtcatagcaccagctaatgccccactcacgaattctccaacttctctattcctcaggaaattctgcataagatatagtaatggttccaatgttaacaattaataacaacaccatgatttaaaacttacgaacaactttgggtagaatataaatcagtgaaagaactatttctggaagtgttaaccctgaatgcatccaaaaaaacacctacaagcgttttgatgtggtagagctgctatggagatgattgcaacgaacttttcatcacccactgcaaagctataaattcaatattttcccttttgaataggaaagaaagcggaagctatatgtccaattactgactgcacttgtttgtggatttctatgctataaacacctaaatggatctggaaggtacccgaggtattcaagtaattattttgtgttcggtcactacttcttgcctgtcatctgtatctaatccaaactacagcattaactttccaggacacatttccggtttgaaaatttgatcaaaattgtgagttcctaaactacagtgtgctgggtttgcctaattgtcagcacgaaagttcctccacagaggcaacatcactagtagtagggcaaatttgaattgttatttcacatgatccagtccaaattcggtgttggaaattggaaggagaaaaataagggataacaactaaaagaccactcttttctacacatggtagatttgagaagaccaagaaaaatctcaggtaccagatgacaaaattggtgtcttcgttgaaagaaacatctcatcctaccaaattctagaagactattctcaacccgatgaaaactaattgagttaatcagataacacacaaaaaaaagacttgccctactcacactaaaacagagctgatgatcgctgacagccagaagtttattgtcccacaatttccatatatatgaaatatataaaatactgtaaaactgtaaaagggttgttcaccgtgaataatgttttcggacagtttactcgtatttctatatgtggttgtcaagtatttggctcgacgtctatttctgaagaaatatctgcctacgatcaatacaaagaatactagtcagcagtcagcacgtgtcgtctactggcacatggcaatgggaaataggacgaacgcgttgaactaatcctaaataaatagtgccataataagtaacactagttcatcacttaactggataaacaagtagctaaagcaagctaaacaggggggcaaaaacgaggtcacagcttcctataacctgtacacttcagtacttcaccaaaacgagccaacagaaaccatttggaatgcgcctagatcaagaaaatactccaataagcatgaaagaaactttccgacaaaagcagatttttaacagtacattaactaataaaaattgcaacgtgtagctgagcctttatgtctttatcagaagtacacagatcaagattcaagagtacaccatcaacaaaattatccaaatagttaagcaattaaaaagttgaagtacttagacttgaaactggtacatcaaacagttaaaaagaagacttaaaatagagttgaaacgaataatgaaaatcaggagctgaaacttcaagaaagaaatatacggagtacttgacagcctgaaactgaagtactctgaacacagaaaagcatcaagccatcaacgaattagaactgttcgctagataaaacagctacagatcgaacatgaaaaaacccctccatgaatcagaacaaggtgtcccagttgcaaaatcctattccgacatcaacaatcaagcacagcaaatccagttttaaacaaaacaagcttgcaaatttgccgcccaaacagtctccaaaacgtccaatatcccactacccccagacgccaagatctgtgtccctccccttaccctgacggcggcgccgacgtccgggagcccgacggccacgtccccgacgaccttggcgacatcgaagtcgtcgtccttgggcaggcccacgactaacaagtcctccttgtacccgccgccggcgccggcgccgccgccgccagccacggcgccgacacggacgtccgcgaagccgatgctggcgagcgcgagcttcttgccgccgccgccgcgcgccaccccctcctcctccatgcccatggctactcgagaggaacgcaaatgcgcgaaaccgcagggggcaaaccgcaaaatggtggtggctcctctcctcgccgccgctcgtcgccgcttttggaggaaagggtggagaggagaggaaggaaggaaggaggaggatgctgacgtggcgaagcgcaagaatttttgtatagcggaatggagatcgaattcatactagtacgtatttatatactgtatttatcttgtatttttccctctttttctttcttgagtgaatattgctacgcgtgtttgtattgtgtgagatttttgcatgtttttgttgtgtttgttcatagtgggatgattcgaaatctcctgtattttttgggagtttctgacatcaatttgcacgtttgagaaatttgtgtggttgtatttttttttgtgtatttacaccaaggcttccttcttgaaactttcctgcattttggcattttggccgtttggaatggtggcctttttcttgagagagacctcgatgtcataaaaaaagtgttttttttcccttttcttttttttttgaaatgatttctcactcaccatgattgagagagaaaaaaataagggaaaaagcgagggctaaagtacaaaaaatgggtccttttcccgaggcgatgaccttttgggcccacaaattattattcccctgcaggatctagcttacacaggtgtgtgggcccaccacgcgtgctgggcccaccgtgatactggagtgataggcccatggacctatgttgtatgggccttacgtcagcacggcccagttgctggttttacctgcagatgcgagcagccgccggcggcggcggtcggagagcgagtggaggggaggatgctgtgccgccggcggcgcgtgggggcggcggtgcggtggctgtcgcggctggcgccgcccgcgccggcggaggcggacccggtggtggtccgcgtggacgggagcaacgtggcccgcctcgggaagcccaagcccggcccgaggccgcggcagctgctgtcgctgccgccgttcccgggcggcggggacggcgacccgctccccgggaggaaggcggcggcgccgcggcgggtgacggcggtcagctgggtgaagcactacctcgccgacgtgccgcaggaggtcgtgcaggcgcacttcaacaagaggctggtaaaatcgcacatggccttcaaactaatttttgacaaactctttgatgcaaagattgcaatctgttttcttcctagttagtgagacatattagaggaaaagattcatgttgttctcttgcttgaaatgctcttcgggagtgtggactctactactctagtggcgaaatgttgcttggttagtgctcatgtttaagtttttctgtgtttctgcccttgcaagaaaatagtatcatgatcttaatatgtcttattatgtatgattagtcacttttatttttctttaagttcacaattttccctcttgcaatcttttctctcagtttgatgtcatatgcagttggcactatatttagggattccttttttgtgtatgaagtgaaactatttgttccccgtttaccaggtttattccgagtgctcagatcatgaggtttcagttgagactattaagagccagaagcatcatctcaagaaggtatacaatagagatttcgttcctaaaatctgtttgtattctattgttctgcggtttgaatgaagtaaatatgctcagcagtttgttgcagatcaagcataatgatgtgatggagcctggcatgagaattcaccttcctgtgtcagtggcagagggcgagattaagaagcggtatgagaccattccaactgccacattgcatcccaataaagatgagattgaatacttgagaaggcttgtcatacacaaggtaaatttatggttgtgtgatgtattttcattggatgagttgtagcctacataattcatgtagtatgtgcggataaattatgtaggtcttctacctttgtaccattctataccacaacttggacatacagtattatgatatgaattaattaatggctgtttacatattatggtgcttttaaagtatcataagagtgctgttcacagttttattatgtctgtcaattattgaaaaatgtcagcttgacacaatttgagcactctgtttaattacgcagcttggcatgattttagtgtttattttttggagcttactgattttaattttcataattcagagtcataattgtatgcaaaattttgaaattacaggattctgccatacttgtacttaacaagcccccaaaagtgcccatgaagggaaatttgccagtgcataacagcatggatgtgcttgcagcagcagctctgtcatatggaaatgaagaaggtccaaaattggtgagctcaagagtctcttcatcattggtcagcatgtataaccataagcttgcactgaagatttttctcgatggattttgcgttttgaccacaggttcatcgactggacagagaaagtagtggtttgctgttgttcgggagaacaaaagaaagctttactcgattgcattggcttttcactagcgtcaatttagcaaaaacgaattctcaggtaatgaggcaaaatcaattcattgtgcttgtggttaagcaatttttttcatctaaacaacttttatttgctctctgttgttatttgcatgttaattccttaaattgttgacaaatattataggtatggaatgctgcctgtgaagcatacatgcagaggtattgggcattggtgattgggacccctaaagaaagagaagggattatttctgcacctctttcaaaggtgttcccatttacttagtattactctcagtaatgaaccacctaagcatgtaaaagaaaaaagaactgtttcctctctaagtctgagttttttagcttccaatctttttcacttaactttccactatgcagtaatcttagcacttgtgctacgagtaaccatggattggtcaagtcatatgtgccaagttacatgcataataacatatatttttcataaacaggtacttcttgatgatgggaaagccgagcgtgtcattctggcacatccatctggcatagatggtgcacaagaagctgtaacagcatatcgggtgatgggaccaaccattcatgggtgctcatggattgagctacgcccattgacaggccgaaagcatcaggtaccctcaactcaatattatgttctaatgtatcaagataattaagataatatatgttttgatattattagtggcttagtgctactgaatgcctgagttatttcacatgtatacatatgaaatgatgtttctttactgaaagaatcaatctttccgttttgctcctctgcagctccgagtacattgtgcagaagctctaggcacacccattgtcggagactacaagtacgggtggtttgtgcaccaaaggtggaagcagaatccccaaccagactttgaaccgtttactggggagccatacaagctgaggcgcccagaaggcttggaaatccagaagggcagtgttctctctaaagtccctctgctgcacctgcattgccgggaaatggtcatccccaacatcgcgaaattcctgagcagcaatggagaatggcatgaaaatggtgctccatggtccaaggagaagcccaatctcctcaggttcatcgcaccgatgcctgcacatatgaaaattagctggaatatcatgtcctcatatctggtgtaagagcatctccatgtgccattgttggtaacatcaagtttcattccatgtagttttactgagaagcagctaggcttctagttcattattttctagattctatagctacatcttctcacagtctgggtgagaatctgttctgcactgcttcgggagcctaagattttaggatataagctgccgctgctagaagctcagctcccccgaatagtgccatagctgtttttttcaggaatgccagattgtagcatctgaaccattgcaaaagaaacagttggtgtgaatatagatcaattttctaagagtatacatcctaccaaagttttaaatctttgtttcttttttgtaagcatgatgtaattctgaacaataattactgtacgttgcagcattttactactaatgaaatgccactgctagtctgctactaatctgatgagtaattccattccagtatcagtagttccaaaagatttggtttttcctgtgctgcttcctcaggtagacgccgagcaacttgtaatacgtccaccgccgctcgccgccggtggcctcgagcaacacctcggagctcgcgtggaatccccccttgccgaacgcctcgaacacgacggcgtccgtggtcacgacgggctcgccggcgcccaaccgatcgaacgcgaagttgaggttgcgggcgaggcggcgctccaggtaggcgtcgacgaagcaaccgtgcgtgacgaggtccggcgcgacgccgtcgcggcgcatgtggtcggcggtgaggtggaggtcccagaacatgcacatcttggagaaggcgacggcgcggaggttgaaggtggtgaggtccggcgtgaacccggcggcgaccatgtccaggaacgcgcgctgcagcgactttatcttgaagttggcggcgaaggagaggaggtagaggttccagagcaggttgccgccagcacggtggccgaggccgacgtcggtgacgaactccccgagcttgtagtacttgcggtgggagatgtac

SEQ ID NO: 4388 - DNA, 25675 bp, Oryza sativa
tatgcagcttcctagaggcatgccacatgggcctttgcttgtgtgtctttgacaaggttgcttccactaatatgagggccactttactaattgtgatttgccagaagtttttttttgcttttcaggagtgaaattagaagtagagaagattctattatctaacactattttgctgtcatgcatcatatatgtgctaaggttgatttcgtactttaatgaaagcttcggaagaaatgtatactaacatagaaagttttcgtaatgattgttcttctaaactagacattgttgtaatttaatatgattgtgcatggttgacaacttgatattatcaaatatttaccttattaggaaaatcatttgcacattacttcccagtctcaaggaaggttttccttttaaggaaacaaccttgttagttgttacttttataaatcggtgccaataaaggcattggttatcccagtaaaagataattctggccatttagattggttatggtaacaagtacatggtggcatactggcatatcaaacttgtaaaactgaaacagtttatggaagatttcatattagagtaacttctaaatcgaaatgtcttatgaaggatttcatgtttagtaattacgttttgagtcaaaggttcacacctcgtcgtagtagaaagaccttttccctctcttgttcccagatctctgtctttgccattaagagttctaccaggcctgcacttttatagttaatataacatatatgcactaacttttgactctattaggtagcttttatacttacctgggattttgttcacaatgattctagcacgctctgcacgcttcaaatgcttatgtgctcctctgcttatcgaataccttctctcatcctgcataaaacattgtagttagctcaacatgatgtagtcttggaattttggtatggcaggaggcaagtacggcaccctgctgtattcttctagccatctctcttcatcacatgaagccatccatttttcaaccttgtccattatttctttacgacttgttgcctcctcttttactttgtatatatattcatccattgtctttagtagatcatcatggtccacatcccctgttcatatttttcgcaagtactgttattagtcaatgttgtagaaagttctttgtactttaagattataatgaaatctaattggcatcacacacctgacattatcacatccattattttgttcatctctgtctggtaaggcatatccatgtgtgacttcttgcaaatttcctttatctcggtttgctttatcatgaagagctctttcattttgcttgcctttagatggtctagtcgctgaacttcagattcgatctgtttcatgcaatagtggaatgaaactactatatgagctttagacagtatattcttcagtatttcattttttggtttgtttaccttctgaattgtctcgagtgtgaggcttcctgggcctagcatactgcttcctgaagtcattgaatatatcttaatttcaccatatggcctgcgctcttccatgttagtatccagaatattccataattttgtcaatgctttcccaaggctatggagctgcatgttaatgcctacattagtgtaatatacatggtactgtagcagggtcaggcagctcggcttcctggcctaatgcccatgacatttgtgcaaacattttatgttcctgcgaccgttcatcgtatgcttgtaaattgtattaattgtaaccctgaaattttggtgtatatctattatatattattaaaactgggtgcaaaggagcccccatgcctgctagttcgaagcaaatatagctgcgcaaacatgtgatacattttgctaattctaaatttctaattattacatcggttcggtgcattatagaagtatttgcagaaggataagaaatcaccttgtccattctctggttcttctcttctttaagttgctggaccatggtgttgagcttgttaagaatgtcatcactgatgttttttgtttgttgatcatttgcgccatctaacaagcttgtgtggacattagagaggatctttgagggatccatccccataatctttgcgtagttgtgaatgagaaccttgtactcttcaactttgcacaggcgatcactctggagtaaataaaattccaataggtaaatcagataacagggagcctgaattgctctatatttgactctagaagaattcttctgtgcttctggtaccttttctcttttaagcctttgcagttcactttggtgctcctcgagtttctttagtgacagatcttcttgattcactgtgatggcttcattctcagggcgtcctgctatttcagaggcaattctttgtatctcagtttgaacctctctgaactgcttcagtctggcttcttttctcatctgcatttcttgcagggctggtgtgatggaattcagctgctcctttagcgtacctgtcattttctcaggctgcataaagaaatttcaggtcaggttcttgctgttttcttcaatttgattatacagtatggtctttgagatgagaatgatactcggcctgggaatgatctttctccaagagaaagaagtaggttggtaaattctgcctcggattcagccaacgcttgatgcagttgaatccgagacatatttgcactatttacttttctcctataaacttcctggcattcctgctctatctcttgaagtattctctctctttcattttcttcttgcccaacttcatcccatatcatctgaaatcgtttggagtatgataagccaaataatcttcagctgtcatgctacaaaactagatgttttgagaaagaggaatgtgtgcaccttcagttcttgaagcaggtaggcacatgaggactctggcagtgctgcacagggagcttttccagtcatcttgagtgatcccatcttctggaaatcccaaggcgaagattgctgggagcaatttagttggatgcactacttggttaggggatgcattggagcgcagagatgtgtgtaagtagtgagtgtgtggcagaaaaagctgggaaacacgttggtgctgcgagtggctttagatgctggatttgcttgcaagacaagtagcacatacgtggttggtgtcaccgagctgaaacacaaagcctgaagctttgtgaagaagagtcttgacagttgctttgctttgttgcttctttatcttttcattattagcccctatagtttcaagaagttgagcaggtatggtcttttcacgcattgtcatatagtataatgtaatggaaatgttaaacaaaaagatgagggttctaagtcattgtgatggctgctcttcatcttcagcaaattgaattctggagacgtccatctgtgctagagcttgcaactgaagcctgcagacaaatgggtgctactttattggacgtgtggattgtactgagaacgaaaccctacttcgtgaccgcttaaggtaacagatcaattgcttactggtaggcaattaactgcaggttaagaaataagaaggtaattctcgtctgcatgtgccagttattatttatagccacaggatatcagcttaagttgtttacgggaatttcagcttaggagcaattcggcgtcttgtgcattcgctaagtctaatggcgtggctttcattctcgtgttggtctgtcacatcgcattatgggactaattaatataagatgtataacaatgtcttatcatcatatcgtcaaatagcattaaggtgaaatagcataaatcatgagaataatatgtcagttgtgggctgccccggctatttcagggtttgcaagttgggcagttgagattggacaccccaagatcgcgaaaagaatttgcgccagtataatttgttttatgattacctttagcaagctcttaagatgaacttttgctacctttaaccagcacatgttttggtgctgaaatggtagtggtttttgctacataatgttgacatggtagcgaacttaacaaataaaaacaaaaaggggtaattgtgttcttgtccctatttacaactgcaattgtgattttacccttgtatttttaactttgtgattttaccctcactattttgaactgaagctcaggtatgctcctgttccgttagcagggcttaatggtgttaactgacaggtaaaaggacatctatgcccttgcagatttggcttgtgaggactttgtgttttggctgtgtttcacgattacagtagaaaacggaggtatgaacttgccctgcatgcttaattattttaacaacgaaatccaactttgtaactacacaagaaatgcgattctccagcatatgtttaaaaaaaatcaagggatttattaattaagaaacactatggaccgaggtatgaattcaatgcctcaatgcctgacgtatgaacttgccctgcatgtttaatcattttaacaatcaagggatttatgaatatgcaaacaagaaacactactctcatctctttctttcaacaacagaatagctttgttggtcctgtccagtttaggaaccaaccaatagtccaaggcagtaagaaaaataaaaactaaagggggagtgacaaagaagaaaaagtaaaagacaataaaactcaaatgttcctctcctcctctccttgctgttcttctcctccttgtcaccatcatgcctcaggcgagctcctcgcggccatgctaatggaggcaaggcagcctagctagctacgcatatgcagcagtacgtatgtactcgatcatctgctgtgcagcggttcgggcactatagccgaggccgatgccgacgagcccagtgaccaccacggcggacggcgacgggctagctcagcttgacatcgccatttcgcgccggcccagcctgcttcaccccgcgctcctccgcgacgaccgcgcgctcctcgctctcgctagcccgcgtgtgccgccaccgctcgcgagggttaggaatcggggacggaggtcggaatggggtacggggatcgggaggagtcagcagtggcttaggttgaaatttttgggatagagatgtctttttacattttgcaagtcaatttcttattttcttaaactcatttaatctgagtccacctaacagacgttaaacaggggcaaacagaccattcaacatcaaaaagtgagggcaaaatcacaaagtttaaaaagtaagggtaaaatcacaattgcaaataaaagtaggggcaagaatacaattgccctaaacaaaaaagtttgtgagaacaccatatcatcctgctacattcctcctcccttcccatctccatctcctgtgcagctaagcctgctaatgggttggatgggaatgggtctaatggattggttttcaatttggcttcacttggtatgggtgtaaacgggttgagatagctaatggattggatcggcttgggtgagggatggatgtgggttggattggattggtttttggacataagttttggattcaatttgtaggttagtctttttttttctcccttatagttgactgtttggttccacatatagatggccaaataggctgcctggcccggcatggcccatgcacgactaggcctgggttgaggctagtcgggccagtatggcctgaccaacacccaggccaggctgggactgcccatgggctgcacccctggcccaacaagactcgggctatgccgggctggcccaaaggcacgatagcccatcgtgcttctctattaaataaggatttttttctccctcatctctttgggctatgtgggccgggccgtcaagcctcgggccatatggccatctatagttccacgtatctgtcaatgcctaggtgcttactctctctgtttcattaaaaaaaaacttctaaatttaaatctggacatagggggtgtgcttgcacatatggacttcatattattgtcatttcaaccaaaatcaccttggttttaagtgattcggagggtgtccggcgtaaatagttgtttctataatttattcatttatgggcattgtgtggactcagaaattcagattgccaatcttattagacatttgtgcccgagcagctaagcaattttattgcacaacatcaccatccatgaggaagagaaacacgatcgagccaagcgatcgaccactaccacacctgatcgaaatggttgaagaagaagaaaaaaaataaaacccaactcgatcgaccgaccgatcactctttctcagctgccagcattttgacgatgaggcatcaactcatgcatcctaataatgatcctttcccttgtttcattcatcaggaggcgagcgtggtggggaggcagctgtcgtgcacgcagctgagcacgtcgcggtaatccctctccacggtgaaggagtcatacaccttcccatcgctgctcttcttgtactcgaacagcagcgacgagtggttgaacgcggtgagcttgacgaacccgaagtcccggtccctgaaaacgctccacttggggatcgccgaggtgtagtccgagaggtggctcccgccgccgccggcgacgacgaagatggtgccgttcatggtgccggagtagcggcgcctctcgccggagacgcactggctctggtacatcgggcacgtccgctcgtagttgtggacgtggccgaagaaggcgacgtcgacgcggtggcgctgccacagccgctgcaggctctccctcccttcgggctcctcgaaggagccctggtcggcgtaccaccagttggaggagtagcccagcacgcggtgcgccgcgaagatgagccacggctggtgcttccggtccaccgtcgacaggcactgctcgatgaacttgtactggtcggtaccctccctccagtcgtgctccgagtccgcgatgcagaaccggaacatcccgtagtccaccttgtacctgtgtcgtgttcgtgtatgcaccgaccagttcgacccaaaaagcttaatccgatagagcatatgatagaaaaaaaagtttaaactgataaagcatgatcgataaacaatttacaccagccagttcaaccaaaaaaagtttaagccgatggagcgatgatcaatatacaatttacatatgtcgagaattttgtggtctactcatcatacgtaaaatcgcaatcagtttacacaaaagcttaaactaatgaagcgggattggataaacaatttatcagcctcatcttttcacttatgcttatacttattagccaaaatttaaatttccaactttaaatttgaagttgattttagggtttttttcattggagtttatttttcagtttttacttttagatcgctaagaacacgtatataaaagttatattcacaaattaattttcttttgtaaatataccatttgacttattcacaggcttttgtggcctcctcaaacgtgaaatgaaatatatagaagtgggctacgaaacgtaccagaagttggctcgattctcggccgggtagtagtacatggtctctgccggaacgccgcactcgccgccggagtccttgacgtcgaagaaccctccggtgttgggccagtccctctcatggttaccgctgcatcaatcgacacgaaaatgccaaatgaatatgaacaaatgcctgaacatttgttgagtttgtctgaacattgcacaataacagatactaaccttgcaatcatgtagggcttcttggcggtgatgggggcgacctgggcggtgaactggtcccactgggagatgtagccattggcgtacggaagatcaccgatgtggaagacaatgtcgtagttgtccagatcctcgaccagcctgtccgtcgtgttcagagatcctggctggtagttggcgaactcgtttgatccgtctctctccgcctgaaattgcatatattcagatcaatcaattacggtattattacactatatatataacagctgtgcaatttgtcaaaatgcatgtcacataagaatttattccgttttatatggaggagtagtaatttctgattgatctagaggcaaatgttgatgaacggtttctgaacattcttgcaggctttgctccttcgtcagaaacgaaaattttcaccttgcccatgtcgccgaagacgatgatgcgttgcagcgagttctggccagggaagggtggcgcccggaaagtgtattgcttgccccagacaattgatccgtcagaaagttcatgcccaatcttgtagtagtacctgaaatcacatcatacgtacatacataccacagttctgaatatacaattgttcatcatgatttcacataattaattaactcttgctgctgcactaatcaccttgcaatgatcaaagattattttataatagtacatacaaaggtttcttttccctggatagaatagaatataaaagcataaaaaatatgcacgctttcctagctcctaaatagtaatgtgatttttcatatactttctacatataattttttaaaagtattattgtaaatcattttccaattttataatagtaaattcattcatttgtatacttaaatcattcatctatttcagcattccatactattcagtcctaaagatcgaacatgccacttactctttgttgggccacaggtctctcaggaaagctgtgtggatgaacccggggtctctccacccaacagtgcgtgccggctcacctgaaaagcatacaagctcactcacctttacaaatttctttttgttgatcgtttatttttgtacggcttaaccaataattcgtagaaagaaatggagcggtgtggtacataatgtgattatttttattatttattgaaatttttagttttaaattttaaaaataaactatcataatacttatttctaaaatctaaataatttttaccatgtcatctcgtctggcatgccactcgtagcagacatgacagctttataatgttattgtccatggtagcatgatgaaataatattaccacaccagccgaaccgatatggcgaaataacgatatcatgttagctagaccggcatgacagtattgtttcatcacgctaatctagttggcgtggctaaaagattttagtttggaaataagttttgagagagtttttcttagaaaaattaaaaagtttcagagagagagagagagagagagaaaatctaaatatgcgtgcgtgcgtaccgcacatgctgccgcggttgaaggtgagcgtgccggcggcggtgcgggttggagcggcggcgccggcgacgaccatgccccactcgacgaacgggtacgcctcgctgatgtcgtagccgctggtccatgtgacggtcatctcgtcgtacgacttgccctgcgccagccgagggtacaccggcgccttggggttcttgaacgatatcgcctccgacaccgccaccagcttaggctgcacatcaacaacaacgccgtcgatttcatctcatttcatcagagttcttcattacatatattgcgattaattgcatcaagattgattaattagttgcagttttaattagtttctttcttaattgggttaatcgatcataatatcacgtacgttttccaggccgccggtgaacagggcgaaggagaagtcgtagcgctggttgatgagctggaaccggatgctgcccttgccccagtacacgtagttcgccgagtagtttgcgaattgatactgcatgcgcaaatcaattgattcgttaatcatccataaacatgttcatcatcagttcatatgtgcagcaaccacttgttaagattcaggttcagagaaattgcagttaatccacctttattggtgcagtgcagagcagcggctcatccgggtatctggaaggattagggcaagaacccgagctgcacaagtgacacagatttaacagtttaaactaatttcacgatcaaaatgtgtccactgatgagtgaaggaaactaatttcacgatcaaatgtgtccactgatgagtaaaaggaactactttcacgatcaaaatgtggaaatttgaaaggattttgttgtaattagtagtacatgaaatcggccggagagaagacagcaatccagtcgtcagcggaagggtttgcccagccgtatttcaccgtgacccactctgtgtcttctccctgaagaacatgtagtgcattcagtatgccaaattgattgatgttgatgcaaatttgaaactcctatacttttatcaaaatttcacatgtttaattaccacttcttatttaaacttatttattgttcatcgtcttctttttttcaagtaagctagctgttacggagtagaatattatcaccggtggctaggggcggaggcaggcctagggtagctaaggcttaagcccttgaactgcctccaaaaacttgcttaaattttgttaattcaccatatagtatttttttttgaaaaattaatacttcattagtcgagttctatatttttagtcttctataattttttgactccgtcgccggtgacagtctgtacagcagacaaaaactccgaagggcccaactcgaagaattcatgctctatactcttttctcactaagcaacaggttacagtaggtaaaaaaaagttccatgctaaatgctcgttaattaaagaaacaaagtcaaggtgcgccacctctggttagttcttgcgtgacagcatcaaattaaaatgatcaaattaagtgtctcctacttgcacacgctgaccttgatgcttcatgctaagatgccttaatttattttttgctaagtgctaagataaatcacagagaaaataaacagaagtaccaaaaaaaatttatagtaaaatttccatatctttatatttttactggtttaaaaatcaatactgaaaaataaactacgattgagaaaaaaaaaactctattttacggaataaaaaattaatgaaaacttcttcaactcaactttaagttttaagatttaaattttggttgtggcctataaaccaacaacaaattaaatgatgagagatacggttagccgtgatctgtactacagtatacaacatacaatctgccgttagctgtacatgctgacaataactttttttcttaagaaaaaaataaacttttttttgtgccctactaggataataaatactatttgaacggtaggggtttgcatttaaaatgcaaaaaacaacgtgcacccgaccgttcccccatcgcgtgaattaacacaccacgacgaaatctatgctgttctgcatttctgctccggtggtcactcgtgtcgtctacctggcgatggcgaatccaccaacagtcgcacaactcagatattttcacttcttggtcagctacttcagttagctaaacacaccacgcatgcatatgaaatggggatataatatataggagtagatcgatttggattaatcagcttaacataatctgcgtgatctgagtgcaagaatttcgccagattctctgctccccggatctatatatttcaattcaggtctcaaattaaaacattaatgatctctctctctctctctctctctaaccgaccatggcggcggcggcggtggcgggcgtgtacctggtcgccgagcaacgccggcgtggcgctgacgaacgcggagccgtggaggtcgacggtggccttgtggacggcgatcttcgacagcggctggaacccttccagcgacgacgacggccgcgacgcgctcgccgccgccagcagcatcgccaccgccattgccacgcctcctcctcctcctctcttcctactaaccatggctagctttctacagctagctaatgcaatctaactacctctcctgcttccccagaagctggaatggatggatgattcgccatggccatgaccgtgtggtgatcatcttatacacgcacggcaggaagcagcttcagtgacaggtggggcccactcgtatggacctgcacgtcagtgacacacgttcccccttgacatgtgtgcatgtcagaggagcccgttacacacagtggactacactaaattatactaagccgttgattttttaattaacgtttgaccactcatcttatttaatttttttatgcaaatataaaattacttatatcatacttaaagaatatttgatgataaatcaagtcataataaaataaattataattacataaattttttgaataagacgaaaggtcaaacgtttatcaaaaagtcaaaggtgtcgtgcattaaaatacggatgtagtacttattaatcgtcggcgtggagcacgttacctgcttaatttggacattgatcgtcacctcttttgggattatttgtatttggggtctcttcaatcgtctcaacttgtcaatttgtttaaggctgctgaacaaacgcagatccaaatatggcataggcaggatctaaagtgggggaataggaatgatatttaactcttgcagcttacttggagtatgatatatactccctccgtttcaaaatatttgacaccgttgactttttagcacatgtttgaccgttcgtctaattaaaaaaaattgtaaaatatgtaaaactatatgtgtacatgaaagtatatttaacaatgaatcaaatgatataaaaagaataaataattacttaatttttttttgaataagacgaatggtcaaacatgtactaaaaagtcaacggtgtcaaacattttgaaacggaaggagtagttattattttattatacatcatgtgtagttgttttttaattacatgatgcacactcacagaaacaataaaaagcactcacatcatcacgagtgggacactttaccatacacttaggagtcgtacctaataataaactcgtgaatcacgctaaattcttattattagtccaagtagtatgttggaaaccgtgtctaaatgcatgtttatatttgtggatgcagacagtaatatataagtcatcaaataatatatctcaaaagcttacatcactagtatgtgcaagatattaatgttttacatgtataattgtataaatgatattaattggtttgaacgactagaaacgtgttaccacattaatcttagaaaaaaaaaggttcgcaccatttgcttctggtgagtctaaattatttttttttgcggggagtctaaattataatatttagatttgattggtatggttgtatatggaatataatcataattatgggaaaataagtaagaattgtcccaagagtttaatataaatctaatcatgtttttaaaatttagcttcacacaaaattgtgtgagaaaattcactagtttatatacatttgtgattaataacatataatgataaaatatctgtattaacaagttaatccgggttgatatctgaactataaatgaaaaggaagaaaacaaggagaaacaactttgacttctttgttactcctatagtttagtggtactaaatattttttaaaataacccacacaagatagtgcgaagttttatactgatatagcaggaaataaattataagattataatagtaacttaaaaaaaccaaacacgccaccaccacgagttgatagctcctagctcacacaacctagacctacaaggaggtcacaaacgcccgggcaaacaccggaactacacaacaccaacccaaccatcgctaagcgtgatcgattgtcgctagatctaaaaggaggtcgcaaacgccccactaaacaccgaaaccactcaaaaaattgtaaacgatctttcgattatccttttgcagaggggttgagaagaggaagtaggtgagagagaagattatcaagtcgttcctcgtgcgtaggtataaaatagtttgattctcttaattattatactttatatatattatccttatgtgctgaactcctcaattattgcagcaaatacgactgatttgggtcacttcaggtttggggcgttttttttgacaaattggtccttgcagaaaacttatttcgaaactagtccctaccaaaaactatatccagaaataggccgtcggatcagcgccaaagcggttggcgctgaggttgttcttatctgcgccaacgggactggcgctgacatcgcgccagcgtggcgggcgaggcgcgatgtggcagggcctcagcgccaatgcacttggcgctgacaccttgcacaccctaaatagaccgatgtgcgacaatgaattaacggtgtcgctcgtggtgcaacggtaagtttctttcttgctatatctgaggactagggttcgaatcccaggtcagccatttttgtttttttttaaaatcatcaatctacgtgcgtacatattaatgatgatctccattttcgtttttgtcttcaaatcttcaatgtactttttttgtttaaattaatttttattaaaaagaaatatcacatttagtacaaatttaaaaagtagaagaatggattaaaaaaagtttagagacaacttttaaaagaaatatcacttttttataaaaaagaaattagaagaatggatttaaaaaaacttgagttttttttttaaaaaataaacaacaagttgagaactaagggtaagttttattctaaaatgtcacgtgtttttttaaaattaaaacaacacttgagcttgtaaaagaaatatcacttttttaaaaaatatttaaaaggaataacacatttagtacatatttaaaaataaaagaatggacttaaaaatacctgagctttgaaaaagttaaaaccgcaagttgagaactaagtaaaaaaaaagtttagtaaaaacataaaggagagggttcgaaccctggtcactgtaacgccaccgttcaaatacctaccactgagctaagccaaacctaattgttgcttttgcttttgcttttatttagccagtataaaggccagcgccgctgtagaacatatattctgatatttatatttatatatatttaaaaaacagagagcatcattaatcatttatatgtactaatgtacgcacgtagattgaagatttgaagaaaaaaaaagaacaaacaaggctgccgtgatagggagtcgaaccatggtgctagggtacacaagcaaatggtcataccattgtaccacaagtgcattgcttattaatggccgcgcatccttttaattagcctgtacaaggggtcagcgccaaatacattggcgctgaggccctgccacgtcgcgtctcgcccgccacgctggcgcgatgtcagcgccagtcccattggcgctgatatgaacaacctcagcgccaaagaggttggcgctgagccgacggcctatttctagatatagtttttggtatggactagtttcgaaataagttttctataaggaccaatttgtcaaaaaaacggaggtttgggcgctcttttttgtgtagtttaattaatcgaaggtacagatcacgcctgcctttgttggtagtacaggcctatttagttcgcgaaataaaatttttttaagtgtcgcatcaatgtttgatcggatgtcggaaggagttttcggatacgaataaaaaactaatttcataacttgcctgaaaactgcgagacgaatcttttgagtctaagtaatctgtcattagcacatgtgggttactgtagcacttgtggctaatcatggactaattaggctcaaaagattcgtctcgtgatttcctccctaactgtgcaattagtttttttaatctatatttaatgctccatgcatgtgtcgaaagattcgatgtgatgtatttgggaaaaaaatttgggaactaaatcaggcctgcctccgtccgaaaataagtgcagtcgtgagtatctgtgtccaacgtttcactatccgtcttatttaataaaagtatgataaaattaaaaaaatcagtcacacataaaatattgttcatgcttttttatctaataaaaatattaatcataattttttttaaataaaacgaatagttaaatgttggatatgaattgaatagtgcaaaactgtagtacttatttggagggagggcgtactgctttatgcttcttgctagctcttgtcgttgttaaatgatgagagatacggttagctgatctgtactacatatacagcatacaatctgccgtacatgctgacaataactttttttcttaagaaaaaaaaagaaactattttttgtgcactactaggataataaatactatttgaacggtaagggtttaatttgttgcatttaaaatgcgaaacgacgtgccccatcgcgtgaattaacataccacgacgaaatctatgctgttatgcattctgctccgctaaaaaatgttcggtggtcattcgtcgtctacctggcgaaggcgaatcaaccaacagtcgcacaattcagatattattttcacttcttggtagtacttcagttagttgatttggattaatcagcttaatatagtctgtgtgctgtgagtgcaagaatttcgccagattctttgctccccggatcttcaggtctccaattaaaacaagtattttttcatgatctctctctgaaaccgaccatggcggcggcggcggtggcgggcgtgtacctggtcgccgagcaacgccggcgtggcgctgacgaacgcggagccgtggaggtcgacggtggccttgtggacggcgatcttcgacagcggctggaacccttccaacgacgacggctgcgacgcgctcgccgccgccgccgccgccgccagcagcatcgccaccgccattgccacggctcctcctcctctcttcctactacccatgggctagctttctacagctagctaatgcaatctaaccacctcgcctgcgtccccaagaagcaggaatggatggatgattcgccatggccatggccggagtgatcatcttatacacgcactgtaggaagcagcacaggtggggcccactcctgtggacccgcacgtcagtgtcacacgtcccccctcaacatatgtgcatgtcaggggagcacgttacacaccgtggactacacggtgagtttgaagaggtgattgagaagatacgtaaaacgagattaaccattagcgtatgattaattgagtactaactattttaaaaatggattaatatgattttttaaagcaactttcctataaaaattattttttacaaaaaacgtaccgtttagtagtttgggaagcgtgcatgcgaaaaacgaggtgttttctgacattggatacaggtatacacatttaaagtattaaacgtagactaataacaaaataaattatagattccgtatgtaaactgttatacgaatttattaagtataattaatccatcattagtaaatgtttacttagcaccacattatcaaatcatggcacaattaggcttaaaaaattcgtctcgcaatttacatataatctgtgtaattagtttttttatctatatttaatactccatgtatgtatccaaatatttgatgtgataggatgaaaagtttttgcgtgggaactaagcatgacctaaatctttataccgatttcaggattataattctagcatgttattgggccacgtggcaacctgataatttagctgaacaactccaaatatttttcacgtgtcaattatgtcgtgtcaataagatatctaccagaatctctcttagaaagctcctgtgatttgagagctccgggccaattgtcgaatggttaaccccggcacatgggattcacaaatttggttccctcttgcaagaggcagctgggtcatgccatacacgttgagtagggaggtgacgacccaatccgatagtatctgaaacggatggttgggctataaccttcctaagaaatacaagttctaagtaaaagatctaatctctgttttataacatgtagaagtagatttgttgtatcaacacatgaaaattatatcatttaattttaaaacaaaaaaaatgtacagatggatagcaaaccaaggatccatttctaaaataaaaaaaacataagaagatttaagcaccacatcggttatattaaagggtaatttaaaaccatgccattataattttgcaacctgcccccaattgtacctcccacaacgattttggagtcgcgtgttcgatcgccgtgctatccacgtcgccccgcgcgctggaaggcggaggggtttttcgagctggcaattttcaaaaaagaccttggttttatatataatttataataggtccctcactatatgtttctatgttctgtattcttatgtaaaagccctccacaacctactatatcttatacgaagaaggaaaaaatgggaaaatagggctgcgctctgataaacgaaaagtgaggggtttttctgaaaaaaagaaaatccctacccaccccaccccacccgaagccctagctgccactgttccctacctttcccctctccttctctcgctctctcctctttccttgcgacgggcgacagccgccgcccggtctttccctccacctggcttgcttctcctcgtcggcgatgatctctcccacaccacaacacgccatcctctgcttcctgctgtctcatcgcccctctcccactccgtcgcagcgtcgctgccccgacccgaggatgcaccaccttcagatctggcggtggctagggtttggcttggagtggtggcttgcagcaggccggacgcgggtgcgcagcggcggtgcagcagctggcgcagtcgcagcatgcgcaaggcagcaggtcgccggtgcggacgcgcggaggcagcgtcgacgcgcagcgtgcgggcgcagcagcagctagcaacagcccagtgcacgggcgcatggtcgcgtcctggtctgctactgctactctactcaagtgctcacatgctatttctaatcagctaatggcactaataagtgagtattccctatttctctgtagcatttaggtagactctggactctaatctatttatcttttgaatgagaaacagagccttctatttaatagttttttatttactgataaacttgcaagagagaagaaaacaacattgtttaactactttacaaacccaattgatgagagcacaaaccaaccaacaagattcgaatagattttgatcctaatgaaattcttttcagcacgatgaatgacaatggaggatatgttggtggatgcagttacatttgtttctttggtttaagatttgtttccgttgatttgtcactaatttgctactttgcatatatagctggctgctcacttgacttttggctaaggcctaaaagaatgcactttgtgctggcaaagtactccttttttttttcttttctatcatgtgaacatttaatttgacttgtaagaggaaggggaaaagaagggagtaagaggcagtttggtctcagaagaatgcacttttttctttaccctgcctcttacggtttgtggctgcaatggctagcagtgtatctggttcaagaagtcttatcgacgttgttccattcttctgatgaccacactggatctggtcatttgttgcatgatagaggatccatcatggtgtattcatgtagtcattatctccatgctttccttcatgctcagtgaatggagactgaagactgaaaactggttggtgctcttgcaggtgagattgaagatataaaattggtcagggctctggtaagctttgtaatggagaaattttgcagctctagctgtttgtttcatagcttctcaaattgctgggaaaaggtagagatgaaaacatgatggctagagctacagtgtggaccaatgatggcacttggagctgggtaaggaccattgatgatactagaatttagagatgtgtttgcgcatgctatactctacatgttttatatttccattgccttttttttccttttcttttttcatttcttcttgaaggtattgggtcagagagagccaacttaggttttagtgtacctttatattggtaaagtcacttggttattcaatctaggtccagagttcggaatctgaactacaccttatcttggctgtataattaatgggccccggtgagtaaatcgttgagttctgtaccgtgactaaagcgatgcagagtataagaaattcagaataaaaaattcagaaattccagtcataaattcagaatcagaaattcctaacctcgagacatggtcaaaactaattaacaagttttaaggaatcagtgttgaggttgtgttctgctcttaatgtttgttttaatccatttttgcagtacctgcgtgactattccatattttctgctactggatagaggcctttgcagagtacctccgtcggtatggaagaaaatgtattgttaccgagttatacggagtatttgttattccattggatatacggagtacaacttatctgtgactgtgaccacatgtgcataagttggtttaaaactttaaatgggcttccctgaagacatcgtgaggagtgctctgaagattgtcgacggcgacgagaacatgattcttgaaaagctctgctctgtctgaggccctatggtcgatatgaactgtaaattaaatccccatttgtaataagacaacagtgcttgctaatgctcattttctgtcttttcagtgtgccctttatgacacctgtaaaacctattagcttgaggcacacattatttttgttacaagtataatggttatgcccatgaataaatggaaatggtgtgaattgaggttaacaatatgatggttccaagagctttttgtttgtgattctttagccagctgatagggcgcgcaacgcgcgcggtaatgtctagtgtagactcaagaggcctcccactgtgctagattaccagtcacaaatccatttttggcatcaaagagaacatcacgtgatttttatttccctcgaaattgtagcattacaataggatagttaattgaaccaacgaaaaatatttattggtaaaaaaagggctactcaacgaagaaaaaaaatcaaatgaccatataaaagaaattaaatcacaaatcaatatagaaaaaaatattttttatatataatttagacatatgatgttgtgctctatgagctttggcattatcaaatattggcgcggtagataactgaaccaactgaaaagatatgccgttaaaaaaatgctagtagaatatataatgaaaaaagaaaatcaaatgacaatacaaacgaaatttaatcacaaatcaatatcgaaatcaaaatataatgacagtcttttgcaatttgcacagatggttgtatgctctataagctgattcatgcctttgcatgttctcaaatttctgtcatgccctaaataatattgacaaaagcaattgatttataattatctactaagggttaaaaaaatatttaattttcttcggttacacgaacaggctaactaaagacgtgtcaaatggctcgccaattttctactagtagttatacttaatcgtcggcgtagagcacgttacctgcttaatttggacattgattgtcacctctttttgggattatttgtatttggggtctcttcagtcgtctcaacttgtcaatttgttatggctcctgaacaaacgcagatccatatgtggcataggcaggatctattaagtggggagtagctaggaatctatactttctataacgttataatccactaactctaaaacttaacatgcaaccatgccacatcatcacccactaacaataattacatattcaacctcatacaaacacgcaagagcatcaacaatctatttaattctacaaattaacatgcaagcatattcaatcaccacctctcacatcatttccacaacaattttatgaatctctctatcatttttataatattgaatatatacttatcaacgtgttatacattaaagtgtgaatttcatttgtttcatgataaatattgataagccctgagatttgattattttttctttttactcctagctgaattgtaacaaaaaataatattaaaaattacttagtaattcccacagcaaagcgcggggaatcccctagtaatatttaactcttagggcatgttcaatggtagatattaatatagtttcttaaacaatacaagattatttagagaccgtgtctttacaattgttgagacgacaaaggttctaaccattaactcaaaaaatatttctcttgttaacattctttccatttttcttaccctcatgcaaccatattccatattatagtgattaagagtcgttgttaagctgttgttatgcataacgacgatattttatctctcctttttctctttcttccatgtcaacaagtattcctaattagcaatgctaagacaccactattgacaaccattgtacctggattcgccatcgccaggtagacgacgagtgaccaccggaccttttttttaagcaacgcggaatgcagaacattatatactccctccatcccaaaatataagcatttttggatttgacacagtcttcgagatgctactttgaccaacaatatctataaaactaagatgtaaataaaaagagctacatattatgatagtttgcttaatgataaatctagtaacattaatttaacatgattgatttttttcattttttattactccatctattccaaaatatagggtacaactacttttaaaaggtgtttcataatataaggcatacatgcatgcatgacaattaatagcacttcctctctcctaaattattatttttttaaatcctaaactcacaaaatgtttaaagagtaaattgcgtcgtggtacatgaacttgtgtggtgggtgcaaataggtacatcaacttataaattgttcatcctaatgtagtaacttgactagtccgtgcaaattgggccaaaattgtcaatgcaaaccaaatcgttgtaaaacatcacaaacagatggcataacagcttacatgtatgacatgttttggatatcttatttagaatgcaaagaaaaagataaattttatttttgatgcatagaatagaatttatttcatgtcttggaaaaaattatcctctgtataactcgtataatgtcgggaccatgaaaatttcgtccatgcgttagcctcctagaaaatttattttatttttcattgtcagacactccatttcaccgaaaacttattttaaaagtttatttccatggttggacactgataattatttcactttcatcaatctaaatattaaaaatatcaagtgaatagtgattacacattttatcattccaaattttgatgtgtaataaaatttactcgtcaatatgtaccatattagattaattttgcttgcagagatcgttttggcccaggttcgcacggacttggcaagttgttgtatcgaaatgagcaatttgtaaattgttgtacttatttacacccaccacgcaagtttatataccatgagcgcaatttactcatgtttaattttagggtttgttggaaccatgccaccctaattttgtaaaatttaagatatgccacacgtatttcaatgacacgtaggacccacatgagtcaatgacatgtgggtcagggtggcatatcacaaattttacaaaatttgtgtggcatggttcaaattttcccttaattttattgggtgcatgtattgtgttagttgagatgattaaaacacagaggtgataataattgtttcttagtctttgaatcaagggtggttgtgccttatattttaaaatggagggagtattaatagtcaaatttaaaaatgtttgacttgatactatattaaaaatacttagacagatgaagtagatttcgtcgtggtgtgttaatttacgggatgggggcacgatcgggtgcccgtcgttttgcactttaaatgcaacaacccctacagttcaaatactagtagtccacaaaggccctgattagattccaacttttccgtcacatcgaattttcctacacacacaaactttcaactttttcgtcacatagttctaatttcatcaaacttctaattttggcgtgaaactaaacacagcaaaaaaaaaaaagaagtttcttcttttttttaagaaaaaagttcttgtcagcatgtacggcagatcgtatgtgttggatctgtaggacagatcacggttaactgtatctctcatcatttgttgtgttggcttatactactccctacgccccggcccataacgtatgaagacgtcgtctacatcacagaaacaatcataagtactcacatcatcacgagtgggacactttaccatacacttagaagtcgtacctaataataaactcgtgaaccacgctaaatttttattaaaaacatacactcataatcagggccggctctgactttttggtggcctagtgcggaaaaaaaatgaaggccccattcaccataaaaatacaagataatatttaaaaactcattgttattaacgaatttcacactaataagtttaaaataccaaaaagaaatatctctagatcatttaaaacatttttttctaacagttctagatgcaaaatcagtaatgatactgttaataacaatctcatctagtagcatcttctcaatgcagaaaatagcatatcagacttggtaacatagtatacatattttggaggcccctaatttttggaggcccagtgtggtcgtaccgcccgcactgcctcagggccggccctgctcataatcattttatatgtatgtccttcattcataaatataaatatttttaaaataatgtcaagttaaacatttttagtcttaactaccaatggcaaaaagatcataaaggttgacaatataagaatgatattattagatttattgtgaaataaattattatcatatgcaacttttctatttaaaataatttatctttataaacattattagtcaaagtagtatattagaaaccgtgtctaaatgcatgtttatatttgtggatgcagacagtaatatatatatataagtcatcaaataatctcaaaagcttacatcactagctagtatatgcaagatattatgtgttacatgtataattgtataaatgacattaattgatttgaacgactagaaacctgttaccacattaatcgtagataaaaaaagttcacaccatttgcttctggtgagtctaaattataatatttagatttgattgatatggttgtatatggaatataatcataactatgggaaaataagtaagaattgtcccaagagtttaatataaaactaatcatgtttataaatttagcttcacacaaaattgtgcgagacagttcactagtttatatacattagtgattaataacatacaatgataaaatgtatgtattaacaaggagagaatcccttatataccactgaaaattagtctgatcccttatatgccattgaaaattggctcttcccttatatgccattgatccaaatttgcacaccctctcatgtcactcccgtcagttgaccgtgtgttgaccgttaattcttaaggaaaaaagacgtatttacccttctaagtatagggcatgcctaacaactcagagagggcaaatatatctttttttgatgaactactgta

SEQ ID NO: 4389 - DNA, 12378 bp, Oryza sativa
  unsure (1)..(12378): unsure at all n locations
ccacttgtgcaaaccattggcttttatgtattgccaatgcatgaaaaaaaaggagaaattgccaatcttttgagctgtcaaaagccggctggcccccctttgattttaggattttgctaaatatttgtcatcaaatttctccccctaatatttgtcagatgaaattacagtacaatcgtagtgtaattacactgtaacttgcatgtaattacactgtaactataatgtaacttgtatgtaactttcaagaatctctcggtaacatgttatttcagtaaaatagaggtcgtgggaacaaattctttcatatatgtgtgtgatgtgatttttttcttcctccatagaacaaatcttgtaatagatctaacgattcaaaattacgtgaaacttacatacaagttacactgtagttacatgcaagttacagtgtaattacatacaagttacattgtaattacactacgattgtactataattacatctgtcaaatttttagtagaaaatttgtcgacaaatgtataggtggtcccttgattttatgtctagctccgccactggcgtgagcggctaccgagaaatttgataatttaacatttttccgtcgtccactagctttaatcgatacttttgaggctggcatgtaagaccaccgaaatgaatgaaagtgtgtctaagtcactcaattcagcccaacccaatacacccaattcaaacttgagaattggacttgacatgattgtgctttgtgatgtaatgttgaaatttgaaatttgagaattggatttgacatagtttaaagcttagtttgagacttgtatttcgataaatttttgttaccgtatcagcaccggtccgtttttggtttcgacaatatttgattccgttttcgtatctggggtttccgattccgattccgtaaaaaatatgaaaacgaaaagataaaggtagtttccatccgatttcgtatcattttcatccctagtacggagcagttacaacagcagactataagccagctataaatacatttcgagaagataaaagagaagagagaaaagcaatagactacatatttgtagccagttgcagcacagactacaagatacatgtgtgtatgacaagtgggaccagttattaattgtgtatttgttaacgaaaaaatcgaacacactggcctgggagatctgcttagctccagtgcaggtccaaatataatgagatgcgggcgtgccagtcagtttgatcctgcaactgacaagatatgtaaacagtagataaaacagcctatcggctgacaagccgatggagtagttccagccgatagccgataatagccgatagcgatagggtttaagcaatcggctatatgtccaatgtagataatgatataaaggcaatcagatgatgatgatgatgtaataaaataacaatataatccagtataaaccaatcggctagcattgatatgatagaataagcatcgatccaaaggttaaagcacacatcggctggaggtccgatgtcatgaaatccacaagattagattaaacagtgaaacctttgttgtcatcggctaaatctaacttatatgtatatgcaatccttatgagctgatgcaacgtccagataactcaccggctgaaaccccgatgaaacccttattgacaatcaagaagcaagctagagattatggttctaagcacgacttagtagatcaaacttaactgatgcagcactaagtatgaaaagaaacataatatctagacaatcaagccgttgactgagttttcagggtggtagatgtctaagctaatctaatctagcaacgcaatttagccgataccagcagaaaccctaaaacgagaagcagccgatagagctaaattgatatgctaagactagattaacagagacatatgataaataggtaggcaaatatattatccaaagcagagtaatccaagaggtcgaatgtactgatgtagccttgaacgacgccgacgtagatgatacaattgcttggaccgatggaacattggacttatcccttcgccggagatcgaagacgatgcagcctcgcgtcgggtgccaagtcccgccggacgataaaataaagtagaaaaggtaaaaggtggcgatgtgcggaattgtattgatcgtgaagaagattacatagatcccaggtgtacatatttatacccatgggttgatacaagtccttgtcggacaagaaataaactttcctaaagataaaaggaaaagataaagtccttataggacactaaacacactttactaaagataaaaggaaactaacaaactattcctaattaatagataacttgccatgccacattctctttgaactcggtttcttctagataagcttcctttagtagatcaatttccttaaccgaatatagtaagaatccgacaattgacgacttgacaactctcatcggctaatctcaagacttcgaagccgatgctgactctaagccgatgactactccgggcttaccaaatttcactgttaacagtattatatgtttagggttaattggattcatgccatattataaatttgactgttttaaaaaataccattataattcgtctaattggaacgatgtcattaaaactcttctaaaatcagattcatgctatcctatacacttgataagctatttgaatccttttttaactaacatattttcgtatggaccaaattgcccatttcttcttccttcatctcttctcctctctctcctgttcatccttcccatctgttagatcctatcgatctcatcttaatttctttttcccttactttgggcctcatctctaactgaccaacaacaacaagaaacaagccccccgacccccccccccccctctcctctttcggtgagcaagtagcaacagcagcaagggagcaagcggcggcggtgacgtaagcagcagcaggggagcaagcggcggcgagcaaacacgacgggtctccggcgccggtttctggtactcacctcgctcggccgaagttcgccgctacattgagttgagctcggtgctgcagtgggagggcagctcgtgtggtggtcgtcgccggcgagctattgaccattccatgccgggtgggcagctcgtgtggtgggcatgtgtaatttttttctaatgtatatttagccaaaaactaccacaaccaaaattttggggaagcagaggtggtgtagtggtggagttgtgacttgtgagtgcatgacttcacccacaaggattaaattttggtgtccaccaatattacgcacatgcgagtagaccttcaatattactttggtgagatcaaggatgtaccattggtttccgtctcttagagcatgtgttaggcgacgcgttcgtaagatgtgaggtgtggtgttgcgagtgtagtggtttatgtgcgcgtctgccatataatcttaaaacactaccataattttaaatctggtttaaaaatttaagctgaaatcaacgaagtatttgaaattctcgaaagtccagacacactatcaaactattgttacactgcacgaactttgtagtgatgtcatataaaaatggttagcggtactacgaatatatattgacaaaatgttcagtcgaaaaaaatagaagaccatttaacatttatggtccaaaatagatcacagaccgctacactcaagcacaagacaacaatccataattctcccagtatatgtaccatgaggtcataaattaatcaatattctcaacttcgaaaactatgaatcggcagcttgtgttctcaactacatctcttcatttttcgcacgcatatatttctcagactactaaatggtatgtttgatgaaaaaaaattctacgaaagttgctttaaaagtttatattaatatatttttcagaaaaaaaatactaatacttaattaatcacgtgctaataaatcaccttgttttacgtgtttgacctaccgaacacagccttaaaacaaaagcaaaccaaacggatttacctcacattaatccctggaatttctatttctaatttaaatccagccaccacatcgatccgcactaactgtctcatctctcaatcacagctcgtatttcatccatgagggaagggaaatcctgcaacaatcgaaggtacccctgcgtcgtcgccgccttcctgaagtgttcgtcctcgcgcgcgaggtagtcgaggcacttcttcttcagctccgggcagccgtacgtctcggcgcagacgatgatcccggcgacgttctccggcgtgacgttgtcgagcagcttcttggtggacagcagcttcagcccgccgagctcgtaccgctccgccgcggcgagcaggtgctggaacatgtccaccggggagaatccggcgagctcgtcgatgtcgtcgggcagcgcgtccgtgtagatgaagtggagcaccgcgcggaacgccgccgggtccatgtcccggagcgcgaccgacggcgcggtggcctccgccatggagccgaagagggcggccttgaagaccggcgagcgcgcggcgagcacggcgcggtgcgcgcggaacgtctcgccgccgacgacgagcgcgacgtccgcggtgtcgtcggcggcgccgtagagcaggcggccgatgtgcccgcctcctccaccggacgacggaggcggcggcggcggcggggacagcgcctgtgggctgtcgctcgggatcaggacgccgcagacgacggtgacccagccgtcgccggacacgaacttcttctcgagctcgctccgcgacgcgaagtacatccacccggcggcggccttgccgccgccgcggccgccggcgccgagagggtagacggcgacgaagctcttggcgtggaccggggacgggtggccgtcgaggtggacgaggaacgcggcgaagatggccctgacattggtggaccgggtgacgaggtcgagcttgatggagaggtactcgccgccgatccgctggccattgctgttcatcgcgccgccgccgcgagggtagcagaggacacgccacgtgtggccgccggcgtagatgtcgtcggagcggacgaagtcgccggcggcgaggtcctcgtaccggagcttcagctcgatgaagccgccgtccaacatggcgatcgaatcgtgtttcgtgctagatggaacgcgattaacgagaagaggataacgatggtttacgtcattttaaaccatgtcattttttaaaagttaccaaatatttacatacatttttttccaaattttgataaatacataagaaattctacaatattgtcaacttaacaaaatttggtaaggtttattttagctataatatggacaacgcttaaatctaaaaaaaaaaaaccctgcttattctgttgcgtatgttgcctcttcagcatccgtgggcttcttggccttctcccataaattttacaaatattttgacagaaatttgttaaagaaacaaatgtctggcagaaatagttttttctttcaaatttgccatacgtttatcaataaattttattaaaaaattgataaatgtaaaaaaatgtagagtaaatatattgtaacttatatatctacactaaaatataagtttaccaaacattgtttaagtttttcataccttatactccgtattaggtaaatttgaccgagttcgcccccttttttatgtatagacgcacttgtggcaagatctcatttctcatggttcacatattatcaactgaaaaatcttatttcctagaggaatttcacagttgttaaaaaaatatctcaagatacctaaattaacttgaaatatttagtacttagatataccaaattttgaactagaaaatatctcatttcttatggatgataaaattatctcatttcttatggttcacatatcatatggctaatgtatggctcactttttgctagctataacttgaacaagtgtgataaatgatactactagcaaacttagagcaagtttaatagtatagccaactactagctccaattcatctatagccaatctaatagctcattcatacaatagttatatactacgctattaatacctggtcccacatgtcatacacaccctgcatcttggagtccgtgctacagctggctacaaatctgtagtctgcttctcttctctctccttatttatcttcttaaaatatgtttgcagctggcttatagcctgctattgtacccgctcttagaatactccctagcattcaaacagccccttcataccaaggcttgttctccgggacgccgatggggtagaaggtccccttgcatctggtgaaatgtcgcttgccatctgttgtggtcgccgaaaaactcgaggtgcccctgcacaagcatcatcttgcgaggggtacccgtgtttgcaatgccggtgttcataatttgatccggagagagatcttgtttaaatacaagtcgtatagcttagcaaggcgagagtctgataaacgttaaagagttcaggcctccagggcaagcataatacaccataatataatattaagacggtcatgcatgccaagaggcaagagcaatgtgtctgttaagagttagcaacgaaaagttaagttcaactgaatgtccgatgctttcctttcaagaaaatgttgaaatttctcacacgcatgaatggaatgaagcagatgcagatgagatgatgaaggttttccttcttccatcaggaaaatcagtctccgcttagatgacaattttgaacgaatacaaactctattctgtaaaggtccgacaactctaaggcctaagctttcacatactcacgaatgaactcctcaaccgctgaaacattaccggtcagaccagcaccttcagtaactgtcaccttgttctggcattggctgaaattaaatgcttctccagggttcccaagcttgacttcatcagtgatgtcagcagatgatatggcgttccttgattcccggagcttgtttctacacaacagtaaaatcagcacacaagtagtttaagttaaatgagttgctgattatagtgacctcggttatttcaagtatgtaaacatgtgtactctagagacttgtattgcagaataatttattgtatccactaaagctacatcataagttataggtggacgcattaaaattgtagaaatttaatataaacaccatcacaatctgatgcactatagttatactaatatgatatgttagaagaaaaaacatacaattccttttccaattgcttcttgatgaattcttttgagtgagctgtaactttatctgtcttgttgcagaatatcagaacaggaaccctcttcttcactacagttgcctttgtcaggatgtcatacaagtacctgcggaaagagaatattgtaagaccatagcaactgcaacaaaaggctgacacagcacacaatttattactccgtatttgtctcggcatgacaagacggaagctcctagtcacacttctaatctcattccagtaagagatggatttcaatttaagctaaaataaacaccacatatttttactaagaacaggatgtaagtcagcgaaattactctgcagcagcatgcatggtagacaagaaatcttgagcatcaacaacataaactattccagctgcttgaggcaggacttcatcaagtttgggtttgagccttgcatgaccaggaacgtcaacaacatgaacaggttttactttgcctctctgcagagcgaacaagaacatgcatcaatatattgtagtcagcaaatgcatggttctatataacaggatagtcttcctttcatttcatatcaagatgtttaaaatatttgtctctaagaagttgccttaccctctccagctcagaatgaagcacgaaagtatcgttgttttgttccattgaagtcacagttccttgatgtgttgatccatcccgaagctagagaaagggagaattagcacagaccacagagacaaaagatactcaactcaaattaacatgaaaagggaacagtggtgatgtatgatgttgcgattcaatatatcatggaaagaatacagacaggagcatattaagtcgaagcaaggtaagctgaagagatacccatagattacaacatcaaaatcagattgagtaggttatttaaaatggtcatttcctaagctactgaactgtacatgtatagaggttgaaacaatagaaagaaaaacgagttcagaattgaagaccattaaatgtttagccattattcatcaatttgatacaatttcatttctccgctttaatccatcaaaaataaaaaataactgtcactgaaggagtgagaaacacacataaaaaggaaccatatatgggcattgaatgattgaaacagaaaattacctggtagaagagaatagttttgccactaccactgagcccagatagcactatggtgtttgctttcgaggatttcaggcacgaaactgaaataaaacagaagccaggaattgcatattaattactgcacatgcagctccatcaaaataatgtagcaaaatgactactttagaagttccactttttggtgatggtggactcacttataccatactgaggaatttgtgtgtgcgcttgtgccacaaattaaacagatacacatatgcaattgatcagatggattgaaggcaaactaggtaatatgagttactcaaacattatcgcaacatgtaacagcgacaagggtacaaaaggtaagctcaggcttcagaatgtaaccttatttgagcttggcaacaatatactgtattatggctggctattgagctacgcgatcagatgcacaaactagttcattaattcgcaattatggctatgaaacaaactgctggattatggagttgcactggaaacaactctagccagttgctaaattctcgaagcctaagcaatttcagtatcacttgtgcccacgcttcctagctcttccataaaccagtactctcgtatgcaagatttgaagcaaccaaaaaaaaaaactaggcaggcttgaatagttgaattgatacatcacctgcgaccagcaacagaaccgtcacggcgaccaccgcgacggcgacgtaaacctgctcgggaggctgctgccggatccacctctcggcttgtcccacccacacctcggcctggcgaacccactcgtccatccctgcacgaaacgaggcgacggaggtgggggtgagcaagcggcgagcggagcgcgtgggctggaagaagacgatcagatctgaaggagcagcggagatgcgcgttacctcgctgcacgcggaagttcccagagcaggacgacggcgcaggcctgcgcgtgttacaccctccctctccgtacgccggcggcgagccggcgcgaaaccctaggatgctccgccgccgcggaggtggccggagtcggaggggagaaggcgggggttgggggggaagccgagcaggagaggaaagaatagaaggatgaggagaattttctagaggaacacgagattctcgagttaagcccaatatgcacgaaggagtacggcccagtatgggatttcggcccaattcctccggagaggtcgagatccatatattgggctggatttccttgggcctcaggatttaaatgggccctgattttatcactgcattgaaactattgttttttttttgtttttcatgcgaccgagttcaaattcaaatcgttacttagcgatgcttgtatcatttgtatccaccacaaccaataatcccaaacaccaaatgaaaaattcgtggtggctcccataatggtttccagttatgatatcatttgcaaaaaaaatactattaactccgttttttaatagatgacgctgttgactttttctcacatgtttgaccattcgtcttattcaaaaaatttatgtaattataatttattttgttatgagttattttatcactcatagtactttaagtgtgatttatatcttatacatttacataaaagaatttaataagncgnatggtcncacatgtnaganacagcnncccgcgtcatctattaaaaaacggaggtagtatatagctgagatcgcaaacttgcaacagatgaagagagaagaagaatgacagcatagattccatggaacagtgccaggtagctccaaccattgccatggaggtaggtgtcagggttacggataccacatacctaatattagttgactaaatctcgacaggatccaccacataccatgtcttatacggaaacaaccttcggatataagaggagtttcgcataaggaaggatgactagagttctacattgaaacgacaaggactactcggattgtatccatattgatttccctagttctacttggacaagaggacacctatgggtataaatataaggccccctaggaggagaagggacagacccaccatagaagatacggaacaacagaagccacaacatacaagccaacatacgccaagacaagacgccggatatcgacttcagagataggcatggctagtcccctacggtgcctacagataccgttaggagagatatagagttgtctctaatctcgccggatacggattcgaggaggaaggctaccctgttgtcgactacgagccagtactacataccgccaagtcgacaacagttagataggctaccccaaatattgtactagtttgattatggtgaataagagcgataccggcttcggccaacaggatgtagggttattacctgacaattcaggggcccgaacctgtataaaaatccctatctccatctcttttacctcaatctcgcatataccctagtaccaatgatccccatgctatgcaaataccggaatcgcgacatcaaacatcgacagtagggctatcaaaaaagctcgaagctcgcaagctgctcgagcttgattcgttacaggcttgattcaagctcggctcgaatactagacaagtcaagctcaagcctaggttgaggctcgcaagcctagcaagctcgagctcgaatagctcgacagggcttgattaacataagatgtattgcatgtaagaagatattcttgatgggacaatatatactggtcatcgtgcttgacctgctcaagtctcaagacctcatcaatgcttctcaataaagcacttatccggctgctagtaatagtactacattcctattagatgtagtagctagcttttgttaattgcaacatttcaaagtcatgaattcatgagaaaaactacagaggcttcattcaatacaagtagcatccattaattttgactaccaataatttgtattaatatctcttatacaaaagtaagttctttggagtttcaccaagtcaagctgtcaagctcgagtaggctcgaagctcgctcgagcttgaactcgagctcactcccaagctcaatcagtatccaggctcggctcgagctcagctcgagttcatgtcaagctcaagcctacatagccaaactcgctcgagcttagctcgttgatagccctacatgaaggaggaagaaggagctccatacctatgcctacctgccaatatatcaaatccactccaagaaatttaaaagaaccctgtgatggagcgtggggctccttaccgggagaccgcgcaggcccccctttgccggttcggccgggagccctgggtgagattctaagctcctggtctgtggaaagttcgcgagagtggaaacacaagacacgggcgatgtatacaggttcgggccgctgagaagcgtaataccctactcctgtgttttggtggatctgtgtatgaagaagctacaaagtgcgagccagcccccgatcgttctgggatccgaaaaaattttccttctaagtgggcaaggtcctccttttatacctcaaggggataccacatgcaccatctctctcttttttgtggggacttatcctatctattcataaacagacggagacttgtatggttgccgtccgaatgaccttctgatgggacggcccatacctacctccacttccgccggaagcaggcgcgacgtgggaacatggctgtctgctgacgacatgaccagtgtcagaccggtcacaaatcggtcattcttgtccaccatgcgtcagtttatcaatctgcatgttcgcccctcttcatacaatgtcttgcttgtaatggttaggatgaagcctggtatatatctgaccgggaccaacgtgccatctccaggagctaacacgccggctccggctagggacgagtgcttggaggctctcatcctgacgggatggggcgaggcgtgcgtcagaccgcctgtcgccacctaacccac

SEQ ID NO: 4390 - DNA, 31727 bp, Oryza sativa
cggtgcccgacgccgcgtagtggcacacgaaggcgttgccggtggcggagtcgacggggaggccgtggcgggccatctcccggacggcgtcctccatgagggcgagctcccccgcggcgccgaagcaggtgacggcgagcgggtagagcgcccgcgccgcgccggggtcgcgcgcgcagagctcccgcaccacgaggagcgcctcgtcgcaccggccgagccgcgcgtacgccgggaggagccgcggcgccgcggcgcggaggcgcggcgcggcggagctgtgcaggagctgcgcccacatggaccgcgccgacgcgaagtcgccggcctccgcgtgggcgagcatgagcgccgccgccgcgtcggcgtgcggcggcgcggcccttgggcagtaggcgccgtctcgccgcggcggccgcgcagccgacggcgaggacgggaaggcgagcctcgccggcgagtggagctcgggaaggaggaggcgagcggagggagaggcaggcgagggcagcggccatggtggaagcaggagagaacccatggtgatgatgacgtcacctctttttcttagcttggcttctgctttctgaactgcctcacaaaaagggcagggagaaatggaagcaagatttttgagaggaaaaaaaattcctgggaattggcaattcatgttttcaactttgggttaactgaatccatattattatcaataataatttattcattttcgaaacatgctatattaaaattcgcaatgtttaagttgtgccattacaatttggtttagaagtcttgataaatgcatatacatcgaaggggcaatagtagtggcactgacatgtcccgaatacctgctaaattttaatagcacagcttgaatatcacgaaattataattagcatatttcaaagatggagaaattataatggcggattcaattataatagcgtgccaatcctgtctgcagaatcatcaagatggtgacaaacccagtgtaacaagtttcagtaaaaaaaatgcaggatttggatcatccagcagttcagaattcagagctaacatctcttttcttctgcgctgataatctgatatggcaaaaaatggtcatcttagcctccatattgcaacaaactcaatctgttcatcactgacggcacaaataatcaccaaagataagcagaggatagcagcaggaagctgcaaaacacaaacctttggctacatgataagactagccctctttgcccaaggtgaataatcaatactcagatgggcatcaggagagttacattgatcaatcgcaaattcacattccatcaaatacatctgttactctgttaaggcgagaactacttcgaccaaattagaaaagaaaatggtcaatagtacaacaataataagaagataataacacaattccgcgacaagcagtgaaccggaagaggagcactcactcaaatagtacagaaaccagaaaataggaaccgaaagaggaaggccaggcttgcgccgaacaagccgaacactacaaatgccttcctcctccttaagcacctagttgtagtacataagctgttgcgctgatgactggttcgggtacccgtcgtagagggcctgggagccagcagcaagaagccctgcggatacctgacctgcaaggccatgctggccagcaatctgcccagctgcgacctggcttaaggtaagttgcctctgatatgctacgatatcagctgccgagaaaccttgtggcacacctgccattggtacgggttgatatgaaggaagtggcggtggcaatggcttggaggatgtaccaggtggggtaggtttgttgccccatgagcactaagaaagaacatgggaaattgcataagtaatcatgcaaaaaattgaaagaacagacgaaataatatttatttgaattggacaataccttgatcggcttcccacgcactaccaatccattggccatctgaatagccaatgctgcttcgccatggttactgtatctcacaaacccaaatcctttatcctgttgaacgcgaacttcctcaatagccccaacacctaaattatagaagtggcggtgaagctcatctcggttaacctgacaagttagataagtaaatgatcaatttaaggtgtcctaaaattcgagatgagaagtaattgcagcacactgaggaaagaggaacggtctagcaccaattccagggtaggatatggaataggaaataattagaacataggaagaaagaaaactgggctagcaccagttaatttctacctcatgtccaaggttgccaacatacaccgtagtacaatcagggttgttctctggattctctttacttccggtgtcctgacttgcctccattcctgcagaataaagttgaaaacaattcagaattagcagcgaggactatgtacgtcagtagctcaaattgctattgttaaagagcagctagatatgagtgtatttgctatggatgaaaataatcgtaacaaatgaatgtggttatgcagaaaatacaagttgcagcatcttttcacttcttttgttacaggaagcacttacaagttgcagcagcgtatgcagaaaatacaaatatacatggaaatccggtcatctcagatctttgtgtgttaaatttgatctttctaaggattaacataaaaatacaatgtgggaggtccattgtgtaatattgaagaacatcagggggctcaaaatgcagtgtaagtaaaggtgggataccagattcagaacaataaccaccagcttcggtcttttagaggttgactcaaaagtttatggccatggtgtaccccacatgctatttattcagctgaatataaatataatagtgccttttggtcatgaaactagtaaaacaactaacctggattactagaactaccatttgttagtacaactgcattatggttgtcagtttcttgtttctcttctgcattgttctttgttgcccaattacaccttatttgtctgcttccaagccatttccctattaaagcatattagtttgcaaaagtcaggaagttacaacactggaatgccagtaggttataagaaaaaaaatatattatgagctctgcttgcatgtttaccagtcatttcagttatagcagtctcagcttcctgcattgagaaaaatatcatgagtgataataggacaaaacactaggtgcaactgtaggactggacatcagtttacaaatgaaacttcaggtgataatcaaatttatgttcaagctatgataaatcataaataaaaaagcaaaagaaaaaaaactgacacttggaatttgcataaccttcatacaacagcaaagatcacctatgatacagtttgaatttttggctatggatgaattacataaggaacccgaagagctaaaattagatatacaacaagtaccataaaaaactatttgaatattaaagaatatggaatcataacataaaaagtaatcaaacctaccaataccaaacatgagaacataatattatatctcatctgaaactaacagtaactggtacacaggtggagaatagttcactgaattaaactacaacagcaatagctctaagcctctaacagaacactggttgccaggaaataaaagaaagaacgcaaataggttgtcactcgtcactgtagtatagctaaaacaccagaataataggtagagaataagctgtggaacacacatcacccacgggacaaaaattggtaaacatctgcgaaatggaaaaaggtctgagttgttcatgcctgttgattacggaaggagacaaaaccataacctctggagcgtccggttttgttatcccacatgactcgagcatcactgatcataaatgacacaaatgaaaaactgaaaagctacagcaaaaacaaaaaaaaaaaggtagaaacaaagaaaaagcatgtagtccaaaacgcaacattctaacatgtaatatcatcaattttacaatgggataaagtttatatagaaaattgagccacttgaaatcaagtcagaattacaaggcataagctgcagaatgcagataaaaattatcatatagtttatcatgtcacaaagaactaaggacttacgaacaagaaggatatgctgagaaacaggcataaagagttgcatcattcacttcagaacttaaatcaccaacaaaaatatggaaatgccctggaaatagttcagtgggcacagttaaccaaataagaattaaaattagaaacaaatgaaagacatgtgaggtttttctttaataatatctcaccagatgtatcctccctctgtgtacttgcataagcccagttcaccttgattgcttggccacatctgtgcaaaaaaaagtccataatgaagaaaccctaaaagaaacttgaggctctgaaacctgtgctgttgaagttaatggaacacgggaacttacatgtgacgaccatgaagggtcattattgcaagagccgctgacctccgatcataatagtcaacaaaaccaaaggaagactgtaacgaaaaagtgaattctcatcaaacagatgaatattaacaaaatgcagtaggttctagttattggccctgttcttttcagctacttcattggattgttacggtggattatttgctccaacgactctaaaaatatattttctcaaaaaactttcttctactgtattgcttaaaccacttgctctaagctactacctccatcccaaaatataaggagttttggggttggacatgggtattaagaaagtaggtaaaattcaatgtgtgatggttgtgattggttgagaagagaaggtaggtgaggattttaagaggtggaaggttgtgattggttaagaagggaataaattgttatattttgggacagatgttggaggctagaagttgttatattttgggatggatggagtatttcttaagtttatttctacaaatctttatttgatccctacaatcacgtagataattcactgactaatctgttacaaactgtgccaaaatgtttgatgacatttgaaccaaaatcacaccaagattgttagaaaattaaaactaaaattaggtcgggaatgttgtagtgttagaacgtggcgtttctcaaactttcatcaaaccttgggcacagcctttggatgcatgagcaggatgcataaacataccttctccttccggatgagcttgcatctttccacaaggccagaactctggaaaacttcgattagaaggctctcagtaacattagggtgcacattcccaacatacctagttgacacagcatcgttaattagaaaaataaacaaaacttcaaagtagttaactagcaaccatatattatacaaatttctaccaaagaaaaaatcagcatcagccttgatggaagactgtgcataacctaattatgcacgcatgcgtcaccttgtggaattccacattggtcataaaacaaaataagttggcagataagggggaaaatattaaaaaaaaaaggaagttgtataatatatgaaggtgaaagcaggaaaagactgaaagcactcacacactgcgacatgtggatggatcaaaccctggtggaagattgccatttgaaataggctccatctgcaaaacataaaatgtcaaaagaaaaaaaaaacaagactgacgcgaagcaagcacggcaaaacaagatagaaaacaaataagtacaatgaggaaagctaaacttggtaccaaataacataagaagaataggcacccaacattcaaactaaagaggaatcacaccagtagtgcagataagatatacacccacaaagcccatctagcaaaacatagtttctaagtcatctgttatccattaacatcgccatggtgatgtggattgttaagccagccttccaaacctatgttcttcgtgcagcaggtgatgtcgcacaaaaccaggctatttggtgggtcttataagatcgtgccattaggaaccttgaataattggagagtggaagcactagcctaaggagatacggaaagcattttgattaaacagattttagtatgcaccaagaatgtacactgagccaatgaggtaagggggacagcttacaaaaagttaaactctcccagattcataacaaatgcaataattttatacaataattacattcgatgtgaatatgaatagcatataggcaagtaaacatgatatgatcactttccccagaaattgtaaaggaagtgaaaacccaattcttccaagccatgtttcatcacggccaactcaaagtttgtctctcttttttcaccaaactaacctaacaattagcagttagcacgacatttgccatgaataatgacatgcaccttttatgcaactaaagacaacacatcacttgctcaattccaaataacaaagaaactctagttttcaagtgagagcctcctctaactactcaatcaatcaagatgcaacctaaaaaaaaggaggaggaatgcacaaagcaaaacaacaatcctcctggggctcgcgcggcagatcggcgcgcattactgctccccgacacgcgcacgcaatggcacgaacaaacagatcaagaagagagggggggaaacgggagaggggctgacctgggtcatggccgccgcggcggcggcggcgaggacgccggactggtactgctgctgctgctgcagcgcctgctgcatcaggagggcctgctgctgctgctgctgcctgagccgctgctgctgctgctgctgctgctggtggttcccgccggcgccgttcatctcctccccctccgactccgactccgactccggcggcgacggcgacgcggcgaagaccggatcgggaccccgggaaccgagggttcgcaaggaacgatcgacagatcgggggaatggatcgagcggatcgagagattccggggcgaatttcttgcggggatcgagctagataacggaggaagaggaaggtgagatttttctcgttttcttcctctctttttttcttttcttttttttttcgctcgcctctgttttttttctcctcctcgtcgagctccaatggaggttagagagggggagggtaagttggggattttcccctgtgtaggagtctaggagatggcatggaccttacactgacaggtgggcccggtttttttcccctggctctgaagcctgaatctgcatggtcacttgtggtcaggtggtcaggttaagacttaagaatatggatgtggtattgtggataggtttcaaaaattttaaaaggaattcgctatagtaggtaatatttgttttgtccaaatattacatatttggttcatatttatcttaagatttatatacccacggtggatagggtttgatgtttggttagacggatgtgacatacctgtggtagatctcagctcaaattgggccagagaatgagattttacgaaagaaattatattggaatttacttagggaaagataaatttttaagtcccattaaaagatgcttgagatgaaccatggctctggttttcaaacgattcggaaaaatttggtcttttgcttttcacgggaattagagccaaattattacatgatttacagcacattcgtttacattacaaagaaaagagaaagccaacatagttcgaatgataagacgttgttaaaagcaaatgctattgctaaatccccatccataattagcaaaaggttgcataatcatcatatttaggtaacagcacaagtccgatatcatttgtttgtcattttcgcacttttgcaacatggcccaaaaccaaagacaatgtgtgtctcttgtaaagtatctacatataaaatttaatagaaaagttatccgaaatcatctcattgcgacttaaccatatagcctagcatattccagatgtcccggctaatattgtctctaatgatggtgatatctaaggtaggattacagtgtatgattgcttatttttgggaccaacttcataaacataggttaatagattgcattaatgatttaaagaagaatgtcaaattacttaaacatacatttactcacaaatactctatgtctttttcatgtagctatatgtcttttaagtctagcggatgaacgcaacaaaagatgttatcatcccataaatgtgatgcatatgcatacatttttatcagtactaagggcctgtttagatcccctggcaaaattttcaccccgtcacatcgaaatgtttggacacatacatggagtattaaatataaacgaaaaaataactaattacacagattgcgtgtaaattgcgagacgaatcttttaagcctaattgctctatgatttgacaatatggtactacagtaaatatttgctaatgacggattaattaggcttaataaattcatctcacagtttacatgcgaaatctgtaatttgttttgttattagtctacgtttaatatttcaaatgtgtgtccatatattcgatgtgacacgccaaaactttacacccatggatctaaacaccccctaaactttttatatgccatgttataacctcaatacatatttatccaaataataccttaaatattccttaaaaaaattatccaacgtcccaaataacggaactaggtattttaatgtcgaaattttaccatttggttcaaataacaacctccttactagtgtcttgcggcattgtccatgtgatgaatgagtggtttttccataatattagccagtttggagatagggcatcctttggaatggaaaagctcaactggttaggttcattgtggtggaacctgtccacccgtgttcaagttctagatttgctcgcatttatgactatttattcttcagtgatagatgatatactcatcgacaacaagacacccgtagtgacttcgtcaatctcaagatatgtcagcctagtcttccagaggttctcaagatattacggtcttgtttttcggtgatgctcatagcaataggatgtgcgttcgtaggggtgttctcattatatgacgacctagtttttcggagatgctcgtagcgatagggtgtgcgtttattggggtgagtgtgcgagcgttgtgagcgtctacgtatgtaccgtatttcaaaaaaaaaaaggaattttctaagagcaattttatgggaatcaatccagattatgtaaaattcatgcctcccaaataagctctaaaatttgaagtcacacctctcccgcgattcatggatccatccaatatagtcaccaaaaaacgaagtataatcttccaattccaattccactcttgtcattgttggtattaacaagaaaagtacatggcaccaacacgaaaatggcgatcgaatatacctctacaaactttaaatgaacaaacaatgatttagatagctcacaacatgaaaacggcgatccaatatacctctacaaactctaaatgaacagataaataattcatctggatggctcaccaggggcctattttacaacgaaacgctaacaatcagtgcatcctggtgatgatgttctgatcgacaggtgaaacaattgtttccatgattctgggcttacttgcttcacatgcttctccataacatcacagcagataccagtaagccatattatgttttcaatacaaaatattgacactcaaacaataattgctgctgctccacacatgaacaaaagtgaaattacacaacagataaccagagaagaagaatgtactcctgcccagtatgtttgggacaaccagttttcctcttggctgctgatacgccatatttccaccttaagcttaaagtctttttaaaaagaagggaaagcaggtccgttccatatggtgcagataaataatgtagtgaacaagggaaccttaggaaaacaacggcacagtgcttaccccatattaaccttggaaagatatattttgcaggacaatgcatcgacaataccttttcttttctcgaaaacatcagcaggactcatatggaacatgttaagcgaaagatgatctgtagtatatatttttattttgaaggtattaccaccaatgtcaaagaccagtagacgtcataatgtttcagaggcatgaaaacaaaattattggttgaagtggtgtacaacaaaatgtaccgtgaaaagaaattcaatagctaacataagaagtctagcatcaattttgttttttgagaagaattcagacattaaggctaaattgatctaggacatgacaaggtttctagtgtcttcatgagactgtttacgtcgcataatgtttaaaaggacagaaaaatcttcatgcacatatatacctgtaatatgataaatatcaagaggaaaccatatcgttttagctgttattgttgtactcagatgctctcttcttttagatgtcagatgtatcattttgcattgcattgacattaacaagatctgtttggcagaggtgtgctacatatatcacgacaaaatattcatcttgggaagcaagcgattttgtaatgatatctcaattgttgctattacctgttcagttaaataagatctgaaatacagcagtaaatactcaggaagagctgaggaatctggggtatcaaatccagtggctggctcaaatggacttcttcatttgagataagaacagtgaaatactatagccgtctgaatagtatgcaaacaaatccaaacaaaataacttctggacagatgttgtggaggccaattggagcaacaatacagtgacttggaatgtcagattctcgttatgtgttccaaaaaatccccagctaatttcctcaattttgtcagaacgcttcctgaactatcagcaaggatagtttcaactggtgacactgtggcaacaaggacaaaattttcaccattactgacatttatttcatacaactcagagaagacatggcgaagaacatcaatcaaccctttgtagaaggatccatctgcagcaggagggataacattcaatatgaaagccccatcacgatgtaggatcgtgcgtgaagcaagaagaatgctttcctttgtcatctccaacggtggtgcactgactccacatatagcatcagatgaatcaagatccaccataatcgcactgaaattcatatcagggtccccttgatgagcaaaatcctggatcatttgaatagcatcaccaacacggacttgaaggaactcatcctctaccaatccaaaatggctccttgcaacatccagcacaacaccatcagcctctatccctagtacatcacactgaagccccattctgattgacatcagaagagcgccgccaccgataccagcacaaagacacctcggcttgccacccaaccgaaagctctcatccatggaaggggcgatcaccgcaagaccagcggccattgcctgtaggtaaggctggaccagctctccacccacctcaggctgcaatgaaccacctccaacctcatccaatgcatctaacatcaaagaatcacccggcgataattgccgcacaaggcgcacctgcgtctgaacaaggaacggcatccgcttgaaccgcaatcggcggcgcaattcagccgaacgtggcgcgcagtcgacggccacatcctcaacaaccatctcaccaaccacaggaccagcgacaaccttgacaggagcaagccggaggaggtcatcatggaaggagagcaatggcacgtcagggatagcatcgcccccaaacgcggcacgggggcatagagccaggaggagtgggagcagccgcgcgtgagcaggatccgggtccgggcgagcggcggcggcgacgaccaccacccgagaaggagacggcgcggagagctcggggccgacgaggatgaggcgggagaggtggctgcactgggagcgggaggcgaggaggaggtgcaggtggccggcgcgggtggagaagatccagtcgcggtgccgccccgccggcacgagcatcgccgccgtgcgcggcgacgggtggggtgaggagtggtcgagaaccgccacgcggaggaactcatggccgccatgggcgtacgggtcggaggcgtggtcgaggaggaggagagggtttgggaaggagaaggcgatgaagcgggagggctccacgtcctgcaagccctccagctccgagctgaccgccattgcagagagagagatctcgagcaaccaagaaacccaagcaggaggagcaatcgcgcgcgtccaaatttctcgacgagggtttcgtttctcctccgattgggggagtatcgcgaagattctaatggcggggagagagggttgacctgagattccgtcccgtccagccgccgccggcgagggagtcgacggggctcgcggcggcgccggcgccggcggcgacgaaaaatcgcctggagctgtgagctgagggtttcctctgtcactgtgttgtgggaccactaggtcagtgagaaacaaatatcatatgatatatttaccgttcttaaattaggtgtatttgaccccatgttttgagtattttctatgttcagtttaaaattatgttcccgttgatggaattggtacagtatcttccaaaatccattcttcggaagaagattgtaagcagtaatgcttattaacaacaacaaaggaaaattatgtaaaacttagtgtatgtgatcttagcgatttaaaaattaatgctggaaaatgaactacgataaaagaaacaaacaaatctaaaattaagttttaaacttcaaatattggttgtggctcataagatgaagagcaaatgataaagctgttggtcatctcatataacgaatgaagtcaggcagcatatgatagaaagaatttagagaaatgacatgatgaaaagtcccttagcaatatttgcaataagaatttggtactaatttattgaaatatttcgtatccccaaatgtacaactcaacactagctcccaaagactgtagaaaactctcatacaaatacatgatcagcgattcctcatgtataaaatgttgtttttttttacccatttagatctgtaacagcttacagatggtgatatctgacaatctccattctgcagcttatacagcagcaatatatacactgtagtatagacatatggacgggctatacaagagggtaacaaggccataaaaacatacagagaattagcacatctacaagactgcaacagagacaatagtctgaataatggagtaaacttataaatggaggcttctgggcactccaacacagccttcctcttgtatccatatttattgagttttcttgtcgataaatttactgtaagctcaaagtttcgaagccaaaattatcattgcctactaccatcctttgcactgtcatgagactaacagtcaaaaaaaagtcggtcttgaggcgacagcaactacagtatgtatgtaaagtgggttttgatcagtttctacattctagtcgccggttatcctccagggatgacccccatcagagctgctgcaagcttggttgggtagaaagctgtctccaaagtcgccgactaatctcatctgcatttcttcctgtggagaaagaatcctgatacatcgtacacatttcacaaagtccctgcacatgcaaagccatcggttcttagttatcaccgtgatacaattagaaatagctatactttgataggtgaataagtatgatcagttgaaaaaaatggagcctcgttatatttcccaatcaggtaagtggtgagatcactgcagaaaatatgcttgattggttttacgtaacacagagttgcttttagagtctctctacatgttttaacaggtaaagtaaatattcagctggagttagaaaacattctatggcatgtgaaactaacaagcagggatgtacagatctttgcgtgttagtgaaactaagctcacaaacaataaatccagaatctatatgaagttgctccaagatcatgttcactcaaatcagctaaccccatccatgggtttatcttcggtaaaaaaaaagatccacgcctccagaaagatattattgttagttttgtatgtgcagatgaaaaataagtttatgggatttgacttactcccatggatcatcaccaactagtagaacatccttctcgtgatcttcatatactagcttccagccaactctattttgatcaccaagctgcccctcaataccaaacatccgagcaacgtcatgtttcagctcatcatatccagaatatcgattgatgtcaattgatcttcccaccgcaccacgcttgtgtacctgtagataattattttggtcagcacaggtgtccactgcaataatcatcaacatgtgcaattatttcatgaatcttagttaagagtcatcctaagattgtaacttaactcgaaatttttttctaaaaaagatggtgtaaagtaacaagttgaggctaagctagataacaaaccttggtgtaggttctcatccgttgatgtgcaggacctgctgcagaccgggaatttctatttaagaatggggtatcattgattgcagaatctatagaattgaatgccatatcagcaactccaaatgaatgtgaaatcattgaagatgataactcttgttgagaatcctttgatgaaatgaagttagaaatgccatttcctggcaactgatccatgtatttatcggttccaatgtcattcgcaagcaggtctgcattaagtggtaaacccagttgaccatcaatattcaccccaaatagaaggttatttcttggatctgtaacctcaaactcgctatctggaactgtgtcttttagcaagtgatgctggtggaaggatgaaggtggaaagttttgttgcaatgatccatcagcctgggaaaggcaaaccgaagtagctgaagaggatgtgtccaagtaatccatttgaggattgttatttatgcagtcttgtccagtagctggcctttgttctgtcgtcttgggaatcataactgtttgctttacattttgatatggctttgtgtcctgttcgatcgtaggacccaacacaacagatgattgagatgtctttcctgctgtagttaaactttggttcttggagctacttgggatggattgcagaagaacaggattgctgttagtggatggtgatgttgaagtagacggaacatcatctgtcttcaataattggcgtccaccagctacatgcaaagaactagcacccatggaagtagcgatgtctgattttgaattaggaatgacattcccagttaagtcttgaacttggtgagactgaaccttttgctgtgtcgggtattgaatagtgttactgttatgtaaactaatagcttggtttgttacctgtacacactgctgaggagctgactgtgaatttatcacttgctgctgcaaatccaaaagcatcttctgctgctctgagatcagaggctgctgtggctgtaaagccttgagtagttgtagtttcatttgatgatctgccacctgcgtattcatacttgcatccatggaaacatgaacaggttgtatctttatttgctgatgttcctgtactgactgctgaacctgctggacaggttgcaactgttgtgtttgctgctgctgatgatgtaactgttgcggtatctgctggtgctgcacatgtggctgttgctgctggagaagctggatttgttgaagacctccttgtaagacagtgtgactttggaccgaaggttgcgtttgctggagttgggcctggacaacaacttgaggttgctgcagttgcgcctggagaatgacttgcggttgctgaagctgagcctgaacaacaagctgaggctgtggaatgtttatgtttggctggctgccttgcactggttgagtaaccacatgctgcctttgttcagagttgcaatcctgaaccaccttctgcggtattataacacttcccaattggtttggtgtagggataactttcgctaattgttctgtctgttggttttgttgaggtaccaacgcagtgttgaactggatgttgttttgttgcaagaactgcgggtgaaaactgatttgccttgataaatcagctgcagccaaattttgtacaggttttccacttaatgagtttagtaactctggttgcacaaccgtgccaggaagcgaggagctgtgctgcatgttcatccactgagctagatttagaccaggcactacactgttctgaatattcagatctttcttgcaaatctcctcaccaacccatggcatggccctcttgagaagaccgtccatttcagtctcgtcatctacagatgtgattaaattattataagataatgaaatcataattttctgttagaactgatattcagtcgaaaactttggttacacaataatcatagtctgatatgagtactaatcatccatagagtgaccttttatcagatcagtaactgtttacctgtcatcccaggtagccttggacgttttgcggtgaataatggtgaggggtagatgaagaatggagcaatgataggctctatctcccagagggaaaccctggtgcgtctctcagttggtgccgcttcatcccatgcaacctgcatatagttctacttattccagcaaaaacaaaggagatatagctttgtaaggaatcagaccaaacctgaatattgcgccaatgagatgttttccaccttactggatccagatcacttataccagttattgtacccatgtacctgcaaggaagatgtcacaaatacgattcagaaaagaatcttataaaacatcacacattcacaagtgcatgaacatgaacacagtcaacacagagagctgaatgtgactcaatgcagaaaaatgatgctcccaaaatatcctaagtgtgcacaacacacaccaaggatctttttaggtccagtctgtagcagggtccctgtgggagtcaaggtagctcgatatccaccccttagaggggggtttaggataaaaaattttcaactaaaaggaatttgaagtaatgagaacaagtatatgttacacaaataagataaagttcagaaactataccttcttgttcctgactcttcagtttcaaacatcattctgaaccgcatgccaagagataattggttaccatacactgccttctggtatttggcaaaaggaatcacaaattcggaagtactggccctgaataaacaaaaaaaagttcaaacaaaactaataacatatcatctcttcatacgttaaacctagccaaagatgtttaccttgggttataatatattgtaaattggctgttattcgctgcagcatgggctgctgcagcaagaattccaatatgcatactatcactagataagacagatgatgagaggttcgtaggttgcctatttgctcgtctgatccccaagaggagctgctgttttgcatccctatggtcggaatgaagaaagtttagtactccctcaagattgatttgttacagcaacattttcaagcgatagcgaggcagaaaaaacagtttattggcataatcagtgtacctaataaacaagactgaatcaccagcaagtaatctctttccactgacaaataggctccagcccgtagtcagtaaatgccttttaggctgacctggtgaagagaaagagaactcataaactttgagacattaaagcatgaagtaacaccagagtttcctgaaccttttagtaaccaaaggccaaagctgacatacggcagttgaatacgggtttcgtttacaagagtaaggcctttactaagttgcattagcttttatcatgcatcaaagggaacaacggaatattagtatttttctactgtaccccggtatatatgacgaaatgtccaaacattatcatgcaaatcccgggcctgcagttcctgggcaggaggctgcatggagaagtcctaaacataatacagtgcgcataagttagtagaagaaaccaagaaagaatcaacactttgttttccataaggttaaagtatgctcacaagacgaggaaaaatcctctcagcggcacggcgtggcacagagaaacctccatgagtgcttgtatcactggcggtcagtgttttgcaaaagaattctgtttgtggcctggtttgcttcagcgcaagctctgatgctagcaatgtctccttgtcacactgggtcacctaataatcccaattccaaaatcatgtcggtactgctacatcacataatccagaagatctaactgaatttgggaaattgcaacctacattgctaactggctggagagtcattcgagcataaacctcatctgtgtcaggatcagcctgtcatgttttgtcaagaaatgtgtcagtacagaagttcaaattattggcataatagagcactaataaagcgtggagctctttttctgtttactgatgctcaaagtggcagagattacaagcatggtgacactgtggaggatgcatatcagctttgatggaagatttggatagcttggaatttgcgcatctgcgtcctttcgcatagatgctgcaacctgaaatcgggtatccaggaatgagaattgttctccatgaaaccccaaaaccacttgcacaaaacttgcacatttacaaacggtgtgctagtaactctcaaagcttttgttaactctcatcatagaacttgtgtacagaaacacacatgttttctatatcaaactccatggtaaaacagaagcaaccaagtaacatgagcacttttcgtttgggttgattcaaattacagtgccgtataactgaatttgctaagaactgaaagaagattaacaaaagttgtatgttcgtagttgaaagttgcaaaaagattaaagttatctgcagataagattaaacaacatgtaaaggagcatcagaaaaggaagacagattgggaggatgcccaactccatgctcctccagcattgcatcaaatggcaccaaacctccatgacgcgacgacttaatctcacaaagaacaaaagcaaagggaagtaaacaacacgagcaattagacagtgaattaattcctctctgaaacctcttcctttatgaccaaaaaaatcgattcccaaatcttcctcttatgagaacaagaacaccgagaaaaccggaatctttttttccctatttctcgagaacaaagggaaagaaaccatttggatatatggccaagatcaaacgctcaagaaccaattgacaccggacacggaaccaatcaaccaaaccacacaaccgcaaagagagagagaaaaaaattctccgccgcacgcggacatgacgcgacaactaagagaagaaagatgaaaacgaaaaattcacgaaaaccacaatgaaaaaacaacaagaaccaaagaaagggagaaatctcccttcatccgaaatgggggaaaaaagaagaacaaagcaaagcaatcagcagcagcagctttgatcaaagacgacttcaacaacttcacaagtcgtcgtcgtcggaagcagagagctcggcggcggcggcggcggcggccgtacctgctcgctgtgaccctgggggaagtagacgatgaggctcccctgcggcggcagcgagacgagcggccccgcgcacgcgtaccacagctcctggttcaccttggtcgcccccctggcctccccctcctccccaccaccaccccctccgccggagctcgccatcgccgccgccgtgtctcccgagctcagtcaccgccgcctcagcctaccgcccgccggaatccatcgccggatggatcgccgccggcgaggaggaggcgaatttgaggagagaacagaagagactcggtagcagcgaagagaaaaaaaaaagtagtagtaatataatagtgcagccgagctaagcttactggccactgtactgtttaagcatcagagttaatttaatcgcaggctataattaattaattactctcgctaattaatcaaccagaacacatctggggaatggggatttgcagctgcaggctgcatcacgtgtggagagggattctatacgcgaaattcacacgcgcgagcgtgcgggtgcgttcgttgcgtgtgtgactcctatgaattctgacgaaagtctgaatacactgctccctccatcacaatgattccgttcttttctccaacaaaagttagacgaagattaatatttttatggcacgattttcaaactgctaaacggtgcaattcgtgcgaaaatttttatatgaaagttgctctaaaatatcatactaatctatttttcaaatttgtaataattaaaactcaatcaatcatacgttaataccacctcattttacgtaaaaaaaacttaatcttcatcttcatatttatcttcagaagaaaaaaaagccacctatacaaaactaacttctgactatacgtccagattcgtactcagaatttgattttttatgggacaaagagagcatctctgaataaacatatgggagcagccattcgttttgccttttcttcgtaaagattactaattaatgatgggattttaatttattttgtatactatccaccttttgacaactttgtttcttttctactacctcttttgatgtttgattttgagaagagagggaaaggtaatttgcagtgtatagcatttggggcaattttatctttctctttctctatttctttttgcctactttagttgtgcttctttttgaactcggcttttcagaagttttggatgcttttcagaagttgccaagggagacttcagaatattatttggagtttaactaggtgcatgcatgttggcatgtactgttggtaatatagtgccaattccttttctttttaccataaaaaatggatgataatatgctataatatgataatgtggataatatggatgataatggtgtattacttacaatttggagtttttttttatggaactcttcaagtgacccaaccatagtttcttcttttttttcttttttttaaaccacatgtgttaggcaaagctaaaggatgaagagaacgcttaactactgctactaataggactccaccttacgtgatactagtttcatagtgttaggcccagttgatagttgattgaattagatgtgtatatatagatattattcctttgggataagaaaaaaaaatcagcaatatactcttttcatgcgagtggggtttataaaagatcaaaataaatcgggacactagagttaatattattttgaggaaacttaaaactccattgctaaattgcttttggctctgattgttagagttatggctaataagctgtgaaaaaaatgagcaaagtaaccttatgagtaaaatttttatatgtgtagttatcattgtctattccaaggagtctctacttggccagcttccttagttcgtaagacaagccatcaaaaccgtgcgacttgtgggccaacccctgtttagcttagaccaagtctatggtctcatggggaggtccatgtgtccatcctctgtctagaaatatccttatgaaggttgaacattcgattatggttggttcagttgatgtgggtcgagatcgtgcccctagagctgtttagagacaaacacactttcactatgctagcgcgtaagatatgatagctggctgcatggtggccaggtcatggcgtttttctatgctagagtccatgactctgcattgtccgggactgccaggtatatcttgcccattgaggtcgagtagagtaggcatgtcatcccttctcggagtccaccatgtaatcgtacatgggaaggaggatgaagaccctagactctaggtgttgtatcacgagcaccccttggcgtctcatgacaggccaaatagtgttcatgagtgccgaagatgggtgggtgtgtgtccaaatgggcactacatcgcctttgggaggaatgcataggccacatagtccatccatcatattaactacatattctctcaagttgcctcttagcattaatgatgagggataatgtgtattgaagactcaatatctcttgggagtagctttttaggctcacatgagagaataaggagactacaagttagtccagtgtggattcctaggggagattgactgctacattaaatatagcgaggagttcaaggaattagttcggacttatgattatgtacagtcttttttgtttgtctttcatcaaggagaaaaagagagagcagggtagttgtagggtataaaaacccatcctaaaccctgtagaaaaggttagacgttaggaattggtaagaacaccagtcttcctaagctagttggagagcatccagagcttgtacgagttgctttgatagtgacgaataacatgagtagatttgctatcttcggaagacctgaacatgtgtacgtgcttgtgttctttcttattccccgagcacatctggacacgccgtcagcatctagaaccgtacccctggttgatcccgatttatgatttttcacgtttgtcggtgttaatactggtttaaaattaaccaagactaaaaaatggaccgataaaacaaacaccaaaattaaccttaggattaaaattttaaaattcaaaatttgattgtatgtaaattgcaagctaaggtacaagggaaatccaactgaactactatattgttcaaactgagtttattataaactactctatccatcttaaaatataagtattcatagtattcaacaaaattaattttagggtattgccttcttcaccgactatacctgaactggccctcatttaactttttacccaattaattttaccttaaaccccaatcccactcgaattgaatgacaaagggagtaactaatactacataatcgaaggtctcccataaaacgagccacagagatattatatcaaaatcattaccatgactaagcatatactgaacatgattgcatatatatactccatatatggaattaattgaacattagtgttattcatgcgcgattagatagaacttagggccatgctaattggctgctagctagctaaatagagctagagttagctactaattacctactagctgtttgcagcaagctgatagtgcaaccttagctactagagctagtggccttgcatgtgttgatcatcatctttactctggaatatgcatatccagctaacaataatgcatatgcattgcgtacatttgatgcatggctaacacaacgatcgatcgacgccgctcctactcgatcgtttcaccaatgaataattcatgatcagtttggctctttcttccaagccttttaatactatagcatgtagtatgagtaagagctactttctgcaaacccaagctcatggaccatgcgtgtactttatgttgcagtgttgcagctaattactatgtctgtttctctattgattttttaaataaagtttaaacatttgtcttatctaaaatttttgtgtaaatatacaaacatttaagtcatacttaaatacttaaagaacatttaacgataaacacaataaatgataattacataatttttttaataagatgaattgttaaatgtatctaagaagtcaacagcgtcatacattaaaaaagatagagtagttgatatagactagtacttcaaaattgaagtatagcaactacaaaaatccaagctgcattgcattccgcgcattcatccgccgaccgatcgatcgatcagcagtgatgggatgcaacatgggacctcttgcttgatgaacaataatatgatcatcatacgccggtgccactacttcttatcgtatacacactcgtccataaattaataattttcatcagactagtatataccgagttgtatgtatgtgtatgctgcctgattaaaaaggctgtcgtttcggacacaggtcaaactttcaaagttaagcaacaaattaataatatatatttataaatatttggaatattgcacacattcttaaagtcccaagcctccgaggtaggttcatatgctatggacttgatcacttgattagaggaacttcatcccaaatattacatactcaccgttgaattcttctttacaaaattcttatctagattccaagactaggtaagtacatagttaaaataaaatatagtacttcccccgtttcacaatgtaagtcattctaacattttatatatttatattgatgttaatgaatttagacatatataactatttagattcacttttgcttccacccttatgttatgatgcgattaaccaccgcatctacttgagagaggatcaaatacacaagcgtttcattccaaccaaatattccagataacagataacggggggatgagggagtcgaatcattttttgaggtgatctcggtgagagcactcccattagatttgaagtgccggccattgactagacgaagaggaaggaccaatttgatcttgaccaacaactcgtgccatgccaatgcttgtaaaaactgctaccgatcgagcttgatctcatgcctggattgattgaaaccagctaattaaacacgtgcaatataattcagactctttaaccgatccaaatcttggcattgtacatgtaatagtacaaaatatgcatggcagatgcatgctctggttggccacatgatcgtcgcgaaacgtgtgatggacgtacggcgatcgggtgagatgggatccccacatgcatatcatcaccgcttcatccgcctccttctttgtcctcatcttaagctaagctaaactgagaccatagagcttaataattgatcaactatatatacatctatccagtgattagtagttcttgttgttgccagttgccttctcttcagatagatagcgagatttgatcgatagatcgagataatgattaacttgtacatgcaggtgatcgatgcgtcctactactagtagttaatttctccaagctattttcaattcaaagaaatagtttcagcctctgaataatggaagcaagcggatcaacctgatcaagacgattaattgcatcataatcaacagagagttatttaagagctagctatttttaggccttatccgtaggctgccttcacatatatctctacacatcgagataacaatttttacagacaactaaaatacattaatatttgtgtagagatggtagaaccaatcgtctcttaaaataacacatgaaaattatacgtctccagtttttttttcacgtgaaagtaaccagatatatagcttgtttatttctagctatttaagttcatattaaatcattactctagtttactaatatattgacgtacaattcttttgcacgttcgggaaaagaatcttactctagtttagtttacttagtaattaaataattagataattaatatgtcgagacttctggtaatttttattctagtttctccactgaccagcgccatatgaaaaacaatttccaactacgatcggcttaatgccatctcgagcgaaaaccatctccacatgtgggcccttatgccagccgttgccacatatatttctttcatcccataaaaaatcaaaatagaatacaaaagcacatccaaattcactatattaagatatgttatatccaatcctatgcttcttttatagagggagtacataagaccacatgagttgcttgtttacactgataccttgtaagttgtaatgtaagttcatgcagcttagttgcaagatatatttgatagcgcagtgaaaaggggtgtgtggttttaaccttgagatcacgtgtttaatatttaacacgcttataatttttttagaaaaaaaaatatttggagagacgattctccctcgtttttatgcagctcagctgccagctcgatcgactcgaccagcttatgcattcagagatggacgatggctggccgtcatggggtcctcctgcagctgggcatggtggttgcgtcgttgcgagcattcgatccgatggggacgacacattgcgccgctagggcccccggatcgatcactgttcatcgacgtctcgtcggcacctaccaatcatcatcatcatccatcacacattcattttcgcagcaaatctctgaataattcagcagcagctcgatccatccatcagatcgcaggatgaagcatgtcatcgatcctgaatttagcctgacgagactgcatttctgtttcatccatactactatatgcaccggcgaaaactatgcaccgtgtacagtgtacagcgtagaattcagagttcagagtctcgtatcctctcactgggtgttaactgaagaatgttctcttgcagtgatagtattagttgttggcatgaacagctaggagtaattaatagagatatgacgagactgcatttctgtttcatccatgcaccgtgtacagcttagaattcagaatttagagttcagagtctcttttcccacaaattttgacaatttgaccctttgcaaaaaactatttttacaaataaaccgccgccaaaacttatttcaaatctgacccttttactcaacgccaaatcgtgtggcgctgaatttagacacctcagcgccaaatagcatggcgctgaatgtacgttggcacgctgacttagactgccatccgcgtgggacggcattcagcgccagctgacgaggcgctgaggtgtctaagttcaacgccacatgatttggcgttgagcaaaagggtcagatttgaaataagttttggcagcggttcatttgtaaaaatagtttttgcagagggtcaaattgtcaaaatttgtgcctcccacaggatgttaaccgaagaatgttctcttgcatatacagtgatattaactgttggaatgaagaattaggagtataattaattaatagagatatgactgagatgttatccactctgacgacaaatcatcaggaatctgtcaaataaagcggccggctatcctgatgaaccctagaagattttcgtcgctggaattgaatctccgggcactttgatcagcaaaacctgatgtgatgccaaaacgagcaccttgtcggctccgcggtttatgcgattggacatcactcacgcttgatagatgagataatgcgtatgctttcattagttgttgtactgcagtacaatttctactcagtcatgatatcattatgaatgaagctttgcattgtccaagttttttttttttgcagataaatgcatttgttaagaccagtgcgaccgatctgaggacaagaattattgcccattgacattgcgaatggtagtgggcaaacataattaaatgtttgttttttacaaaaatatcatacaataattttaattagttcatccttacagctcatgttgcctttttttttgtttttactgtttggcaaaagaattgcacgttactatattagggttttgttgtttatactaaatatgttcatgagtattttagggcctgttcactttgatgccatttttaaccttactaaattttagtaatgttgccaaaaagtagtttgctgcaaatttttggtaactacataacaaatcctgctaaaattttggcaagacaatgtcaaaatttggtaaggttgaaaatggcaacaaagcgaacatgcctttaaacttttcaatagtttacgcttttcgtctttttgttttaaaatatagtaacatagaacacgcaattagacatcagctaccattacaaaagatatattagaacaaaggacatctttactctctctatctattatattattaaaacagctttgaaagaaggcaccacgttcgctgtggaagttagaaatttccacattaatcagtgaaaaagaaaaaaaaagaagagtccaagtagaagtacaatctaaaaatagttaaaattaggaattaaaaataagcaatattgaaacaagttttcatataggaacccaatacgagattaatcaagattcaaaataaaaataaaataaaatccaaaattagaaaaggaaaggagagtccaagtataaatacaattaaaaatagctgaaattcagaattaaaaataagcaatgttgaaagaagttttcatataagaacccaatacgagattaatcaaaattcgaaataaaaataaaataaaatctaaaattagaaaaggaaagaagagtctaagtagtatacaatttaaaaatagctgaaattcggagttaaaaataagaaatattaaaagaagagtccatataagaacccaatacgagattaattaaaattcagaataaaaataaaaataaatctgaaattagcaaaagaaaataaaagacgagttcaagtaggaatacaatttaaaattagctaaaattcggaattaaaaataagcaatattaaaagaagaatccatataagaacccaatacgagattaattaaaatttcgaataaaaataaaataatatctaaaattagaaaaattaaaagagagttcaagtaggaatacaattagaaaaggaaataaaatccaaaattagaaaaggaaaggagagtcaagtagaaatacaatttaaaaatagctgaaattcggaattaaaaataaggaatattaaaagaagagtccatataagaaccctatacgagattaattaaattaggaataaaaataaataaatccgaaattagcaaaagaaaataaaagaagagtttaagtaggaatacaatttaaaattagctgaaattcggaattaaaaataagcaatattaaaagaagaatctatataagaacccaatacgagattaattaaaatttagaataaaaataaaataatatctaaaattagaaaaattaaaagagagttcaagtaggagtacaattttgaaacaactgaaattgaaaataaaacattaaaacattaaaataacacaatacgatattaactaatttttttttaaaaaaatctgaaattagaaaaagaaaaataagatttcaattaggcatacaatttataaataactaaaatttgtgataaaaataaagattattgaaagaaaagaccatctaaaacacatgacgagataaattaagtaacatgcctataaaggagtagagtggtggcggttgatacgatatatagaaattgttaataaaacactaaataaaatcctaatgacgattaaaaggagggacatcaggcaggccgtaaagcaaacgagtaaggcggtgccgggacttctagaaagtaaaaaaaaacccattgataatcatattcattttttaaaatctcaatgacaataaaaaggagaagcagcgggcgggatgtataagagtatagttacagagccaccgacggttgacgggacttctagaaaataaaaaatgaattccaacgatagttatattcaatctttagaatcacaatgacaataaatagttggcggcggacgggctatagaggggcatagtggcatcgtttgatgggacatctaaaaattataaaaaataaaactacaagtccaatttttaaaggtttaaaacttctaaaaagtaaaaaaaaacaatgataatcatgttcaattttaaaatctcaatgacaataaaaaagggaggcagcgggcgagccgcagaggagtacgatggtaaagctgctgacggtttggcgagacttctagaaagtaaaaaaatgaacccaaacgataattatgttcgatttttaaaatctcaatgacaacaaagagaagagatagtggacggcccgtagaggagtataatggcaacgtttgacaggacatctagaaattataaaaatgaaatccaacgactctaaaagctataaaatccaatttttaaaggttgcaagaagaatgaatagaaatagtggtagatcgagcaagcaaataaagaaggagatgacataaggggtagcaactggtgtgacttttaaaaactacataattataaacacgaggatgataagatttggaatttcaaagtctcatgacaatgagatagccagatagctattttataaattttaagtaaaatcatactaaaaaatattatgattttgtttgggtgctagccgcgcaattacgcgggccagccagctagttaattatataatataacaatataaaacacggaattgacattgtggaacataggggtcggagtctcgaaggtggctacagaggggaaggcaaaaggcccaccaactgcacggcccaatacctgaccaatcgaaacccaacaggccaacactgcgggcaatcccgttccggcccaacttaaatgggccgtccgtaccacggcggagctccggcgagctgccacggcggacgcggagggattcttcgggatcgcagaatgttgggatcgtacgttttcctagtactgaattcaaacaattctcttgaatctgatccaaattcatctctatttcagttgaaaactgatttctacagtacagcaacagagtacacggggtgaaaagatttcccaatttcaccaccacatcaccgggctcgcctgcccgatcgccggcagctgctgctgcggcggcggcatgcagtgctgcggccaccgccggaacaggtacccctcgccgcagccggccgcggcaccggcgccggcgagatgcgcgccctcttcctcgacctccatcgcctccgctgagccctcgccgtcctcctcctcctcctcctccgacgacgacgagacgcccacagtatcctccgccatcgaatcccccgccgctgccggcgcggagccccacgggacaagggccatgccggcgccatcctcttcttcttcttcggcgccggacaacagccgccgcaccgtccggctgtccgcctcccgcagcatgtcccggatccactcggcgccagcgcggaggctggcccacggccggagccgccgccgcagctggccgaggaggccgacgcctcccacagattcgaccggctcgtacaccaccatagccccttcacctaccgccgccacctccgccgccgacggcgcctcgcccatcgccacgtcgtccgccgccgccgcgtcgtcatcgcgcaccagccgcctcatcttggtcgcgcggcaagcgagcgggagcccgccgtcgacgtcgccggggcaaatgaacagctcaggctcctccccgcccttcctcttcagcgtcacgccgccgccgggggactccacgagcaccaccatatcctgctccactaatcaatcaccacgtcgctaatctcgccacttaatcccggtgcactcgaaggttaattctcgcatcgcagcgaaggggggaagcgaaatggcgggagatttatacggggctcgtcgagagaggagtggacgagtggagaagaagaaggcgaggaagaccggagaagcttcggttccatctccggaagcctctagaatgcgcctcgcttctcgagacagcgacagcgcgtcacctgggcggcccacaaggccaccattctgggccggatgggtgatgggccgaattggtggtgggccgaatggcggaagccgaggaggggtgtcgcgcgcggtttggccgtgtgaggtgggggtttgagtttagtaccacctcggcgagcgaggcgggtggtggagggggaggtggctatataaggggggttgggtgtgagggtggaaggcacgcagctgcgtggtgagcacaaagcgaactatt

SEQ ID NO: 4391 - DNA, 2843 bp, Oryza sativa
tgtgcgcgccacaattagcagcatacgctaaatttaaatttaaagctttgttttactaaatcttgaaatgttttggcggaaattcaaagctttcagccgtgagatgtgccaaatgtttttaagtaattgtataactctgaaatgctcaacgaaagactacgggattaacttgatgatttcgagtttgaattgattttaccaatgcctgggattaacttgatgatttggggtttgaaactttgaattaattttaccaatgctgatttggggtttgaattgattttacgcctgaattatcagatatctacaatcgctctctgtaaatttggtttctatagaacatactacaatttatactccactactgttttaaacctggatttcctctgaattaaatttaccaatatctgcaagttttcagaatttacagtgataatcagggaagactcatcgtgtcagagctactcctggtcacaccggacgaggcggccgcgtttgctgcacagcgcctgctcgccgccggccgccgccaccaccttcccgtagctgtaccggagcggcatccttcccagcagccggtggaactccgtgatgcaatcccctctcttctcccagtgcgccgcgccccccgtcgagctcaggccgacggccttcatctcctcgccaccggcgccggcgccggcgtcggcatcgtcgttcctcgggtcgccccagtctctgatgctgccggcctccaccagcaccggcccctcgccggactcctcggcggcgacgaagttcatcaggatgtcctcgcagttgcgctcccggtccaccacggcgcgcgccgcggcgagctccggcgagcaggagtactcgcggaggaggcccgcgccgaggacgaggagcttggtgagcaccatggagtagcgcgcctgctgccgcgccgccgcgccgtacgcccacctcccgcgggccaggtcgaggtggtgggacctcgggaagaacccgacgagggtgcccgggcgggcgcgctgctgccaggcggcgaacgcgaaggagagcgcggcggcgtccgggagcacgtcgtcgtcggcgacggccacggcggcggtgcggatggacgggtgcgggaggaagcgggagttgagggaggcggaggcggtgcggtggagggtgacggccggcgggaagcttgacaggaggctgtccggtgtggaggggttggaccagagcacgacgacggcgaggacgagcgggtgggcggcgtacgctccggcgatggcgcggagcagcgggagccgccgctccgagtagccgctcaggagcaccgtgagccggtccggcctcagcgtggccgcgtccggcatggactccactccgcagaacgcctcttcttcttccacaccggctacggcagcggcggcggcggcgagcgtcgccgcgagcaaaaggaggcggaggcggcgatgcgacgccatggacgcggtggcgagatctggttcaagtgttcaacgctggagccgttgacttgtgagttaaaaatgtctcgagttggattctgtgtgggccccagtgtcagcctcggtggtgagtggtcgtgtacgatccgacgtggactcgcgtgggcccggggcgtcaggcgcgggagccgttcgttttccccgcggctttatccacacgaggagggagagaagaggtggagagggagaggcgaggtgtaaagaggcggaacaatggcggcggcggcggcggcggcgcattggtgcggcgcggctgggctagacaggtgggtgggccggtggcggtgtaccttgtcgccggcggctctgccggtgccgtcgcggcggacgaggaggaagggcggggtcgtcggctgcgtgtccgttccaagggaggtcgccgcggccgcggcggtggagccggcggcgccgccggaggctgaggccgagacagaggttagttatcttgcatgctccctgagctcgccggcgctttgccggagcagtgtgtggtgcaaccgtgcaatcctcacaccgacaggacgggcccacgggtcagcgagacagcagtggtgccctgtggtagttctctctaggaagtccaaccgcttaccatttgtaactgtcctaaccttgacctccctccgccgtccgatctaccataggcggttcagatcactaggggcacgtttggatcctgggcaagggtcaccctagccttgcctggcaaggctatccgtttggaactagtaaaatagcttggcttttaagggcgagttagttgtacagggcgagaaaaaccttgccggctagggagagccaatttggctcgctttcgacgtcaaacttcactcgcgtgaaaatattgtctgcgggcgacgcggacttctccggaatcgctgatattctctccccgatcaggagacgaactcattagcagcagctcaatccggaggcgatctcatccgcgtagactcctagatttgatttcttctttatcgtcagctcctaacctcttctttctgagatacatggtgtgctgtcttgttcaatcgctctgtcaggaagttggtagagttagaaaagagcgtctttgagatcgtttgctttgtgctagatgcagcctttgcgttgccaagatcatttattatgatggtacttgattaaggaattctcttgatttctcatttgtgaatcctaaaatattatgggccattttggtttgatatcaaaatgttgccataccaattttttggtaggttaaatagtaaatgtgatgatttggtttgaagccaaatattttgtaatgactatattcaatttggcacaattctagaatgttcttcaccacaattcaaaatt

SEQ ID NO: 4392 - DNA, 17470 bp, Oryza sativa
agcacaaacatgtttttttcaaatacgacaataagaacattgtaaatacagaagcatatctgaggtaaaaacaacatggtaaaaggtttatcatagtatatactagccaacatatcgacagaaagctgtgaaaacaaatgatatataaggaaacatccatgagagaatcatcactggaaacaaaggtggcacaggtattttgctcctgttggtttgtgatattaaaagaagcatagctgtgagtacacttcaactattattttagcctctggtgaaactggggagatgctacttttctgctgaatttaaattgcaatattacgttttctttttgaaaaacagttctaatgcttagtaacaagttaataatgggtcgttttggattgaagccaaaacgtgaccctaccaaaattttggtaactttaacagtaaacatgctagtttggattgaagccaaacaattggtagcgcccacgctcaatttggctacattctagaatcttcttcactctcatactaaattttggctttatattggtattaaaccaaacatagattagctaactttgccctaccaaaaaattggtagtgccaaaatttgcctagattttggtaccaattaattggtagggtagagaaccaaataggccctaagtacccagtaagtggctttacagtggaaccttttcatatgagcaaagaataaaaattgactaaatctagaaatgctaactactcatagatgcaaacatttgtcaaagcaatgttcataaaaatggcaaatctatttaacaggtaatctatggctccaacagatggagaatatgggtcgttttggattgaagccaaaacgtgaccctaccaaaattttggtaactttaatagtaaacatgctagtttagattgaagccaaacaattggtagtgcccacgctcaatttggctacattttagaatcttcttcactctcatactaaattttggctttatattggtattaagggcttgtttggtttagtaccctaccaatatattggtagtgccaaactctaggcaagctttggcactaccaatattttggtagggtagaattgtaaatgagtgtctttggattgatgccaattgagagccaaatttcaaattatggtgaagaacattctagaattgtgccaaattgagtataggcattaccaaatatttggctttaaaccaaatcatcacatttactatttaaactaccaaaacattggtatggcaacattttggtatcaaaccaaaacggccctaaaccaaacatagattagctaactttgccctacaaaaaattggtagtgccaaaatttgcctagattttggtactaccaattaattggtagggtagagaaccaaataggccctatattccctattttcttgtttaaagggaactcatacactgcctagttactctaccatgtactagcagcatttagtttgggcaagaacagggccatttctgcaagtgatttgaaaggcacaaaatcatatgcaccttctttagcagatcattatgctcactcctaggcttcgcctcatacccaggcggcgggaatgggaaacacctggacattgtgcccctcctggaagatcaatcacaaaactgaatccccagcaaagcagctcaacagattctcccaacaaatgcttgaattctttctcatgcaacatatcccctctctagcatatcatccccagcgccggcaactgcgcgaggccggtgcgccgtaaccccgatttccaaacactcagatgcacaaatcaatcctcaaaacacaaaatactacatctagacctaaacaaaaaaatctcccgattctgtgactgcttggagcgatccagctctcagaaacaccagattgctcttgattactctctaatttgaggagaatccaagtggtggcatgaacagtacgtgcaatcctcttccatctgctcactccccaccaccgatccccaaccacagccacagcagatgaaactgaaaccccggcacggcaccgccgcgatctgagtcgctgcaatctccaccggcgccgccgaccgcagcagtggcgccggagacgcagcgcatcaacaccaccgccgccgccgccgaagcttccggaaaaaaaaaagtatcgggcaccggaaaccctcacaaactgcttcctctcgatcttgaaccaaaacctactaggaagaggccccccgatctagcgaatctttggcactccacgcctccaatccgtcgtcgtggtcagtggcggattcttcgaagaactcccagaaaaatttcccaagaacgcgaactcgatcagcgggatttcgcctatctctctcggtcctgagactttcctcttcgcttcttctctcgctctctttggggattggttggttgcttcgccgcagcgaaaacctgcgagtgcgaggcggcgacgcaggaggaggaggaggaggaggtgaggtgtactacttgctacagctgctgctgctggaggaggagacgtggaggaagcggacgaacaccatgtttgggttacaggtgtcgagctaccactgcagtgattcatcatccttccgtcattcggtttgttgcatggtagactgtagactggatgttttatggagttgtattatacagtagccctctataaaaagttattttataaataaatttttagaaaaaaaaatattttacaaatagactcttttcttaggctgtgttctttccttcgagttctcaacccctctccctcgttttccgcgcgcacgcttttcaaactgctaaatggtgtgctttttgtaaaaagtttctatatgaaggttgcttaaaaaaataaatttatctatttttttaaaaaaattagctaatacttaattaattatgcaataacgtgtgtttcgttttgcgcgccgggaggaggaacgcagccttagcctctcgcagtgcaaactatgggacccatacccctaacacaaaaaattggtccaaagacagtcaccccacagtgcaagcacccatatgtatgtggcttaattgaatggagacacggatgaaggaaataaagcccacagtggggcgtgaccctagggcgagcagccggtgaagcgcaaggaaatttatttcctcacctacccctccagagcttctctcttcctcgcccttctttctcaacctcttctcctcctccgctccatctcgtcgcctacctctcctcccggggcggcgggaggcgtcccctgcggtggcggctggcgcggcggcgggaggcgtccccggctcgtgctgatgccgctcgctcgccgaaggaggttggtcaccagctacatcgggctcaccggcatgcgggcgagggagtagggcgtcggtgtccgtggcgacagcgtgaggtgtccccggcggcggctgctgctggtgcggtgtggcggcgagcagccagagcgtggggcggcttagcgttggatctggccagggtcggcgggaatggacggcgcgacgccgacgggcggccggcggcgggagcggacggcttctccacctcactgatttcccccttccttttctctaccaaatgactcagagaaattttgttgctttgcttttctctaccaaatctgtggtgggcgtttggggggattttcctacgcgtttggggggatttctgttcgtcaatgatttctttggagggcgatttggggttttctacaggtggattcggcgcgagggcatggggcagcgaagaaatgcccacagcgcgcgtgcctcccttttccccggccgctcgcgccctcgctgcaacgaagtattgcgccgcttaggtaggggacgggaaacctagcaaaggcgcggtccctccctccacgtcgaccaaaaactgagctggcgtaacgaggttccgcgccagctcagtgcaccgtgagaggccttagtgtaatgttattgacgccgagatttaatgtctcgttgatatcctcgttctcctgagatatgttattggtgtgaaaagggattgataccagtgacagatttgtttgtaaatggatctgagaatgattagaatgtaaatatttttttcttacatgaacgcagagcaatattttttttgagggattatttgtaagttttaggaaggactaaagtataaaagaacccagtcggtgtagacttgtcgctgctacggacgaatgaccgtacgatttaggacgacgacgaaggcggcgccacgcggaataagttcactttgggtctctctatttgtcgcctagtccgattttcgtctcttaaccgtaaaaccgggtacgactcatccctcaatttactaaaaccaggcaaatgagatccctcggcggttttgaatgcggttttggctgacgtggcgcttacatggcttgtctgactaggtcttcgtcccacgtagcattgacgtggcgcttacgtttcaattatatctcgaaaaaataataaaaagcgtggtcccacatgtcagctgtacacaaaaatattttataagtggtggggcccacatcaacctcacacctctcttcttccctctcccttctctctcttcttcctttcccctctctctctccttcccgggctgccgacggcgtgggtgggccgaggagcaggcgagctccggcggcggcggcgggcgtggtcggtgccgcccccgaccggagcgccgcggaaagcgcggcgttggcggcgggtgaccggagaagtgcgcacgccgggcggtcggagtcggcgagcgccgcgacgtcggaatcggccaaaccaacccttcctcctccccaaaaataccctctctctctctctctcttcgccccaaatcccccaccgcctcccccacctcctaaccctcctcctcctcctcgtcgttgccgccgtcggcgtcgccgagtcggcttccgaagcggacgccatccacgacctggccaagtcggtcccggccctagggtgggatggcgacaacgtgtgcagcttcgagggtgtcacctgcgagcggggcgggtcggggaaggtgacggagctcaacctcgccgacagggcgctcgccggcacgctctcctccctcacctcgctcaccgcgctgcagctccaggggaacgcgctcgccggcgccgtcccttccctcgccgggatggcctccctcacccgcctcgccctcgacggcaacgccttcacctccctaccacccgacttcctccttggcctcacctcactgcagtatctcagcatagacaacctccccatccagccatggcccgtccccgacgccatcgccaactgctcctccctcgaaaccttctttgcctccaacgcgcttcggtcagggggcggcgccgaccacgctcgccgccgcatcccgccgccgccgccggagctcgcctgctcctccgcccacccgcgccgtcggcagcccgggaaggagagagagagaggggaaaggaagaagtgagagaaggtggagggaagaagagaggtgtgaggttgacatgtggggcccacgtgggccccaccatttataaaatacttttgtgtaccgctgacatgtgggaccacgctttttattatttttccgagatataattgacacgtaagcgccacatcaatgccacgtgggacgaagacctagtcaaacaagccacgtaagcgcaacgtcagtcaaaatcgtcttcaaaaccgccgagggacttgtttacccggttagcaagggacataaattggactgggcgacaaatagagggacccaaagtgaacttattgcgcgccacgctaataccatggaggcccaaacccaatctgggccgtcaaatcagccacggtcaggcccagccggcccatctccaccttgcaatcgtgccaaggcctcgtcaccgcggcggcggcgcctccggcgtacggacacctggtgatgatgatgatgatctcaggtgaaaacgacggtgagccacagcactgagccttactttctcacagtcaactcctctcactaccagtagtggcttctgactgatcagtgagtgactgagttagtgagtgacagatatcaaggctgcatcttccaagaatcatggccaccaaaaggtctcctgattgcgttgacatatgctctgtgattcatgatgtcgcttcgttttcaagggacagaaacatgaataaccaatgcagattcagacattcagtagaggccagttaggacatacagaacaggctgtgatggtagatgagtttggttatgtgttcaaaggagggaaaatttggcttggcttggctttgctggcctctgctaactaccaagtgtgtgacagttgagatctcattaactccccaggttttcctccagagattcagagtgcagaagtagatgcatcatgttcattgttttcaatttacagttaggatggacagcacaatctcacggagtcaattttgattcagagttgggagatctgggaggtcggtctgactgatcactttgctttttatttcattggctaaatggactccattgtacagacgaaccatcattgtttcagagattagggttcaagagaaaaaaaacctgaaaaaaatattactgtcatgtttcagaaaaaagaaatcgtcctgcaggaaaacacactcattttagctccgtaattgacagatggggctgaactctgaagtctgaagtcatgaacgtctagaagaagtcattgcaacgtgggttatctttacaaaagaaaaaaaaaagatgaaaaaaaaagagaagatagcaagacagcaaaagcgaaaggtaaaatggaaggtggctcatctagatagttaaaactgtagatgatgaattaggatatcctttttcatcagacagtggtgtcccttgatccaagatcgatcagggaaagcgaaaggttgagcctgcccattcctgcaccgatcgatgcatggcttgaaacttgtgatcgagataatggtacaagatgagtgagcaagagagcataggtgtactacaatatcaccaaaagaaaaggctccaaatcttagcttttgccactgtccactcaactagtgcaggtccaaatggtgatcttggaagctggaatcctgaaattagctaataaaaaagaattaaagcttcagaaaagcaactcctagtacgatgtttcttttctgaaagatatgtagtttgcaactaggcttctcggatacagagaggatgcgatcaaagatgtacgagtcattttcagttaacatatgagattcatcctgcccagcaaatggttaagaaaagaaaaggtgagctttgaatgctgtttggaaggcacaggtagtggtactgtagtagcagcagtacagacagagttaaatccattaaccaattctttgatgatcaatgggtcagggagctggccacaatttcacaatctggctccatatgtacagtgccgaggtacagacaaccaatttatcacatgagatttaggatgaacagcacatgagggaaatcaatttagactggatgcagttaaaggaaaagacaagcaacaatctcagcagtacataagttgtctcctacctgtgaaaaagggtcagaaatttgcaagtggtgaggcacaaaggggaccaaagtctggatgaggtcaatatttgcctaaccttatgcttatactagtcaatgactggctaatttctccagctcaccttgtccatggggaccaagcttatgatacagtaacagccaggctagatcggtagtaccaatccggtgagcaatgcagttcaagaggtgatactagatatttattggccttattgagtagtttagttgaaatgtgataggttatagaagtaatgctgtaataaaaacaggaccctttttgacatgaagcaggtgaataacatgttcagttacttcaactaataaagtgattgtcctggagcacaatgccaaacctgaactttttttattagtatttttaaggatggcaagcatcaggtccaaattgtctccctggccagctgctgatagatattccatttttcatatgctgaaaaagatgtgcaggcaggcagattttgttcttcatcatcaccacagctcatcagactttcagagggctccatgtagtttttttgtgcataatgtattattctctgtggtcctatcttgctagccatgcccaatgcatttctcttcacacttcacaggattgcctcagcatgacatgaacacattagctaagcttatctaagatcaatggtgtgaactgtgaaggcaggagtggacaagagcaaattgggttaagcaggaatccaatgtgtacacacgttgcagcaatcttccactcacacttcccccttatgaattcagaattcacactaatgcatcagtcagaatgttaaatatagatagtgaagtcacaccaaaattggaagtttggttgaaattggaacgatgtgacgaaaaagttggaagtttatgtgtgtagaaaagttttgatgtgatggaaaagttggaagtttgaagaaaaactttggaactaaacacggccgaaatgaacatacaaaacagcttgaagctcaagaattactgtatttggtaggagatttttgatgatggacacatcatcaggagttgctttctgaacagcatgaactgggggctgcatcactgtagtcagtcactgtaccaaaatgctcaatgctcccttcaacctttcatggatgctatctaaaaagcagcagcatcgattcccaaacgattgtattccattccatcaccaactatccaattccactaccaatctctcacagatagtgccagagaaatcagaagcaagtcacacacacacagaattcacaaacactccacatgcagtaagatgctctggttcagagaacagtgcccaaaactggacaggttttataaatgcagaaagaaatcgcagcaaagtccaccgccaaaatttaaagtatatatataaatttttttatggcagcctgaagctgcttggatttacacccactacagcatcttgtgttcttgttgctggcatgatcattcaggaatcacaccaaatgagaccaaatgaacaagaacaagatggtaattaactgaaaagaataagttcagaggaaaatattctaaaccagaaggattccagtgacatcatctttcttcttctgccctggctccttcctttttttgctctgtcatcttatctatactccagtccatttctttttctctctactagccatggattttgcttaagcagcataagcaaaattcagcatggttgattgcatccatcatggagaaacaaagcagcaatcttttaaacaaattagcactgaaaaaagttgcaggacgagtgctagcctccaaggacaattgggtggacacgtcacgacgcggcggacatggccatggatttcctcttgcccttggcgatcttggccgtgtcgagcttgtagtagtggacgaaccagtcgacgaagcggcggaggccggcgtcgaggggggtcgccgggcggtagccgaagtcgcgcgcggcgtggctgacgttggcgtgggtgaacggcacgtcgccattgctgggcatggtgacgacgcgcttgttcgccttcctgccgaggagcttctcgaggatggcgaccatgcgggtgaccggcaccggcgaggtgttgccgaggttgtagacgcggagcggcgccgggccgcgcttcttgccggacttggtgccggtgctctcgccggccgtgtcgagcgcgccgaggcagcccttgacgacgtcgtcgatgtaggtgaagtcgcggcgcgcgtcggcgccgtcggcggtgcggaacagcgtgatgggctcgccagcgacgatgctgcgggcgaaggagaagtaggccatgtcggggcggccccacggcccgtacacggtgaagaagcggaggccggtgatggagaggccgtagatgtggttgtacgcgtgggcgatggcctcgccggccttcttggtcgccgcgtacagcgacgccggccggtcggtgcggtgctcctcggagaagggcgcgtcggtgttgagcccgtacaccgacgacgaggacgcccacacgatcgccggctgcgggtcggcgtgcttggcggcgacctcgaagacgctgacgaggccggcgacgttggacgcgacgtacgtctgcggcgcgcgcatcgcgtagcgcaccccggcctgcgcggcgaggtggagcacgtgcgtgaagcgcgccgcgtcgaacagccgctccagcagcgcggcgtcgttgatgtcggcgtcgagcacggcgacgccgcgcgacgccagcagtcgctgccgcgcccgcttcagggacgggtcgtagtaggagttgaagttgtcgagccccaccacgccgtccccgcgcgcccggagcgccagcgagcagtgcgcgccgacgaacccggcggcgcccgtcaccagcaccgacaagcccccgtccctcctcggcgccgcgctcctcctcacctccttctcccacgccgcgcccccatacgccaccgccgccgacgacccaagcaagctccggtgcgacgaccgcgacgccgccctgtgcttcccgttcgcggcggcggcggcggaggagaggtggaaggagtgggacagcagcgacgggtagtgcacggtgaagaggcagacgaggcagagcgtcgccaggatggttgcccggaacagcaggtgcgacgacgccgacaggagcttgccgctcgccacccggcgcaccatcagcgccccgccaccaccgccccccagcttcacccccttcgccgccgcgtccaccacgccggagtgcggcatcatctgctgctgctgctgtttgctgccaaggtgttcgaccgcgtgcgcgagagtgtgagagtgagagtggagtgaggtgagtgagaggtggtggctataataacacgcggcgtggtgggcagcgggcggaggaggcgcgggagggaccgcggatttgggtcgttttaccggcaaaacaagctgagtttgggtgcagcggcgacgcaaccgtgtgtgcgtgtgggttgggggagacgcgcagctgcggcgtgcgggcgtgtcagaaatcaccgcgtcgaggtgagagtggatttatctgggttgctttgccaggtagtggccggccaatcaactcaaagcacttgcccacacggtacgtaggagtactgtacatatacaccctctcaaaaagagggggaaaaaagcaggttggacatgagccttgtagttttgtagtccaacgcggtttcatttctgagttgatgaaaatgtagttatatctttttttttcccgtgttgggtagagttggagtgagcaagaaatggtgagaaaatttcttgttttctctgcgcatgtttccaaactcttgaaaggctgcggttttttaaaaaataatctatagtaaagttacttaaaaattgttttaatttatttttaaatttgaaacaattaactcttaattaataatatgctaatggctcatatcaatttacgtatcaacttttcgctcctctcaaactcagccttaggatggattataagtgaggtcgataacagttgtaccattttgaggaatagaaagaaaatatttatcaaaataggacaaagagactccgggtgtgtttaggcctggtttagttcccaactttttcttcaaacttccaactttttcatcacatcgaaactttcctacacacacaaacttccaacttttctgtcacatcgttccaatttcaatcaaacttctaattttgacgtgaactaaacacacccttagttcacaacaaaattggaagttttgttgaaattggaacgacacgatggaaaagttggaaacttgtgtgtagaaaaattttgatacgatggaaaagttgaaagtttgaagaaaaaaattagaactaaactcggcctccatatctcagaatgctacaagagatactatcgccgtgtttagtttcaaagtttttcttcaaacttacaacttttccatcatatcattccaattttaatcaaacttccaattttggtatgaactaaacacaacctataagagacattaacctacttgatctagcacctgaaaaaagttttttgaagaaaaaccaaataaataaacgctgaccaccgtctttattctttcgacagaataacaaaccgaggtcattgaacaagttggaaacctgaacccaaagttagcaccaccgatttgatcatcgacgacccgatagacaaacctccacaggtcttcattgatgacctcgtctacgggatagttacaaacaaagagataaaaaaaaaagcaaaatgactattggcagaccaaactccatgaacatcatggaaggcaaacatcatgtagttataacagtatcatttactcattaaacaagttgaaatataagtatttatgtgcatatatgaatatttaggtgccaaattgccagtgcaactatgagcattatgaacagcgtctagaatggagagatcaatcgagtacctgagaagcgatctcttgatctagacctaattggcttaatgaataatgacatctaggtgaataaaatagatcaaagtggaaaggtccaaactaatatgaaattttccatttggtatatagcccacgataacatggtgagcattgatggggtctaccttataattagctagcttatcctcgtctttgtgattaatcgtgctctccctccttccgattttcaatgtttgttgttatctacttttagacatatgtttaattattcgtcttattttaaaagatcatgttattattatttattatatttaatttattttactattagaaaaataaacacaacttatattttaaagagaataagatgaatggtcaaacataaattcaaaactgaacggcgtcaaacattaaaacccaaattaaagggaatatatactcagtactactccctccgtttctaaatatttaacgccgttgacttttttaaacatgtttgaccgttcgtcttattctaaaaatttaagtaattattaattattttcttatcatttgatttattgttacatatacttttatgtatacatatagttttacatatttcacaaaagtttttgaataagacgaacggtcaaacatatttaaaaaagtcaacggcgtcaaatattttcactgtgtttagttttaaacttccaacttttccatcacatcaaaattttcctacacacataaactttcaactttttcgtcaaatcgtttcaatttcaaccaaactttcaattttggcgtgaactaacacacccttagaaacggcgggagtatctagtactaaataattgccgttttcttatctttcagaaaagtacttgtctttcttaacatgcaatgcatactatgtacgttgtactttgcccagtattcaactctgatgagttggatgacagtttggaaagggtgtgaacggatgaactgatggtgctttggagacttttgaacatggtttaatttgctggccggattttctaatgcattttccttttaatttaattacatttacctccatacttcatcaacacgaaaagggaaagtgtcttcccataggccaatctgacaaagttagataatcctaatgacaagccatacaggagtcaggacaagtagtagagtatcagtatatagcctaagcccctatgcaaagctttgagttcatgaagtgattataataaatcacagcgcttaattaatcacatcatggcaatgggctagcaaattagggcaagttgagccgatggactcacttgtaaatcactcctgtttagtataatcaatgcgactctgaagaaactttctgcatttctgtatcatttctttatgtcaaactgatgtgtgatttaattagtagttgctcttccaagactccaaaaattggtattctagtcctgaattcatgatcgatttgatgacaaaggtcagcaactcacatgcacgcatgtactacagcattcttcatccatccaacggttggtacgtggtatatacgtggtaatagctagctagcttcgtactaagctagcgccattactgtcgtcgccgtatgatcgatatcgatcgcaatgtgcagccacgtgcgaccccacgcgcgcggcggccgcacgccggaaacgggagacggtggttggccgccgggatatcagaccggcggcggccggccgccgccggctgaagtagtccgtgtgcatccaacacacagctagctgcacgcaactatagtcagtgtatggtctagttgagttgtgtggcaacgatgacatcagtctaagggcctgttagttccccgaaaatttttcccaaaaacatcgcatcgaatttttggccacatgtatgaagcattaaatatagataaaaaaaattaattgcacagttatgggagaaatcgcgagacgaaccttttaagcataattagtccgtgattagccataagtgctatagtaacccatatatgctaatgatggcttaattagtctcaaaagattcgtctcgcggtttccaggtgagttctgaaattagtttttttattcgtgtccgaaaactccttccgacatccggtcaaacgttcgatgtgacactcaaaaaattcattttccccaactaaacacaccctaattgagttgcgcttcagtatggactaggttgttgtcctaaccctggtattttctgataaagtcggagtcgcccaagtattggtgtgatgacgataacattgcgtctttgccagtgtatgggagccctgttttcttttagcttgttgtacatgaatggcttttgttgagtacgtagagctcggttgtcctgctctcgtttttttggtagcttagtttagttggtggaatgtcgtaatagttgtggtttttacctagttttctctaattaatggtgcattgtacggtttggtcccgttctctccttaaaatgggacacttcttctatatataaaatgtcggtaacggtttgactgttagaaaaaaaagaaatccgtgtatagtcacgaaattcctaagttggtgggatcgagaaaagtgatatgctacttatgagatgtttttacatgatgggatgaaaatgtcccccgtgttttgggacggtattccggactcgaggaacactacattcgaccatgtttcttgtgactacaaaatacttagtagtattgtcgttgcgtcctcactgccaactattttctcgaatatcgttgatatttgaaaaaaaatggctgatcatcgaaaaacactatttgtagttcaggttcaacggtgttggcgtgtcgctggctctatcaccgtgcgtccatagtgcaaaggtgaatagtagtagtgcttccagtggtaactgattgtctgaattaactacagagagatattagtgtggttgatgagaccttggtataataaggcagtgatagtgaccttagtttctgagaatttatagtttagtttataatggcacggtcatgcatgcatgctgatgaagtgatgatcattgctgatcgatcgaccatggcactgaccaaattaaaaagaaggcgagaccacaacaggtagcgatatatatgatggtccataagagtcgtatcatgcaacaaattgcaatgtctgaattagttaggcagggccattattaaccaattgcatcttccttcttttgctacagcaagctgtcaagctgagcatacgtcctcctctccgcctggccaataaatccttcataatgtcaggatcagtaatcacttcaatgaccatcttgaacactgcctccagtgctcacacaaaaacttgtcacttttctgaatcattttgctgttcttgatccagggaaagtctgtagctagggacaaaatcgatattatgctatcatagatttcatcggaatgtcaactttttagcgtgtcatttacaaaataccttcataactaatattctaacatattatttttattttagagtgatattttagcgaaccagaatacattctactgaaccctctttctactatggtggtgggcttctgagaagtgatggacctacagattacagctcattccaaagtctgaagattcagagacagacatcactcgggtatcgtagagatcactcatgcacatcgcaaacgacaaggcgagatgcgcgtcgaaatcgattcaatgcactcggaggactcacctagcagcagacagcagctcaagaaataaaaaaagaaagattcagattttcagaaactgacgcgcttttcagaggcaacaaagcaaaactacacgggatgtttgtcgctgacctctgagattaccactaaactctaatactccctccgtcccataataatattaagggattttaagtttttcttataatgtttaaccgctcgtcttatttaaaattttttaaaattattatttattttatttgtgacttactttattatctacagtattttaagcacaacttttcgttttttatatttgcaaaaaaaaaattgaataaaacgagtggtcaaacgttacaataaaaaactcaaaatcctttatattgtaggactgagggagtagtaggttttttcggtacgttgatcgagctaaactaagtttgtgtttagttaattctaaagttgaaagtttgggttaaaactgatatgatgtgactaaaaagttacgtgtatgataggttgatgtgatgaaaaagttggaagtttggatctaaacatagccttagttccaaagtttttcttcaaacttccaacttttccatcacatcaaaactttccacacacttaaacttccaacttttccgtcacatcattccaatttcaactaaacttttaattttagtgtgactaaacacatcctaatgcgtaaagatttgcataagctacacgtagtccatttatggtgcttgttgtttactattcaggatcgtacgagagaacgcgtccttctctgttcatcgttttctgaactttgcagagatcagttttttgtccacatgtattcaaggttttttgacgagtttctgactgtattgaatgcttagcttaaggagggtgtgttgtagttggggaaaataaaatttttgggtgtcacatcaaacatttgaccggatatcggaaggggttttcgaacatgaatgaaaaaactaatttcagaactcgcctggaaaccgcgagatgaatcttttgagactaattaagccgtcattagcacatgtgggttattgtagcacttatggctaatcacggactaattaggcttaaaagattcgcctcacgatttcctccataactgtgcaattagttttttctttttatctatatttaatgcttcatgcatgtgtccaaagattcgatgtgatgtttttgggaaaaatttttggggagctaaatgggtcccgt

SEQ ID NO: 4393 - DNA, 38844 bp, Oryza sativa
agggaacccacatggtgtgccacctgtgcgggtaccagtacccgaacgcgcaccccagcgcgaagcagcggcgtgcgcaccgcaagaactgcggcaacccgtcgtcgccgtcccccaccgccgccgctgcccacgccgccgtggaggagggcgacgggaagaggctgctgctgctgcgaggtacaaagcaagaactgctgccgccgccgccgtcgttcgcgggtgattgatgcggttttgcgttttccagatgacggtgaagaggcggcggcgggaggaggaggaggaggaggagatgtgggagatggcgcgagcgcggtggcggcggattccggtggcgtcttgcccggatctgcgcgggaggttgggaatgtagcggatgacgatggcaatgcaggttctttctggatattttgctccccccctgaatattcttgttttttctcctttgtttttgttggtttctgaaaaggaaaattttggtagagattcgatttgtgaagggtttgttgtttgattcccaattatgtttttattgacaacaacttccatcaatcagtgaaattgtactgttgttgctgaggctggaattgaggtctgtggtgaaattttttattaccatatgcaaatgttcagagcatgtggggtgttcttgtcatcttcagggttaggctaatgttctgttggattagtgatgatttggcatggcttagtgtttttttatatatttaactcccgaactgtgcattgatcttggcggaatagtacttcattaatcagtttaatcagtgaggctggttcagcttgtttcttgttgcttagtgtagttctgtatactttagtagtactagtcgtaggattttcaccatcttgcaaaattgtccccattccgtgctggtagcttaacttcactcgcataaagtcctgcatcaatgtaaacattcattgtgctacatacgtactcccctacgcattcttgaatgcgttttgctttcgcaagtgcgtataacttctttgtatacattgggcactatagtacaactctcacggcatatacatgtgctcattgggttggttgtcttctttcagagcgttcttcttctcctcctcatgttagtgaggttcaagtcggcctcagtaaatgcacggaagattgtgtcgtcattggtgaccacatccctccttccggaaacgactctaaggccagtggaactgagaatgatgagattcagagtggagtcgttacgcggttaaccgaaaatgtaccacatcttgaagatgggcatcactctgagtcagctgttagttctgatcagtgtatgggtagcacttcttgtctggtgcctgagcatggagatggtgcaagattgagctcagagttctctgcagatgaaatcaataagttaagtgtgatgtctctagaaacagttactggattaagtaaagatggtattggaaacaatgaggatgatttctccggtgtggagagaccaaaggcagtggaggaagatcgatcagtcaatgattctaatgtggtttccaaagagcaaatcccctgcgaagaaactgtgtcatccatggagcaaagtgaagttatgtttactattggaaacaatgaggatgatttgtcctgtgtggagagaccaaaggcagtggaggaagatcgattagtcaatgattctaatgtggtttctaaagagcaaatcccctgcaaagaaactgtgtcatccatggagcaaagtgaagttatgtttactaactcagtggaccatgtttctagttcaaccaaggaacctgtcaatttacttgaggataagatgtcttgtattgagaagcatgtatgcctagacgaaactagtagtaatgatttattccaacttgctagtggtggtagccattcagaggcatcaggcattgacaaaccccggcatcaagctgattgtgcctctctgacgccagatcagttggtaatccccaaggagatggatattgatgaaggacttcattgtactgatgcaggtgaggatttgagttttgactgctgtccttttgttctatgtttgcggagattcttttatttagttgatttagtctattttggctatcagacagtctttatgttactcgttatgctcatagcggtaacagttgtgaaaatgcttagcctaaatacaccaacatggccaatgtcacactcttattatccagattaccaaaatcatttcttgaattttatggcatgccagctcatggtgccttggtatatataggcaatcatggtgccccctttcttatgtaaaagttgtctatgttaggtagaattaacaacttcttctgccttaaatttgagatctctgggaacatgtccatctgtacctcgcagttattgtatgtcccatatgttccttgtttacgtcctgaaatttcatgatcatttttcagatgtgggcatcaaaactttgtcaagtgcagttggacatgctgatgaagatattactgctgttaacctttcaaagaatgtttgttcacctcatttgacagtgggcgatgacatacaggatagtgtcaggcaaacaattgatatcactcccatgccacctcaagttgatctagcagaggttagcacatcctctacttctcatgagatcgataaagtaagtagtaaagatggtattgatgaaagaaatccaaatgtaaaccttacttccgatgaggtaaatgaggtgcatggcatagatgttgaggaaattccacatattgaagatattgctgcatataatgattatcaagagcctaatacagtgcgtggtactcgtgattttgaagaagatacgcagaatgaagaaattattgcagaagctagttctcacaatatcactgctgtacagagcacatgtaatgttgaagaaaaggaacagattgaagaattcgatagcaattcttcctgtaacaagatccatgagataagcagcaggggcgttgaagaaacaaaactgactgatgttaatgtggaaactgcagatgagataaatgtggcaagcagcctagaaaatgttgaagaaaagcagagcaatagagaaaccattgcagacccttcagttgagattgatgtggcaaacttgccaagtagccttgaattaagcaagcttgatgtagaaactagcacataccatactgcttatgaggccaatgcagtgaatgccatggaaaatgttgaagaaatgaagcagaaggaagaaatcgctgtagcgcccacttctcatatcaacacgatatcgagcaccactaatgatgaccagaagcagagtgaagaactctctgttggccctagttccgatgagattactgtgccgcatggcgaattcagtgttaaggagaagactgaggagactgtgtcagaccctacatccaacaaaactgatatggtaagcactagtggcggcgttgaagaacagaaccacggtgatgaagtaacttcaggcacgaatactcatgaggaaagtgtaatattagtacacaccaccgataatgtcgaaaagaagatgaacaaagatcttacttcagaacctgcagacaatgttgaagaggaagtgcagagtgaagatatcgcaacagaccctacttctcatgagagcagcacgctacatatcacagacggtgctgaaagcaagaaacaggatgcgaaggtcgctgcagatctcgctgctggcaaaattgatgtgccacggagcgcagatgatgctgaagaacagaagcatgaggcgaccgtcagcacggatgatgatctcaaaggagatgatccgagcgaaagcaactcgccgcagatcatagacggtgctggagacaaggaacaggacgcagaaaccgctgcagatcctcctcctggcaaaaccgacgcgccacccagcacagatgacgctgaagaaacgaagccgaaggaggaggagttggagacggtcggcacggtggtcgacgatcctaaggaggaggacaaggaggagatcgccgacaaggaagtgatcgtgaattcagacaagaaccacgtctcactgaagtccctcctctccgagaaggccgcagaaaccaaggagtcgaagaagccgagcaccaaggatcgcgtgctgtcgttccggcggcgggtgtcgaaagacggcggctctccggcgaagccaggctctcccaaagcggcggtttcagggcagcagcaggattggaactctccggcgaggttaccggtggagaagaagcctaaggggaagaagcagcagtgggtgcccttcatttgctgcccctccatgagctgatcgatcgatgatgttatatatgaatataaatctttagtgtgccacattcttgtttcgttttttttttacccattttgctcgtggactaagaagaattgcattttgtttatgcacgctacatgctattctgcctctgcatttcatgcaagtattaaagcagtgtcagtttatacgtaagctgtctttggtgatctaatgttgcgcaactgcattgatatctcgcattagacatctgcacttctagttcacatctcagctaatgctctcttgatctttcgtggcaaactggacccgacatggcgtatggttgtaacattcatccagaaagacactagaaacttgacgagattggttcaaatatggattgcaatttgaaaatctcaacaagaatcatcatcgcccgacaacttgggaagtaacgtttctcatcagtgcaccactagaacaaagattagccagcacacaaaatctaagatatgtcgtgagtgtcctgtccttaggcagcagtaacaggttccgatccttgcttcgattcagctccagatccagctttctgcgaatcagaagaaaaccgaattagaacagacttgagggttgtgaaaagtatagagcttcagagtttcgcaattaagatgggacgagctgcttacgccgtcttcggctggctgcttggtcatcttggcgaacatattgctgtagaatttggcatccttcttgttgtactccttgaccttttccttgaggttcttgtatgtcaacttcacatccctgaagataagcagtgacaagatcagtttcaaaatggagtgactactaaaactagtatgcctcccttggggagacgcatatacaaaacttgcctgttatcaggatcaatttcaagtgccttcttaatatccacctctgctaactctaggtcagcaagttgcatgtaagcttgggccctcctgtataaagccttgacattttggctgtcaagttccagaacctggcaacaaacaccagaatgttaccttggtttaccaaaacacataacaaatgggtcttttgcaggaagaactgaatgtaccttggtgcaaagcttctcagcttgcttgtaatctttcagcttcagcttgcaggcagcattgttcaagttgcaggtaaccttcagttgcttggattgtttcttctcatcttcgctaaatgagctgtcatactcaatgaattttgcagcctggaataaaatagatagatcatcagtcagtaagggattatgaaaacaaagaaaatcttgacgaaagattagttatttgaacaagtgttcaacaaaagaagcatgccataccttctcataacgctttgaagccctgacatatttgcccagcttgaacaatgcattcccctcttctttctttgccccagcagtctcaatcttctcggtattgttcaagtcccaagattctttatcctgtgtaccatgaataataattggttttcctgtgcactcatcatagcaactaaaagaaatgcaaacaaatatatagcataaagagaagcacaccttcacgaatgatacaagctcaacctcataaatcacagtgctgtttggtggaactacagcgagatcctgctttgactcagtagaaccaaatgcgtattcaggaggaattgttacaagagcaacctcgccattcttcatgtttagcacagcacggtcaataccatcaatgacctcctctggaaggaaagtaaatcaaaagggaacaagttgttactacttatcagagtaagaacattatttgtttgaacttaaaagtgtatggccagcatagaggaagttgacaaagcaccttcatcagtcttgaattcaaatggctctggttcatcatgccccttctttgtaaatattgtaccatcctgaagttttccagttattttgactgtcaaacagtaaatgcaactttgtcattacaggtagtaatcagacactgttgacctctatctgacatataggaaagaaaatagtaagatcagtaagcatcacgctttggcatacctttaacaactgcaccttcattgggccgctcataccctgtaccctccgtcagaactttcttcaagattttcttatcatcacctatttctgtgactgttttccatgaaaccaactcaagattaacaagaagagtggcatttggtggcacagcaccttcctcaccagctgctggtctaccattctcaccaaatccatctgccattacaaagttttaaatcttttcaatcaactcgaaggaagagatggaaaaccatggaaaaggtgtgaaaccaaagaagcttacattgtggcttaactgtaaggagcactttctctgcttttttcatggttttgacagctttcgccagcgcagggcagaagaaacctggaaccaaactttatttcgttagcaagcagctgattgctcaataatgaacaggaaatgttgacaaggagattatgggtaatcaccatctttaacagtaaattcagcgccctcagactttgatataacagtgccatcctcaagccgagcctcatatttcactacagcaatgcaaagggtcagctacagggcaatatataagatagcaatatgtttcaatgagcaaatattaccaaatacttcatcaagatcttttgggttctcccatttttctccctccttcagtatcttcttgaatataccaccatcttggcaaatgtccttgacacttgtccaagaaagcaactcaacatcaaactgcagtgtggcactggctggaatagttggaggtgaaccagattcaccataggccaaatcaggaggaatggtgaaaacagcattttcgcctttcttcatggtcttgatacctagatcccaaccttttatcacttgacctggatacaagttcaagaaatagctggtgagcatttaacagaaaaatagattttgcaatcccaccatcacaagcacatagcagagaaaaaaaagcttgtgaaatggtatgtgggtctatactgagaataaaacaatattggtctcttacttaatttagagcaattttttaaacagaaacagtccattcaacctctagtaaggtcaacaagttaaacaccactgctgctacattctctacctaatgaaaaagctgatccccaaaattgtaatagcaccagcaattgacagactaaagtgatcagtgcagtgttacagttgagcatcactgggtgatatcagccacagggccattaaacatgctccgggactggaaacaatcacggttttacttcccagtgaaaaacgaactaggtattaagagcccttatctcagaggtatctgtaatacagtcatttctatttgagaagaataacatatcaaaagattagtaaacatcaaaactagtagcatgtaaacagaaatatgaatagatgactgaaaccatgcccaaaaatttgcacaaaatggtgattggcacaagttgcgatcacattggctatgagatgtgccatcaaaaagtaagaaggcagaatggagaaggaattgtaccttgtcccaacttaaacttgaagggtgtcccacggtcacggcttgaatcaaacttctttccatcaagcagtgtgccagtgtagtgtactgaaacatagaagaaaggttcagtccgattcagttacacaaattctaagataaacactaatgacagggtaaatctgatctataaatcaatccgctatcatcatggaacaataaagttgttaaacagcaaataatacaggcatttagtttttccctaaaaaaaaccatacatcagcaacaacattaacattgtaggtatgccacaatcatccctccttcagaaaccatctccccgaaactgtaaggtcacacaaccgtacaagcaaacaagcaattgcaacagaatttatactctctctgccaacataaactcacaataatgtcgcagtgtaagtgtaactagcaaaagcaaaatgcgtaatcagattaaacagtaaactagattaatgttccaatctagctcgaaatgaacatgagatcgatcagacaagtggtgaagatggcaccaaatttcacctaaatataaactcgcactgttgcaaagctagcaaaaccaaaacacatgatcagattataaacactaagcagatgtcccaatctaactcgaaatcgacatcatcataagaccaagcagtgaagataacaccaaattccacctaaatttagcactaattccgcatccaaatatcccataaaccccaacgcatggcacgccaaagtccaaaactaactctgcatcccacaacgaacacatctaaagttctaaaccccaacacgcaaggcactggttggatcaactccacgatttgaggaggaggaggaggcgaggaaccacgcaataccttcgacctcgtcgccgacctcgggggtctcccacccctcgccctccttgagcagcttcttcctgagaccctgcttcccgatctccttctcctctccgaccttcagcggcggcccgtcggcgccgccgaagtcgcccatcccgtcctcccccatcatcaagtcgtcgtcggcgccgggcggcggcatctcgaagtcgtcgtccatggcgcggggcaaggagaggcgagatctgcggctagggtttcgaggccgaggcgaggtcaccactagggtttggactttggaaggttcgagaggagcacgaggcgatgatgaggaggaggagggggagggtttaaatggatgtgagagaatcaggtggtgggcttctagagtgttccgaggaggaaaataaaaacggaaagcgaacggcccggatggatgatggatggatggatgcttctggatctgactcaagtaatcaagcaaagcatcaattaataaattgtttccgattaatcacttctttaaatatcgcatcaaatatttttgattaactgagcagccgctgaaaatatgagctgaaatgtgttggttagggtcggaaaatcctcaacgtcgggcgcctgatgcacgcaaaaaaaaaaaaaatggggtgcccccacgccgcggctcccgcgcgctgcccccaccacgcgcgccccattgtaacaaccgtccgaatataacgaaaatgccctattaaaaggatttgttttatatttttttttcaccaatagtgtttcagctagtgtacttatgatatttcactgtgtatgaatcatgtaatggattttgatattgtttaataatttcatcttgatggacacgttggttgttgatgtacacggaatttaagtgttggaatggcttcaaatcgtatgttttcactttttttaagaattgaaacattctttcgctatttgctaaaacattgtttttatataaggtgaaacaacatttcatacgttgtagcaagatgtttcatgaagtgatttggttgcgtttcaactttttgaaagattgaaatatattttttttgactagggagactgaaacatttttgatctatttagtgaaacatattcgatctacttggtgaaatagcgccctattttttttaaaaaaatcgggtgcccggtttgtaggtgcctcagttaaggtcatactaaactttgcaagagtttcgataaggaacaatttcgaaaggagtaaatgtgaagtattttttgcaagaatttttgtaaggaacagttccaaaggagtcaatgtaatgttgccttatgataagcattaaggcaattagattgcagctaagattagaatatgatgaaccacagtgtaagaggtatagtggtaactccaaagttgagctgattagtatacatgcaaaatcagtttctctaacatttggtagtaagaaatagtagggtacctttaagacctgattaccaagcataaagaataactgaaagtaaaaaagaaaagagaaaaagaaaaagggaacaaaacaagatcgtcagcatcactcttcactgcatcatttacatattgggttctgattgcaccttcttcaacatccagacatccagtatccacattccagtactgcctagtgcctactttagcccactctacttcccagttttgaaggcatgcctaaatctgctatttagtgcaaccaatgataatcacagttcacaaggattatgcttcgctgtttacatcaacaattcctcatagtccacactcacctcacttccttacaagattgtgaaaattacattaatgcacaagacaacagcaaccaaatgaaaattttggtacaataaggaattcacccttttctatgacttgctgccagtctgatcgattcatttacagtgttatcctattggatgcaggatcaattccatagaagcatcacaattctcgtgattatgtttagctctagaacatccaaatgtaagaatattctaaacggcacgagcaaagtgcaacattcaaacatccccatcaattgcagataattatggagtcctcatcaagccaacctgagatcctgccaacaacataatagaaagtttagcagaatttaggagctatgcacaatattgtacaaagaacacaacatctgtaatgatttcaaaagaaaacaccatttcatggactatgttgatttatagtgggcaatttcattctcagttccaacaaagagtgctgatgatgcagtgcaagagatgcatgaaccaattacggcatgagaccttctacaatatcatgtattcagcaataagggaaattaaagcaaccaagaattctaaatatggagcttatttttagtagaggcattgcaactcaacagtgaaatacaacaccatatccttctcaagtctgtctaccttaaatactatatagtacattgaatcttaattagatataaaaatgcatctggattaaactgggttctctaataataatacaaggtgacctgttcccaggttctctaataattttcgacaagtccagaactggtgttaacttgaataggaaaagcactagttccacacttccactgcgctgctgaacatcctaaggacatgaaaattttaaatcccactgtgggcatgaccacaaaccttagattattcattctgtttgccttcactacacgactttaacagattagctgaagccaagtgtggccttagtaccaaatattgcaaacacatcacaggcatattaggcatgatccaacggcataggattcacttatggcaacacgcagaatttaaagaatttctaaatatggagcttatttttagtggtggcattgcaactcatcactgaagtatattaccattcttatctagtctgtctaccttaaatactatgcaaaacataggagtacattgcatctcaattagtataaaaaaatgcatatggggttttgacaacattaagctgggttctctaatataatatgtggtgacttgttcccagtttcaagacacatgaattttcaagaagccaagaactggtgtttaagtaaatagcaaaagaacttgttccagtatgctgctgaacatcctcaggtgtcaggacataagaaatttaaaatctattgtgcatgcaaccacaaatctgtcatcctgtttgccttcactacacaatttctaacagattagtgaggttaaccgtggccttactacaaaatatagcaaacacatcagcacatcacaggcatattagacatgctccaacagcatttcttatggcaagacatacaatcaaaagaagaggaaatacaatattccaatcatacctggaaatccaggagcactgccatgccatttgcaaggcccaatggaaaaagagaactggatacagttcataatccattcaattcccattcatcgacatctcaagctgctccatcctctgagctagatcatgcttcccacaatgccgcaacccgtcaactacagaattaaaggtcggagcacgaggagcgaatccagcttcactcatctcaacaaggtagtttgcagcctccacgaaccgaccgcctctcacacacattttaacaagcatcacatacacaggacgatttggcgggtgccccttcgacttcatatcaccgaaaaatgcgaaagcatcggcgaatcgccccgccttacagagcgccttgataatcgctgcatacaggctggggaatggccggtggccatcctcaagagctgcatagaacaaccgaaatgcctcatcaattcggccagccttggccacagctggtatcatcaccttgtaggtggagatgtccgggcacaggccgcggctggatgcatcggcgagaagcgccacggcgaattccacatctccagagctgcaaagcgcctcggcgagcgagttgaatgtggccacatcggggaggacgccctccttggtcatccggagcgcgaaggccttggcctcctcgaggcgaccggcgcggacgaggccgtcgacgaggagatccctcccgcgcaccggcgggtggaacccgcgctccgccatgtcgtcgaggaacgcctgcgcctcccggagcttccccgcggcgcaccaggcgtcgacgagggtgctgaaggtggcgcggtcgggggccacgcccttgcgcgccatgcggcggagcagcttgtacgcgccggcgaagctgccgttggcgcagagcgcgtcgaggagggcgttgtagacctgggtggtctgcgggcagccgaatcgcgggaggcggttgaacacctcgacggcctggtcggtgaggcgggattggccgtaggaggagatgacggcggagaaggtggagggggagagcgggaggccgagggcgcgcatgtcggcggcgagggaccagaggtgggtgaagaggcgggcgcgggcgagcgggaggagcagcgcgtcgaagtggtcggcggaggcggcgaaggagggcttggcgcggagccaggcgaggaagcgcgcggcgtggagcggctccgcgggggcggcggcgcggatgacgcggagcgcgaggtccggcgggaacggggacgggaggcggaggcggttgagggtgcgctccaggtagaagtcgcggcgcacgacggtggagaggtggtgcaccgccgcgaagtaggcgtccttggaggtcgggtgctgcggctgcgcggcatcgggcagcgtggccaggccgcgtacgccgacgccggcgccggcgccgaggccaagtccgacgcggcgcagcaacgcggcggcggcggcgggcggcggcatggatcgaagtgggcggcggcggtgtaaggttaggattgggcccattagctgagaagcctaaatgggctagtaggcttatatgggcttcgaacagtttggttgatgggccgtataagtctatcggcctgtctaacagattaacagctggacgatctggccttattgttgtggaataagttcactttgtgaccttcaaaagtcatcgaaatctaatcccttaccctaaaccacaaaatcggatatctcgaacccccaactcttaaaaaccggtgtaatttgactccctcggcggttttagagggaggtttcgctgacatagcgcctatgtggcagtattgactcggtcttcttttcacgtggtgttgacgtggcgctcaggtggcattagaaataagaaatatgtgtgggacccatttgtcatccaccaaaagtatgggtgggacccactgatatgtggcgcccacataaaccactcctcatcctccctccctctctctctcaatcttcggcgagcgacggcggcggcggtgggagggcgggcgggcgagggcggcggaggctcgtggcagtgggagtacgacgggaacggcggcgggcgggagaagcaggctgcggcggcggcggcgagagggcgggcaggcgagggagcgtgccatgctccgccatgcccagcagctggtacgaatcgttgctcatctccgccacgaacatgcccatgttcgacagcgccgccgccgactgcacccaccacatcagccacgtgtcgccgagcagcttcgcgatgtccgctaagtagccgtctgtccactgccccctgtcgagcgagacggctcctgtcccggcgaggagagggtacaggtaagcgaccaccacgaagatgaccgcttagaacagcgccttgggcagcgtcttgccgggattcttcacctcgccggccaacgtgctgatcgaatcccagtagttgaggttccagaacagggtgttcaggtacagattccaatcgacattgtggaggtcgatcacaagccacctcgccggccggagcctggggagagcaatgagccccatgacgaaaaaagggaggagggagaagacgcccaggcagatcgccacccatccgacgacggtgagcccccgataactcagcaatgtcagcacggccatcaggccaacgacagcgaacgccctcgtcgcgcctctgccgagcgccgggacgccggacttgaggtagtccaagaagaggacggggtagaggacgttgtcgatgacgccgctcagccacttcatccacccctgctggaacccccagtacgggccgagcgccgacgccacccacacgatgtacccgccgttctccgggaacatggcgcccagctccgccgtgatcagcgtctccgggatgctccagatgacgggaaggaccaagaagccgatgatggcgagcagcagcctggcctcgcccatgctgtcgcctgccgccgtcgcccgccgctgcccgccggctgctgccgccgctaggccccgtccctcgggcgccgctcgctgaagagaaagagaaggatgaggagtggtttatgtgggtcccacatgttagtgggtcccacccgtttttttggtggatgacaaataggccctacacatttttttatttctaatgctacctgagcgccacgtcaacgccacgtgaaaagaataccgagtcaatactgccacgtaggtgccacgtcagcgaaaccgcccttcaaaaccgccgagggagtcaaattgcaccgattttaagagttgggggtcgagatatctggttttgtgatttagggctacggattagatttcgatgactctagcggatcaaaaagtaaacttattcctattgttgtacatgccgtaaaaggcaggcattgcatccagctgcacagcacgattggtcagggaatcaagggccgtcgacgcatcgagacaaagctagcaaagttgcatgtatattttttttttaaaaaaaaggttaagtttcatgtacatatgtgtcaccgctcttataaagtttgtttattttcgagacgaagaaaatatatgtttcgtgtgtaattgatataaatcctatattgtactgtatatatagtacttggtaggtgtcacttacgtataggactaaagcatgtcaatgacacatatgcatattactgtagtaattcgaacgccacacccggcatttgctcagatctccgggtctctctctctctctctgctcgtacagtcttatgcctgcctctccccacaattattgctccccgcgaccgtcgtcgttgcagaagccggccaagcacgtatgtcgtcgctggccatcgccgctgctcgctcgcctgcaaggtaggtcggccccagttgcctggctagctgctgctacactgttgctcggctcgtcactgcgtctatagcctatttacctgagcacctctaccatacgaccaatgacagatctaaccagaaataacaatatatctaaataaattagataaaactatagcccgtgttttcatctgcgtatagcaaggaaaagaaaagatttagtgagaacttcacggggactctcatgattctcgcgtgggcaatacaggcttgaaatcccgtccttaattttcatgctagatcgccacccctgtgttacaggcatccgagtcatggtcgtcgtcgtccctgccgattggatcaagcaagctatagcagctagctttggtctttggagctttcccattgttggtttcttcttgtcgatgccagaactgtgccgcccctgctgagctagggccggcctcatcacgttgcagcagggagccctggttttgtttcacttgacttgacacggatcgatcgatgcacggtagaaagtacgtggaaattttaagaagtgaaaaaacgaacagcgtgtgttgtgtgtttgctgttgatgaacagcggcatgcaaagatacgctgcagatgagggcgcgctttggtcgcgatcttcgcgccatatgcttgcagatgaggagtactccggcctatagctagagtcaacaacactgcgacgacgtgtatgactagtgttgccaaaaaacatctgcaacgttctacagcttttctctgtgacggcgtggacccacatgatcaacaatcaacacacggtgcagctgcagtatgtataattataatggactataggagtacaacagccagctcacgcttggagccttgcgattgttgatttgttgtttgacgagtcaccaacatgtatatagcttatttgtctagggaagcttaaaattctgataaacatctgattgctttagagtctaaaaatactggcttttaacttctagtttattttctgaatttcataactatagcttctcagaatctagctagataaaaagctggagtgtttggcggccatcattaaatttagggtgtaagcaaaatgagcgtagcttttaattgcttatcttctctatgttcaaacttacctatccaggtttaagttctaaactttaaatatgtgctcgtatttatggttacaatatatatttttttcaatgataggtaacatatccaccgatagtgtggtgactttgtcgatcctcaagatcgatcgggaagcaaaatcatttaacgttttgctcctattatgaccacttctagatataattaatgtaaaaaatattgtatattgaagcacataatagtacacccatatggccgtatcagctcgtacatgaaagtttaattccaagatccaacccagaatgttcactggaatggaactgacgagcttggtatgtaaataactgtattaatcattcatcatagttaaatctatgtccatattaatttacatatgtgtgcacgtgagagactgcttttaaattaagtaaggttcgtcttatataaacgtttgttaaattagaacgaaggcgcactttagctagatgtatgtcatgtatatgatcgaaaaaggaaaacagtggagccacactctcacggcattatatgtgcagggaagacgtgcttgatagattctcttgggtccgagctgggcatgtgtatacacagtactgcaagatctatgaaacatatcgttgtgttgtatctcagcgtttcaatttgtcgtccaaaccaccatatatatattccaatctttttttattatatacatgacgctggattcttccaaagatcgttgatggggattggggggtgtttatggcagcttgacacacaaggtggctaaccattatacgcaaatagtacttgacatcgttaattttatcatgcaaaatttcgtcgctacgtttaattacttagtactccctccgtttcatattataaatccttcaacttttttcttaatcaaaattcgttagattttatcaaatttatgggggaaaaattacatcagtggtacacgaacttgtcaagtgagtgtaatctgttgcatgaacttgtttggtgcgtgtgaacaagaccaaaatcgtacggcaaggttaattttactgtttttgttattgatttgaatgctatgtaaacatgtgtctcacgaaaatatcacgtagataaagatctatttagcaaaacatataataaggtatattgattgcatgaagaaagagataaaaaatcgagtaacgatgcaaggaatagaaacaaagtaagataaagtagaaaacaaatttataaatataaccattctaccatacgtgcaccacgcatgtcatgtaataatttgtaatgttcaactttgaagaatcagccttgtcgtgccattttggttttggtttgcacgtaccagacaaattcatatatcaaaataagtgttttacaagtttatgtactaaattgcacctacctgataagttcgtgtatcgctgatgcaatttacttgatcaattactactaatttgtatttaagtgtgatcatttctctattttttctggatttatacatgaaaatttgatatattttttaggtgattgcaattttacaatttttcgaacacttgagatctagcaaagatggagagttgtttttttttaagttaatatagaataaaaacgatcatatcaaagaaatagattatagagacataacttgaaaatggttttatttgaattttcaaacaaattttatatagactttttttaaaaaaagaacgtaccgtttaacagttttaaaaagtgcgttaatagaaaatgagaaagttgaagaaaaggacatgatcttagtctattcgtagggttggtttatatagaccttgtatggttctcattttttttacaatggaaccaatttttatcttataaaaaaatactatgttcgtcttaaaatataaaaaactaggataagatagaatacatcatattactacgtgtctagacatcctaatactactactatttacatcatagtattactactgttaatatttatagtattaaaatatttcttatccgattctaagttcttacattttacgatggagagtaccagacattactcaactattctatacatatcccactaccctgtgaatcaaaagctactccatccgttccataatataacaaattagaaccggacgagacatttcatagtacaacgaatttggacagctggtcctaggttgttatattatgggatggagggagtagaaattactttccagctgtctgttcttctcattcggccatcgatctaaatgaaaggtaaggtgaaaaaggttcagagaaccaaaagcatccaaaggatactgttgctgcacgcctgcgacgtaatttcaggaatccgctagaatcgtactacgtacaaatcgtgcactatgcatcggccttctctgtcgccgattgatgccacatttccatgcattcatgcatcatctcatatcctttttcctctgatcacatcttcagacaactgtatctatatgagatgcacctatatatatataagagtccatgattcatatctgtacgtttatattgcaggaagcttagcatctctcgatctcttcttgttgattttgcctacgtgtgtgtgtattgctagaaaaaaaaagggcaggttggaatagcaaaatggccgctgagccaggaacgaataaactgaagatgttgctgtactttcttctcctgatcgttgccactcttgtgattactgcaggtatatataattcgtgagtatttgaagttaatttgcaggcttatatatgtatcgttgacaaatgaatcaatgtttctcgatcgcgttcttgatccctcgattcctcgaatgcttttgtacagaagttggtgtcgttttagctgctgctgctcgggtactctcgccgtcgacgacagaagaagtaccggtggtaacaagtgtacgtctgcccgtacgtaacttctgctagctcgatctctctgatgcatctaatctaaagcaagctagctgtagctccatgatcgagtatacatggctatatatgtcatggagagcttctaaccactgcatcttcttcaaaagtctctaggtcttcaaacagtttatattctcacttagattctgataaaatatatggaaatatatggttagagaaaaaaaagaactaaaaactagaagctaagaaaccaagattgtttagattcttagaaactgactaccgactggtagtttctaagaattttaagcttcttcaaaataggatctatatatataagataataagaagtaaaagatgcataccaatgtgacgaagatgatgttaaaggtcgaatagccttaggtgagttgcttcagtttaattgactttgtgttcttgccatgtttcttgttaggcccaaactgagatatcatcatcatcagaaggagaagcacggggaggcgggagcagccgggcgtcggcggcggcggcggcgaggaggatggcgatcgggtcgagggctccgacgtgcacctacaacgagtgccgcggctgccgccgccggtgcagcgtgcaggaagtccccgtcgacgccggcgatcccatgaacagcgcctaccactacagatgcatctgccacctctaagttctgattaactagctagcatatgcatgcgtaattgttgttgtgatcgaccgatcgatggaggccgccccgggtgtggttttaataaaagtttgtgcatgctaatgccatggcacttaatttagtttggacgtcgtgcatgtcgtgtggttcggttcttgaataattgtggtcgataagacaattaatcacgctttgaacatccagattcctgcaatatataatatgttcatctagttacatatcttctccatgtaataaaatttagaatttcccaacttatctctcactgacatacatgtgagcgagcaataaacccagaaatcagaatattttttaaaaacttcggacctatttggcacatctacaactccggctctagctctagccaaacagtttcagctccatttaaaatgaaagcggagttgagtggagcattctcacaatataaactagaaaggtggagttggatttaggctactccataaccctattctagacccaattcttgaaactaaatttagaagttagagctctatcaaataggcccctcaactccaacttcacccttttttttaagctagaatctaacagaatgatcttagcttcagctgaaaaggaaattaagtaattgtattgaaatgacgtagatgtagatttaggagtttgagccctgtcaaatactgctccatcaaataaaaaaaagttaataaaaaatcaatcctagctatgaatctatatacgcatatattgaaactaggtgataccccgcgctttgctgtaggattcatggataaatatatgttaaatattatagaaatgatgatagttgaaatgttgagaaaataatgtgaggaagatgatttgacacatacttgttgatctctataatataatattgtagattatatatcatgcttgcatggattaaaataggttagaatagtaattgctagtgggtgatgatgtggcatgcttgcatgttgagatttagcttctaataattgttagtgggtatcaactatatagaaagtatagattcgtagctaggattaagtattttatggaatagagagagacccctagctacctgcagatgaaggtatgaccactttcaataagagtttctttcctacttcctccgtttcataatgtaagactttctaccattgtccacattcatataaatgttaacacacattcatatagatgttaacacatgtgtgactagatacattaacatccacgaaagggcatgtagcctagtggttgcagtgacctgagtagtaccccaaggtcctgagttcaaaaatccaaaggagcgaatttcagattgggttgtttgcgggactaagtttcctatttcaatggccgtatatatccagttggatgtagaggccgggtaaaaaaaaacccttttataaaaaaagatacattaatatctatatgaatgtgtacaatgctagaaagacttacattatgaaacgaatggagtattaaataggaaaaatttgacttacattatgaaacaaagggagtattaaataggcatgacacgcaaaaaacgtgtaattggctgagagccatcgtgaaaacatgacacggctgatggacattacaaaaaacgtgcaattggccgtaggacaccggtcgcattattttattatttccgggacaaaagaggtggaaaattttcaaaatgacaagattgcccctggagccatattcccccgcgccaggagcggcagacggcgagagatcctgtgacggcggcgatggctgctgcgccgcccctagggttcttggacacgtacggctccatctcaccgtagagccctctgatccagcccatgtgcttctccgtcgccgccctgctcttcgaccagaacccatagtactggatgttgtagagcgcctgccggtgcgggaacgacatcaccactggcgcgacgtggaccatcttgccgccgtaggggtcgaggatgagcagcccagcaccgtccttgaggagctagctccaggtggtctcccagacttggctgggcatgttcttggacgtacggagtcggacttggccttcaagtacttgtccggcttgctagtgcccctgtccaggagcatctccaatggcttccccgtgcagtagaacgcgaagtagagcatggactggatccacatcatctcgatgcagtcgctcgccgtcaccccgagctccgggaaggtgtcggccatggcggcgacgaggccaaggcgtgtgccgactaccgaggtacagggactcgaactgcacgttctggttctgcaatacgacgcggagaagttcccgccgctgccgcctcggatggcccagaagaggccctcccccatggcggccctgttgaggagcctccccctcggcgttcaccatgttggcatcgacgacgaggtcggaggcgaggccgtgcttccacagcatcaggctgaagccgccgccgctgaggaacccgtcgacaccgaccgtcctactcgggccgtcgcgctgctcgcgcgccgttcctccgctccgctgcgtgtgtgaggaagaagaaggataggagagcaatgtgggccccacttatgattagcaaatagtaatcaccctattaattaggtacaaattagtccatgatgcgtgaggccaggtggttaaaaacctattaaaaattagattaaacctacactgtctatgacatgtgggacccactggtgtttaaagaaggaaagaaaaggggcaatctgggcatttagaaaaatatctcacctcttttgaaccagaaataataaaataatgcgaccggtgtcctatagccaattacacatttttgtagtgtctatcagccgtgtcacattttaacggtgtctctcagccaattacatgttttttgcgtgtcctgtggcaaatttttcctattaaataagatgctatgttagcattttttataacatgacaagaacatttcgtctagataaaatgagttttacaatttatcccttaaaagtactacttacgaaacaatacaaacaaaacaatacattatattgtatgagttgtttcaacccatcaattaaatattttatttattatgtaatattttaaaaaacacaaatatattatgtaatattaatacaacgaagtggcctttgacgcggccggcggcgagggagacgagctgtcttcgccgcggcccgcggtcgccgcgttggtctggtcggcacgataacgacgacgaggcgccaactcaacaaagcagccagaaagaagcttggcgtgcgcgcactacctcctcccaacccggtgaccccacccgtcatcctcctcacccccccacccctccgcgtcaccgacacctcggccccaccgccaacctcacaacgcagtgggccccacctgtcagcctcacccgcctcgccgtcttccacccgtgcgtgcgtcccactcgcctcccactcacctcctctgcttctcccaccacctcactacctctcgccgcgagagcagcagcgctcgtgttcggtcaaaagcctcgccgcggcgagctcgagctcattcgcattccggaggggagggagggatgggggacgagtcggagggggagacggaggagtacctgttcaaggtggtgatcatcggggacagcgcggtggggaagagcaacctgctgtcccgctacgcccgcaacgagttcaatctccactccaaggccaccatcggcgtcgagttccagacgcagagcatggacatcaacggcaaggacgtcaaggcccagatctgggacaccgccggccaggagcgcttccgcgccgtcacctccgcctactaccgcggcgccttcggcgccctcctcgtctacgacatctcccgccgctccaccttcgacaacgtcggtcgctggctccaagaactcaacagtatacactcctcctcctcctcctccttcaacattttttattttttttaactcaacctgttctctcactgctattttgccaaccacgcgtatggatagatctgattgattcttttttgttaatttcgttgttcttcgaaagggagctgtactagtgttagttaacaattcactgtcaaatttgcgaacaaagggagcaccatttttgggttcctactagatagtgatttgcatgggttgttttggggataggagtgtcgctacacaccggacggattgcaggacctggtctgaatctggatctgaatcttgatgcttaggcagcagtggtgtgtgggggaatgttccaggaatgaatgcgaggaccactatgagggtgtggtgtgattatgcgatttactgatttgggagtgtagtgattgtagacaatttttttggtaccaaattatttgggtgtccaaggtaggtttgcagatttatgaagttaggaagctgattaacttcagttggttcatcagtgcttgagatgttaagcgtagtaattgctgtcttggttcgtgcaatattgaccctgctagaaatgccttgaccctatgagtgatatatgtcctccggttattccgattaagttttgtcaatatggttgaagcagcatgaatcatggatagttggataccgattttcttagtcacaactcacaataggatttacagataagatcatgatctcagtcactattagtactctactttgataaatcggcagttcggcacacgacctttgtgcttgtgttgggaaccttttggttccgtctttcctcttgttggaggcaaaaatttagccttttgtgctggaacttggaaccaacatggaataaatgcagtaatgtactgtctaggtccttcccttttatgtatcctttatgtaggatgcatgactcttatctggaaaggtaaagttttgtgtaaagcaaaactacagtactaatgcaatttatgaggcaggtacaaaatttatccaaattacaaactgtggcctaaccaacagtcagctagtaatgcaatgaacctcaggatgatacattgtaataattcatgttgtgtgctagtttttttattcactgtaagaaatttcagaatactccagaacacaattttgtcaaactgcacattacttgtgtgtttcttcctgtattttctcagtcggcatctatccttctgtagtgtccttcactggctcgtgaacatacatacaaccttacatgtagtgaaattttggttctatgtatcttgatcataaacttgtagcctagtaagttatcttatgagcgctcaagatgatgctatgtttgtctatgtatgctcccttatgatttttttggatgctactttattgcaccctttaaactactaaggatatccttgattatctgttatcgatttgcttactgaagaagtctaatattgttcgtcaggaattaatattgtactatatatatgttctgttctctgttccgaagaatctcttccttttttggtagacttcaagggaggactcaaaagagctctaattaataattccaaagcaagtaatactcactgttttctggaagcaacttactatgcactcataataatgtgtcgtgcataagctttggtttcttgccatcagagtgacagacgcatatagtattatagtgctacagctattgtcttctcttgtttgatgcttttacagctttgttccatgcatgctcaccacccactcacaagaagtcatgagttgcacttatggttgtgtgctgttgcatttgttccacaagatttttctatctgaatatagcttcttttcattcatatgtagaaatgtattttttggctggagtagcgaataactgttcttatattcaatgcagcacattcggacacgactgtagccaagatgttggtgggcaacaagtgtgatctggataatatccgtgaagtgccggtagaggaaggcaaagcacttgctgaagctgaagggctgttcttcatggagacctctgctctggactcgacaaacgtgaggacagctttcgagatcgtaatcaaggagatctacagcaacgtgagcaggaagatcttgaattcggactcctacaaggcggagctatccctcaatagggtaagcattgagggtgattcgaaggatgatcagaaacagtcaaaccggtttggatgttgctaggggttttagtacattattattattggattcactgtgatatgaaggttttttgttcattaatattattattattatctgtaaacttgtaatccaaattgttttttggtttggttactctggtacacactgtgacactgagatacaaagtgagagaagaatagttgctggtaatgaatagttgagaggactgctttgtgctgttacctgaaaaattcatgatccccaactttgtcaatttcttgcaaaagtgtgctagccttttgtatcttccctcacaactatatttcactgttcatacttgaaatcggtggatacaggacacctcttgtgttgagtcagttttttctatgaattttgtgtagttcatggattaacttattcctaacttttttttacgtatgttaaaaagaccgtacttgcgattgtatgtgtgtagtgccgtatatacgagtagataaaataaactggtgtgtatgagtcttcagtatttgtttggggggaaattttcagttttgtttttatttctaggattggagcaaatgggctgaaaaatgcgtgggccgtcgattcacgggcctggaaaggatggactgttgttgttgtgttgcgggcttggggcatataccagggtgggccgattggagcacaaagcagagtattcgtcataatcaacattttaatcactccttaattgcattggagagctataggaccaataatattactttcatttggaaatatatatgagttgtagagttttattgcgtttgaccattcaaattatttaaaagttcactataaatgtctgattaaaacgcatgtaaaatatagaacaaagggagtgattaaacgtgagatggataaattcaagaaatggataagaaaatggttggacagctagcctgtcaacaagatggcattgcctgtcctgtcctgtccttcctcctcccaacacatacctatatatacaaaatgcaaacacaattaacaaacaaacaaacaaacaaacgtgcatacgaaatggtacaagtagtgccaagcacgaaccctagttgacttcttctatgattccacgaactccatcgcatgtctggctctcctgtgtgtatacatactgatcttcgttcgatcatgcaggatgcgaaacattgcatgcatcgtcgtctccagctccggtgaccgacggattgatcagatgcagaagggtgggggtggcgcgtcgtcgtcggcggtggtggtgaggatggggccgtgcggcggcgacggtggcggtgcgagggacatggacatgcgcggcgtgggtcgcgtggtgagggtggccgtccggcacggcgccgccgtggacgccatgtccgtcctgtacgagcgcaacggccacgaggagtggaccgacctgtggggcggccctggtggcacactttccgaggtactacattactctacttcatttatccttaaaaaaatcgcggaactttggactatgaatgtgaaagctagaagtttattttttatagaatggaggaggtatacacaatcttaattgtactataatttcgttgttaattacccctgtttcaggttataaaacgtttgtcaaagtcaaactgttttaagtttgtctaagtttgtagaaaaaattagtaacattttcaatgcaagacaaatttattatgaaaatatattcaattattgatttgataaatctaattttaatattataaatattactatatttatctataaattttcaaattgatcgaaaccgtttgattttgaccaaagttaaaacgaacctgaaacagagccctaaattcttaattaccaccgttccgttgtagtgctagaatatggaaggaggacattgttgtatccggatgataattaactctctttttgtagttcttttggtagctgcatctaattaatccgagaatctttagctaccaaaatagtttaaaactttattttagtttcgaaactataagcatttttcatattcttactagctggatactcacttaacacctataaattgtggtttagtgttttggtaacaataaacaagtactccagtctttgagacgttgacacatttttctcatgtaatcttgatcactaatgtcaatactaatatatgtctatacgagccactatgttaattactaattagaatagttgccgacactgatactcaaaatttgaagagtttgatgttgtatttcgaaacaatctgatctcactcaaattcgtgatgaaactttctctctgtttttcatttttctccccagataagcttgcagccgggcgagtacttgacgagcgtggcggggcactacggccgactagacggcgacctcgtcgtcaggtcgctcaccttcgtcagcaacatgcgggcgtacggcccgttcggccatgaggacggcgtcgcgttcgacctcccggccggcggcggcggcggcggcaagatcctcggcttccacgcgcgctccagtcgccgtctcgacgcggttggcacctacgtcaagatcggatagatgacgaccaccctggcgtcacagctgagcagatctatctaagttctcccctctataacaatttttagtttttaaaatttattttaaaatataattaacttattcactaacgatctctttctaatcaattgtaactctacaccattcaatgttacgggctatctacatttctcatccaattgtaattttcctccatttaattttatttttttaataactgtgtagctagtttcaagaatatttatagaattctaatcatattttataagatctcccttcgattttaattaattatgaagtaacttggtataaagcgaaacctatttcaatatgtcctggtgcaaaatgaaaagtgaaagtacatgttcaacctagcgtaaattatatgtcctggtgcaaattacaatttactctttttttaattacacataaacttttctttaaaaaaagagtggtcataaaaaaatgcagtgaaaaagaaatctttagtaccagtactcaaagatgatttttagtcccggttattttaacctagactaaaaatacctatttttagttcgagattatacgtctcgattatacaaatgggcttaaaatgggttgtcaaccggaaataatgtatctttccctagcaggatcaaagctgatataaagtactccatccatctcaaaatataagctttttttagaccctgacatggtctccgagatactactttgaccaacaatatctataaaaataagatgttttaaataaaatgggttgcatattatgatagtttgtttaataacaaatctagtaacatcaattttacgtgattaatcttttttatttttttctattaataatcaaagttaaaaatatttaacttgtcactatgctaaaatgtttatattttaggatggagggaatagtaataatactccctccgtattttaatgtttgacgccgttgacttttcaaccaacgtgtttgaccatttgttttatttaaaatttttatgcaaatatgaaaatatttatgtcatgcttaaagaatatttgatgatgaatcaagtcatgataaaataaataataattatataatttttttaaataagacgaattataaaacattaaaatatggaggtagtatcaaacaagtgtacatggagagggggagggatctcacatgcgcgtggccgcatcaaccaaccaaccaaccaaacgtacatgtacctgcagacgagtcaagcgtacgtagtcgcacgcgatgctagcaatgttgctatcttttctgtaaaaatatttccttggcctggacacacatgacatagtactgaaccggccggattgtcgatatggaccattacatgcatacaacaccgaaattaagcaaatgatcgaggagagttaattagctcatgctcatatgcatgcacgcacgtatacgcccctctctacctaaccctagcttagctttgccccactactagtctcacaaatggcacaatgaccaaaaagaagatgtgaaagtgtggctcacgactaaacacatgttctatgtgcgtatttattatgtccgttctgaaatatatatagattcctcgcagcctaataaggctctagaagtaaaaaagattaaagcacatttcattaatagaaaatgtagtttggtggatcggtagagatacatagaacttcttgatttatggttcaatttgttttaaaacaaattttaaactttaaaagccaatttattttgagacgaatggagtatacaataacaaccttttgaatatgtcatccctgtgccacgtttgcgatccaatgggcgggggttccttgaagatggtcatggtcccaagctctgtatataggagtgcccctacctacctagctagaggtaaaattgtgacaccaaggtaggggaagaaatgtggtgcaatggactgagacaccataccagagaatttaacatgatgcatcactttcaaattcagttattatatcttctcatccttagcgcattagacggtagtaataataataatggagtatagcacaagtacaagctagctaggtagagtagtggtaggttgttccttgagacatgcgtgggggatgtgtcaaatgcatgcatgctaattgcaagctagagtggtgtgtgtcaatcgatcgccaattgtgtttgtacaagtgtgcgcccactgcaatattgtgggcatatgcatatggttgcatatatctccggtagacaagtctaacggtagcgcatagcccactgattttcaatgtcttgttcaattcacgctgtaatttttaaggcactgtttttttaagctaatggaggtatggattatacttgtcacgtttctaaatagtacgattttaacatgcttttattttatcttataagcatttgttaactttattttaatatttaagtaatctttgtatcaacttatcaactaatcagctgataagttgaattgaacggggcctaattcaatatcatgctgggactctccaatatacatgtaaagataaccttaagcaaaaatttaagagcactactacatatactaaatttttcttactaaacttttgctaacaatcatctcaaccatttgatttaagtagatagaagttataaaaaatctagatgcactcatagcatgacacatcagtgttagtaagaatttagaaagaaaaagtttgtatgtgtagccttttccaaaatttaatatttgtaattcaattttatgccttggaagacggactcacaagagaatatgtttatggatgttggtattgaatcttcatgctaatatgatgaatatcaattcttttttcttggtgggccctagcttaatgtcaagaatggacataaacatgatagcatttggtataagtaaaaagaaaacgtatgcttgtgtgtttccatcttatagccattgtgtgtctcggtcttaaagacgtcctaaggctgaaaactttagggccggttattttgaagcggttcttccaaaggatgaggacgcataatctggtaacaaaatacaagtcattttggatatatgctaagttatttttacggaacaaatttttggtatgcatggatgtcgtttttacgtgcctaattgattgaaccatgaatgtggacatgaagttttgtggcttcaattcacacatttgatataacaaaacaaaatgtaaaagaaaaagaatcaaataactgaagtcttgctaatgtctcgcatgcgcatcatacattatattagggagtagtatgaattttcaaggccagaaaaaggacacaactatgattcagacaacatagatcataatgatggtaatcatagcatcattaacaaaaagaaaaaggagagaagaccgacccatgcataaccctcgtggggaagctaaggggcactctcagcaccccaaagacatgggagacaggacacctatcaggcatgaatgatcatagatcttgaaactttgaaccacataactatatataaattacgtacagagtgaacaactaccttaaatagatatcgacatgattccaatccattcgactcaaacacacaataatatcaattaaaaaaagagtcattttgctcccatttttgtgtgatcaatagagacaacactcaaccccaatcctagcggataagggcatcatcaccaaaatgatccactgaactcaaacacacacaaaaaaaagggaaaaaataataataataataatagaggttcaccaaaataacatatatattggtcctgactcccatttttcggattgggatcacctgcagtttgaatagcaactacaagttaagctactgcacgcaatggcagccctccattttcttgatgaacgaaccatatcattagctacatatcgatttataagtgctcaacaattcttgcaatagtgatctacagtactcagatgcatcttgatcctcggtttcggatctaacagctagcagtggactgcataagttgcatcgacactaccaactgcaccggatccgaataccatttttacaagagcaatagggaagccatacatccctagctagcactagtggataagggcatcatcatcttggtaggtcacttgatctcccatggcgtccgcacttggtccatgggccatggcatcacaggaactatagttggcactagccccacaggccaggttaatgcaagcttaattatgctgccagtagataagctgccaattggctaccccactgcccttttaactctttaacatggcatcaatgccccttgtggaccatatatacaatagcacttaaagagctgatattttagcataacaatccctttaaatcacacatacatatcactctcaactccggatcatcttaaagtaatacttcaatatctggacctatctgtcagtgactgtttatagtgatctgcgcgcgctaagacaaaaaattcatggctttgcaaagagtgtagctagcaaagaaccttccaaatgagaattagctagctgtggcatctcaggattccaccaaaatattgtcttactttgggcacagagtagaagaggaagacaattagttagttagatgcatcgcatgctgtcatcagcagggaagaagaaccgatcgaatcggttcgatggcgacggccaacctaacagccaaattcgcagtcgatcattgcaactcacaatgattataccttcgatccatccggtttttttgggttttttttcctctctttttgagttttttccccttcgttttcttctcttttccgatccttttgcgtggttggacacatcaagcatggccacgatggggattggtgctagctcagctcgatcccctaatgcatgccctgattgcagccacttcatccgggttcttccgaattatcctcagctggcctttttcctgtaatcaatttaatttcttcactggtccagtcttgtgattattaattaccgtttagacttgcagcaactggatttctggactagtctgaatctctccaagccgccattgctgaaatttctatgttggatttctgggtactgcgttcgttcagccagtttccaactctcccatctacttttccgcacgcacgtttttcaaactgctaaatgatgtgtttttttataaaaagtttatatacaaaagttgcttaaaaaatcgtgttgatctatttttttaaaaaagctaatattaattaattatgtattaataaaccgctatgttttccgtgcgcactattcgtgttgggaagcagaacgaacgaatggagcctgtaagtctagtttggatcagtgtgtgcaatggacggttcacaataatttggtgagccttaggaaaatcctatgcagcgaaaaaaatatatgtggtgaatcctatttggtcgtttccgatggtttaaatgattttcacacgaaacagttcaatccttagttccctacagatgggctagctagcaaaacagaaaaaatgttgtgttccagataggaccagattctgttgggatcaaacaatcaatcaatcatccattgggatcaagatggctatatatgagatgatgatgaggcaattgcaatgcatggggttcaattgaattcttgatggattatcatcaccatctcatcgatcagagagtgatgagaaatgcatgagggccataccctctcagatctagcagccgatatatcattcatttatgagatttactccggtccaacaaaaaatatctcgaggtatagctatctcacggtaccaaatcatttccgattgttgaatctatctgggcaggatatgatcgttggatctaacaatatacatcctaggatatgatcgttggatctaacaatacacatcctacccagttaggtccaacgatcggaaacgatttggtaccgtcagatatcggtacctcgagatactttttgctggacatgagcaaatctcttcatccattcattcttcaccagctcaattgttaatatgatgcatgcaacagtgctgtgtgctgcgtctgagtgcatggaccgatcgacgaccgttttggatcatctgcatgctggggattgctactgctgtacctgcaggagcatgagcatccatgcatgatccatccatttccatggccaatccggttgccgtcgccgtcgtcgctttcaatccaacccggccggcccgtcgacagcagccgccgacgcccggattaattcacaaacaaataaagcttgatgcaattgccattatatatcatctctgtttttaaatgtacaacattgttaattttatcttgtctttggcgtattttcattaggatcgatatgacatatggtatctaccaaaattataatattataaaattagttataaagaaattgataactatgtttacatactaaatatttgacaattattgatagtaatagttttagatgtttgaccaaataaagtaaaccatgtatatccttttaaatgcatgagactgaaagaggcccgcctttagagcgcatgaattttacatgaattaatcaatatacgaatccgacaaatgtatttcgagtggatattgtttaggcaacatcagaagtgtgaacttaattaggataggcaacaaggctaggagatatgcatgcgcatggcgatcgatcgattagtatggttggggttgagacttgggaggtggtaagggtaactttatagggatgtccttggacggcagacatggacggtgagtggttatacaacggcgttggcgctacagccatggggtagtaggaggatggtaggcgtgaccgacagtgaggatgttagatctacaatggttagagagtcgaggaggcggcggcgcaaaccaccaaaggtgaggaaaacggacaggagaggaacaccttgctgctgcttgggcatagcaaggaggaaccggaaggagggaggaggccggtcgggcagggtttgctggtggcttccggtaccggagagcagggaggcgggggttccgtcaagcatcacacgtcgtgtgaggaatgaggggagaaagagagaataaggcaattaaggtgggagagatgttactaactgcacgaatctagcttggcatgatctgaattttatatgtatttttggtcaacggaaaagtaggtgatcccaatatacatacatgcatgcatccttgtaaacacatactacggccgtctttagaatacaggaattttacacgaattaatcaatcagcgagaatccgacaaaggcattctcgagtggacgatgttgatgccaacatcagtactgctctaaaagtgtgaacctaattgggatatactccctccatcccaaaatatttgatgccgttgactttttaaaaaatatttaaccgttcgtcttattaaaaaaattaagtaattattaattcttttcctaccatttgatttattgttaaatatatttttatgtatacatatagttttacatatttcacaaaagtctttgaataagacgaacggtcaaatatatttaataaagtcaacggcgtcaaacatttaaggaaggagggagtaggcaacaaagctagcagacatacatgcagctactggtgatcgatctctctcgagatccatccatggacaaaattacgagagaccgatcgatcgtacgagctgagtgcaagctctgctccatgctccagctcaaccgagacgtacacatacttgccagtagcttcttcttgttggttattgttgttgttgggtcgagatgagcatatcatgtgatgcttctgccgatattcgcaacgtagctggatggcaagggctgtgtttagattcaaagtttggatccaaacttcagtccttttccatcacatcaacctgtcatacaaacacaactttttagtcacatcatctctaatttcaaccaaaatctaaattttgcgctgaactaaacatagaccagggtttggtttctttggttgcctttcttggttgcatgtttccggcagaaagcagctggctcattgacttgtgataaatctttgcacgaattcagtactcctcgagaaaataatgggggatctctgacatgtatgtctaatgtcttggactctaggcaaaaggcaatgggttgtgttaagtactgcttttgatactgctccttaattccattttcaaatataaggatttcttgtatttaagttttagactataatataaaagtatttttttcttgattttccacgatttctatcatttcaataattttaaagccaatcaaatttcgaatcgaaatgaaatctacaccatccaaaattcaaaatttgacaatcaatttttttaaaaaaaatcttttgatgtaacattaacatttactaaataacctaaaaatccttatattatttaaactgaaggagtagaatgtttttataatgctactccatccgttccaaaaaaaaaccattcctagcatcccaagaagagactagtgaagaataaaaataaccaaaatacccctcattattagaaaagtagtagtgttaatagataggtaaagggtatttaagggagaaaacttatcgttttatgtaccgaggttagatatgattgttgaagttgattttttgtaggagaaaattcaaactccagaagtagagttttttttcttagaacggagggagtaaagtagtagatgagatgagtgcgaaaagagagttgaaatttttgcacactagaggcagcttctttgttactgtactgacaaaggtacgagtgtatcgttatgtctgtcagggcttaaatcttgatagcgagctaggagatgatgtgttcctttgaaaatgtctttttatattcagtttgatatggtactataagtttttcttgcttaatgtctatgagttttggcatctctattacgtgagaaataaaaagatgaggatgggcaatttacggtgactttctttttatcttggcttttgatttgcccctcataattaagtggatggcatttttcttgttttccacataagtgtgtgtgataatatgacatgttgtccatgagtctagttgtcattaattatctggatacggtaaataagcaattttaccgtaaaggaactaggtctacacacttgacacaaaacgtgggggtaaatatacgatgggaaccatagctaggtggataatatgaaaaccacgatatagaagttctcaaataatttgaaataaattcttgcatatatccccctacatgtgtgaaatttttttatatttttttccaaaaacttctactccctccattttaaatatgtaacgttgttgacttttagacatagcatttaaccatttattttattcggaccattatataagtatcatttattttgtcgtggactattttagcattaaagaacgctttaagcatggcttatatttttttatatattcatactaaaattttaaatgtaacgaatgttcaagtattatattcaaaagtcaactgcatcatatatttaataacagagggattttaaatataatgaatgttta

SEQ ID NO: 4394 - DNA, 14577 bp, Oryza sativa
tactgtaattacatctgacaaatattagggggagaaatttgatgacaaatatctagcaaaatcgtaaaatcaaaggggggccagccggcttttgacagttcaaaagattggcaatttctcctttttttttcatgcattggcaatacataaaagcgaatagtttgcaaaagtggacaatatacttacatgttcatttaaacttcacggcacgagtcttcactgtattgaaatcgctgctatgggccagccggattgaattgggccatacggtggcctgttggacctgggtaccatatataggggtaattaaaaaaaaatttattgggaggcgccatggcccctgccaccccccttagttccgccactagctcacgctatcatccagatccagcagtgcccacccaacgcccgactccatggcgtctccttcgtcgtcggcggagagacgttccctgcgcaccgtgccgtgctcgccgctcgctcaccggtgttccgcgcagagcttctcggacccatggcggaagccaagatgtcacgcataaccatacacgacgtcgagccggtgacgttcagagccatgcttcggttcatctacaccgacgaactcgaggagaaggactccatggcaaccgatttgctccagaatttggtcgcggtcgcggataggtatgatctaagcaggttgaagctgatgtgtgcgcagaagctgtgggagaaagtatcggtggaaaatgtcgcgacaatgctgatctacgccgagatgcacggctgcccggagctgaagacgagttgcctcgacttctttgtgcaggaggagaacttcaaggtggccgtgctgaatgagggttatgctcagttggttcagcattttccatccgttattgatgaaattaaaggtttgttgggagctaaaacaatgcaatggagtgaaaattgatgtggtatctattgagtttaagcttgttacaatgtctatgaatagtactactccagttacttgtatccgtattacttcttctgtcccaaaatataagcatttttttgacttcgatagggtcttcgagatactactttgactaataatatctataaaactaagatgttttattttaaataaaaagagttgcgcattatgatagtttggttaacgataactctaataacaccaattttacatgattgatcatttttatttttattttgctattaatagttaaagttaaaaatatttgacttgatactatactaaaaatatttatattttaggacggagggagtatcttataaaactcagaaaagtttgacagcatgttctataaaacatcgtactctaggcagctagctgttgttttagctatctcaattctcaactactccattcttcccaaattgatcatcatataatatcatataatggaatttaaaatttctcaaattgatcatcgtataaccgcacggacacacatttcatccgaatacaattaatgcagcatggaataatatgtgcatgctaaggtataattggcatggtgttttaatcgatgcatggattttagagcaagtttaatagtacagccaactactagctccaaatcatctatagccaatataatagccaattcatataatagttgcttactatactattaatacccggtcctacatgtcatacacacatttcatcttggagtccgtgctgcagctggctacagatctgtagcccgctgctcttctctctcttcctttatctctttaaaatatgtttatagctggcttatagtctgctattgtacctgctcttaagagaaaatgtgcatggtctcttgattgatgtgatttaaattatccttggtgttggtgtataaacatatatgatgattaatttggaaaggagccacgtgggtgaaagcggggcgagttcccttgcggtagttcatctattcgggagacgtgtcctaacccatttgttttgcccttgtaaaagtcttaagtatttttaccactaactttgttgtatcaatatatatgagatacaacttttatcctcttttttttcttaaaaaaagtagtttcaaaatataagtaacttttgaattttaggcacgacccttttaatatttttagtggtaaagatgaatatttttatgtacaagctgggtttttcctaggcaggcctgtaggtggaccaggcggcctcgtagatgagagcaaggctaataatatagtcgacgtgttggctataaggttctttatagccttctcttagcatacccatataatagttagctctttataattaatatatggccaacttgtctctctcacagaattttttggttcttgtgtccaagccggctgtaagtttacaacccgtttttcctctctctcctctcttctctcctccacctcagcatttagccggcttatagcctaatattatacttgctctgaatctgcgtactgaagtatggccggccgttgcagcgccagatttaatgcagcggctgaaccgaagagacgaggctcaggtgatcgaagagctcagcgcaaacccagagagatcacagctgcagtaacaataacgcgggaaatcaaactgctactcattttgatgacaaacaaggagaattactgctactcgaaactcgaggagttcgatcacactgtactgatcactttgatcagtgtatataatcaggattatgggagttggatactgttcgaatcgatagatagatacatctccgactcaatccctctcgcgattgcgttctggtttgcagctccatatgctggcatgccggactctggttctctcgagctcatactagattacgaggcgaccaaccactgtgccatcctcgtcgacggcgagacgttccccgctcaccgtgccgtgctcgctgcccgctcgccggtgttccgggcggagctccttggctccatggcggaggcgaagatgtcgtgtatcactctgcacgacatcgagcctgtgacgttcagagctctacttcggttcgtctacaccgacgagttgcctgcagacgacggcggcgagctcaatacgacagcaatggcgaccgagaggaagaagggaggaggctgcctactgatggggagaagggcggggagcggcaaccatcaggctgggaagctagcgagcgtgcgcggagagggaggaggcggggaggccgatgagcaggacggagagccgacgagcgggacggggcgaggaggccgacgagcgggatggggaggccggcgagcacgcgaggagagggagaaggtggggaaaggggcggagggcgatagccatcgggcggggaggccaatgagcttgcgtggagagggaggaggcggggaggccctcagcccgtcgatctccctatcctggtggccttgactccccacgtcttcgcccacgacgccgccggtagtctccatcctcacagcgacgctgccggtttcagtcatactacttttgccacaccctcggtgagcacccatgcacaaagcctctttgaaattgctaattagcgcgtatgcgccatcagactaactcgcgcgcgtttctagcccatactcatacgcgacccacacactcgcgcttaccccatcgcttcctttttttacgcttcttctggcgattgttattttgggtaaatctttccttttttttctccacatgcgtgattctttttaggatattttataaattaaatctttacctcccatttcacttgagaattttgaatttgaattgattttttttaaaatttaagttgaatgttttgaattttaagatgaaagttttcaaatttaaattgaatattttgaattttgaggcaaaagttttaaaatttgagttaaaagtttttaaatattgacttaaactttttttaagtttgagttgaaagttttcagatccgagttgaaagtttcaaatattgatttgaaagtttcaaatcttgatttgaataaagttttcaagtctatattgaaaattttcaaatccaagttgaaaattttcaaatccaagttgaaagttttcaaatctgagtttaaagtttttaaatcttgacttgagaatttacaaatttgagttgaaaatttcaaaaaaaattgagttgaaagtttcaaatcttgacttacaagttttcaaacataagttgaaagttttaaatcttcaatttaaaagtttgttgcagttaaattttcgtacctatcccaatttgtcgtgtcctaaataaaaggaataaaatgtgtgggcagttattttttcaaataaaaaagaaaagaaaaaagaaaagaaaagaaaagcgagaacgctacccgtactacccgtaccgccgatcccgcgcgcgagttaatctccccacgtgcacgcgtgggataggaggcccccatcctctttctcatatctcccgagcacaccggtggtcgagctcgatgacgttgcggccgtcgcctagcacctccccaccagccatcggccgccgctccgctagagagctagacagagatggggaagagggtgagagaggaagaagccggcgtgttgtatcagtgacatgcggagggacctgttgcatctggtattgcagttcagggaggaaaattgaactcggtgtaaagttaagggacccaaatgaacttattcctttatatgaggttgtgcgtgttgtccatgggcctggacgtgcaaagctgggcttctcctagacaggcccgtagacggaccaaggcctggtagatgccccctggaccacgtctggtttgcacgccgggcgaacaagcgcgcgagctgaaccgaagagacgagcatcgggtcaaggtgatcgaagagttcagcacaaacctagacatcacacagatgcagtactagtaaaacaatgatcttgttgtatagcagcgctgctagtcattttgatgaataagaatgagaattactgctactcgaaactcgaggagttccatatctcagtgctgatcaattttctttttcgaggtggagtaaatcactgctgatcacttgatcagtataagtataagggcaagttttataatagatgtggtggtcacctccaattttatccacatcatccattcaaaaaattaaaattaacttatataaatgcattgcatttaatacactagtcccaatacacttgccaccaatcagccctcttattttctcttgttctttgaaatttgtgtggaggttgccccttgcatgagggatggctcctcccctctcttctcttctctcctccacatcattatttaagcatacatggcactttggagtttgtgcttagaaccttagggcaagtactataggcatttaagcacaatcacctagatgccacctaattttaaatgatgatgtggaggagagagtagatgagagagaggatgagccacccctcatgcaaggggtaacctcttcataaacttcaaggaggaaggagaaaagagtgaggttgattggataagagtgaataaaataaatatttatgttgcattgagactagtatgtgagctgcccttaataaattagttgatgatgtggacaatattagatgtgatagtcacctctaacataaaacttgcccttatagtacttgccctaaagccatcaggattattgttcgatgcttcaatagatacatctccattaatatttgtgatgaataattggctttacaaaagatttaatcaataaattggtttgaaaatatgtatgaatgttggtgtgaatgcgtgggactaatgtgggtcaggttgtgatatctgtgcttagaaacagttgttttgtctgattatgtgcaggtgacctgaggtcagccttggtcaatggtgaggaccggaactatactcagggaggagcagattaggtctagtgctgttgagataccatgtgagaaggtgactagagtcagtattcttagagatcaacttcggttaacgctggggaccgggactagactcagggaggagttgagatccagacggtcaaagataccggataacgaagttggatacgagatggcacaccatggatggacatcgtgtgggagagatcttcgcaacaggtttcacaaggtgtgcatataagcgtcggtgttcgtgaaggagattgaaagaaattggagtggagtatatattttttttgaaacacagtacaaacgcaggcgctcacaacgtgcgcacactcacccccatgaacgcacacacgcacaccctacccctatgagcacctcgctgtcgacgggtacgtcgcctaccactgaaagaataattagccgtaaatgcgagcacccgtgtcaaatctaggatttgaactcgggtgggctagttccaccacaaggaacctaaccagttgagctatgctcacttcactggagtggagtatatatgatgctacagtacggcgaggtactgttggagcatgcatatactccctccgttttttaatagatgacgtcgttgactttttctcacatgtttgaccattcgtcttattcaaaaaatttacgtaattataatttattttgttatgagttgttttatcactcagtactttaagtgtgatttatatcttatacatttgcataaaatttttgaataagacgaatggtcaaacatgtgagaaaaagttaatggcgtcatctattataaaacggaggtagtatatgtcaagtacatggttgctacagtacactatgaactgtagcggtacactgtagcatacatgtgtcgtgtgtgctgtggatgtcggcctggatggttgggctggcttggattgctggcggcccacgttggtatgagatgcggtgggctgcagggcagcctaggtggcccacgtcgagaggcagcaaggcatcggcccagctggcctgtgcggctggagaggaagcagccgtgcgcaggtgaccgagcaggagacagagaaggaagtccgactcggtgtgattgtttgtggccggtgcggctgcagttttgttaaattgtaaaaggtttggaaattgaggtattgagtcctagagtttttttttataaataaatgaggggttgagactaaatggatattgactttttggtagagaaaagttagggtttacttcgaggtttcaatcctagttcgtgagttgagagaggagtaccttaggtgcactttgtaaacatatattgatgcaataaagttgatatacttttaagtgtttcgtcgatacgtgtttttctggatcccaacggtttgaccggaggcgattcattggtctaaccggcgggcggtcacatcggcggctcaaccagcggcagtggcagggaggcggttcaaccagcgaccaggcggtggttagaccggcggcgtgcgagcggtccgaccagcagcgatagaactacatcaagttctccattgatttgagggtaacttttatttccgctaaaagtttttgggtttttggttttatcaactattcacccttctctagtaggcttggttactcgtgttcgatcctacactccgtactctctcgagtgcgttctggtttcagctgcatcgtctgcgtagacatgccggactccggttttctcgagttcaaactagattatgcggcggccaacaagaactgtgccatcggcgacatcgtccgctctgatgtctttcctgccggaggacacgcatggaggataaggtgctacccgagtggtatagtaaagaagataacggtgagtacctctcgctcttcctcgagctggtccgcgaatccacttccaacaatgtcagggccatttttgacgccttcttggtggaaaaagacgacgagccatcttccacccacgcagacaggggcgtgcatgttcacccaaccaatggctataccgcatggggatggccacagttcgtgaagcgaagcgatctcgagtcgtcgtcgtcgtcgtacgtggtggatggcaaggtcagaatcatgtgtgtggtcatcgtcatacgagacaacaccgtgcccgtgccaccgtctgacattggtgcccatctcggtggcctgctggaccgcggggaagggacggatgtctccttcctcgtcgacggcgagacgttcccggctcaccgtgccgtgctcgccgcccgctcgccggtgttccgtgccgagctccttggttccatggcggagtccaagatgtcctccatcactttacacgacatcgagcctttgacgttcagagctctacttcggttcatctacaccgacaagttgcctgccgacgacggcggtgatcagctcaagatggcagcaatggcgaccgatgagctattccagaaattgcttgcagctgctgataggtatgatttgagcaggttaaagttgatgtgtgcgcagaagctatgggaggcagtgtcagtggacacggttgcgacgacattgatccacgctgagatgcatggttgcccagagctgaagagtagctgtcttgacttcttcgtgcaggacaagaacttcaaggagaccgtgctaactgagggctatgtgcaattggtgcagcgttttccctcgattaaggatgagatcagaggtttgctgagagctaaatcaatgtaatggagtgatattttgtctggccgttcaaatttgcctttttcaggacctgtactgtcaggctctagttttctcattttatttctactcaaattaatagtccattcctcgatatccacattgatggcaatcgacatgtctctttgtgatcaaagtttggagtttgtatgaattaagaatatcattactttttaccagaaatactcaaagttcattacatttaaataatttatcaaacaaagaaaataatatttttatatgaggaattttacagtccttgagaaagtactttgaggtacctaaattttacattaaaatttttggtaccttgagatacttagtacctagaggtaccaaataaaaacaaaatgtggggtccacatgttggtcaaacaaaaggaaaaaaatagtgggacccacatgttaatgggtcccaccctcctctctatctccaccacgtccttctcccttctccctcccggccatcttttaatcctcgagctccctcgccgcctgacaaggtcgcaccgaaaggaagaagggcggaggctgcctgctagcggggagaagggcgaggcgcggcaaccatcgggttgggaagctggcgagcatgcgcggagagagggaggaggcggggaggccgatgaatgggacggggaggccggcgagggggcgaggaggccgacgagtgggatggggaggccggcgagcatgcgaggagagggagaaggcggggaaaagggcggagggtgatagccatcgggtggggaggccgatgaacgggacggggaggtcggcgtgcgcgcgaggagagggagaaggcggggaaaagggtggagggcgacagccatcgttgcacggagggggaggaggcggggaggccctcagcgcgtcgatcctggtggcctcaactccccgcgtcttcacccgcgacgccgccggtagtctccatcctgacaacagcgacgctgccggtgtccatcctactgcttctgccacacccttggtgagcacccatgcacacaacctcttcaaaattgctaattagcgcgtatgcgccatcagactaactcgtgcacgtttctggcccatactcgtacgtggcccttatttttttggaagtttttttagcccttcttttttgttttcgtcttttttagggagtcggactttaatttgttttttgcctttttatttattttattgggaaaactattgacgttggacgacagaaacactacgaattttttaaggaggtaaaagggtaaagataaagatctactaatcaaaatttataaaatttttacataactatgtaaacaacatacatatacctaggtgccgtagaaaatactatcccctgggagactttctactatgcttggcatacattagagccattgattgctcttaatctaacgaactaagggtgtgtttagttccacgccaaaattggaagtttgactaaaattgaaagtttgaagaaaaaaaatagaagtttatgtgagtaggaaagttttgatgtgatggaaaagttggaagtttgaagaaaaagttaggaactaaacccagcctaagataattgtctcttatcatcactttgaatcatcgtatagttaaggaccaatcagtacatattctagggtttgttaactatttcttcgttgttatgatcaccttatagtagcgcatgattttactggggtatttaaaatcatttcattcggagtttgaagaaaattaagaagcgagcttgggttaggactgagtgatttacttccatcctagttaccgatgatggtgaaggaagatggattatatcgatgaagtgattgtgtattgccaatgggctagactatgatgctagtctttgattaacaaaaaaagataatgggtgctagaaagctatgtgtagctttggtctttgggctgctggcagcagacgtgatggtgtgagccttgctttgcttttctacattgcatggctgatctatcctctaatagaacaagcatattgaaggggtcgtttgttttgatgttggtgcccaaaagctttgaatctgaccacgcaagggttcgtggccagcaacaaccgaaaggtgtgtttgctatcaggatcagcaatcatccccgagaaggctaaatggctgtcgaatgatttttaatagctaaatcattcatgttttaatatattcagaactgttgttttattgtagtaaaatgtttcatgaggtgatttgattatgattcatatttttaaaagattaaaatatttttgatttacttggtgaaacaacgcctaattggcttcaaaatctacatgatggaagcctaaaaaaatcatgtgaatcccatatagactctttctcgatgtactcggatttgttttacgtttcaatatattcggaaccgttgtttcatacgttgtagtaaaatatatcatagggtgatttgattttgtacagctttttaaaagattgaaacattttcgatctacttggtgaaacactgcatgatggaagtctaaaaaatcatgcaaatcccacatagacagtcccattacttaattacttaattaggttcgagtgatcaacaagtttggaggttttaacttgcaggcattttgccttaatttacttgcttgagcattatccggtacaagctaagggcttgtttagttggcaaaaattttgcccctgcatgtcacatccaaggccggtcctgacatttgagaggccctaggagaactcgacactatgggcccttaaggcattaaggctaaatattttttacttctaatacatatactctataaagcacatatactatatagtgacacaaataaacatttctaacatggtaaatagtaaatcaaatagtttgcaagttgcaatacaacaatttattatcgataaataatatcgatagtataattgacaactaaaaaacactatagaaacaaagtagtatgaatacattaataggagaccacaaacatcctatatcccttataaaaaagagcttcttcacgtatttcttgaagcgaaatcatttcttttgtgaaccgattaattgatctccccgttttcttttgtttcttttctgagcacctgacaaatgtttttttggtaacattgtaacacctgaaatagtaaatatatatattgtaaagtaaattatacagcaataaccatgaaaattatagcctaactaacctaatttttcgagtggaaaaatcatacaatgatgccaagcaagaaacttcggtttgttgtttgcctaattaacctaagtacctaactaacctcagtttgccaagggcttatggccggcaacaccgcaacaggagactgccagactggagacggggagaggcgtgtgaggctcagagaggcttgggcgttcaggcgttggcgattagaggatagaggcggccctggcgtgccggtggccagccggccactcggccaggcgcccggcgacctggcgccatcgacgcggagagccggagaggagacacgtcgcggtcgcggagttagggagtcactcgtggaagcggaatcgtgattcgtgaggagaaaaacagaaaacgaagcgatctagcgattagcgaagtggcgtcgcggccttctgcatccctccctcctggcttgcgcgtgggctgatggctgggctgggctgctgggggaggggggttgggggttggtgatgggcccccagccagcctaggcccagggccgaccctcacatcggatatatgaacacatatttgaagtattagacgtagtctataactacattgtcaaatcatgccgcaattaggcttaaaagatttgtctcgcaatttcctggcaaactgtataattgtttttttttctacatttaatactctatgcatgtgtctaaacattctatgtgacaacgtgaaaaattttgtttggtaactaaacaggctctaaaacgagagagcactgttgtaatgttgtactactccgtccaaaaaaaaaaggcaaactctagctacgaatttggacacgcatgtccaggttcgtagctagaattggactttttttttttgacggaggggtacttcccagtatggcagagcccaagctttgccactgacagcatccatcagatggtttcctatcataaatggggttgtcaacacacatgcatgggtcaccattaaatgcaatatagttacatcataaatatatatatatatatagacacacactagaaaagatacccgtgcgttgcaacgggtgaatactattttaatcttattattgttatacggtttggctagggtaaaatttactgtgggaattcgcttagatattttttttctagaaaatcatgtgctgcaattaggagtttgacattcatctcaagttaacatgcaagtatttttaatgagatttcttatacgactccttttgtatttctaaaagtaaacgaacttaaaatccgactcaacatggatatgtatttccaaaagcaaacgaatttaaaaaccggctcaaacatgaatgacataccaaaataccagcaaaaacatcttcaatttttataatagtagagatagagataaaaacttaaggtgaacaaaatatggtaccaccaaatatcttactattactccagtatttcagaatcggatattggatatacgtcatatgatacctgagccagggggattttggttttgaatcacttgggcgtttccaggactctgttgagtctttgtctccaaagagagcatttttagagacaacttccgcaagtaatcagactggtaatgcaaaagaatacaatggtaagatttggctttgtaataaataacttgccaccctaaatcctggtggttagcacaattgaaacatatgcttcgtttttttatactatgatttaaattatacaaattcttatctatacagcaagctactttggcatgaataagcctgatgaagtatgaacaggagaacaattggaatatggagattatgaaaccctatacccagccaaggaagctcctacaaaaatgtttaccaaaatgaagtactaacacaaaaggaaggactggagtaaaccattgtttgatgtttcatctcggataaagggaatattttacaggtgatttatacaagcatgaacagatgaaatgatgggcttacagaactcaaggtacaactcctgtacttttaacatggccaatgagagaaaccagtctcatggtaaaaatattgtttagttctataattcattattactaatttactattgagatatgttattaatgaaaaatgatgtggggacatcaacacctctagcataggactgaatcagtcttagtccccgtattaaggcgcaaaggagattttctaccgataaaatggaaggaaaaagtttcagcagccttggataatctggtggaggtgtgaaatattaccatcggttcaaaaaaaaagtggatacttcatggtgaaactctaacaaacttcaaaatcaacagacatatttgcaaacatttgaagatcgatttcttctactaagatcccaaatgccatgcttgagccccacaactgaaagattggatcaaccggaggaagttagcaagaggctaagtgtacccggctggtggctccagtatagattttctcttcaaatcgcactgctaacttttgaagttcattcagcccctcaggccctgatactggtagatgcttcttcagagtctccagtctgtacatagattgcaacaagcaagtaaatgacaaatatatcccatgcagaaaaaaaaagagagagatatattgcttttgagatgttttgtgcaaaaaaaaaattgtcacctaaggcataatgtgtcggtctaccatttaagatgttggacaaatgagtgggaaaatatgtaatgcaaaccacatatatagtggaaacttggaaactaccgttggattgggaaatggac

SEQ ID NO: 4395 - DNA, 8526 bp, Oryza sativa
cagaggaaggggtggccacgtcaccctcgggcccgacccccccgagggggtcaggccacgtgggtgaacgcggctgcccaagcctctagtcacgatattcctggtcccatgtcaccgacacatggtgtcaaagcaagattgatcccgtctgccccctccctctccctctctccttccgctgcatccatggcttctccacagcccatcgatggcgtcgctcctatcacccctccctccgccccaagacgctattgccaacctcgtcacggcgcttgctactgcccatgccgcaacagccactggcaagaccgatgatcttcccgccaccctcactcaagcacaggcggcccaagacgccatcacgctgtcagacaacacaatcaccacgacaccttctccttctaccgtggttgtccagccgggcgtgcgcgatgtggtgcttgccaccacggcaccaacgcctcgtgcccaagacgcagtgccaaccaacgtgacaccagcactacctccgcctcagcgttccaagcgtcaagacgcatgtgtctgttgtcctcgacatgaaaagctcttataccatgcaagcgtattgagagagaaaaggaatggctcaacttatgcacaattggtgcgggctaatttcaattaaatagacccaactgatccccattatctataaactttcacggttattcactagctaggtctatttaattgaaattagtttgcaccaattgtgcgcgagctgagccatttctcttctctctcaggtcctctttgtttaggcttaagcttattgacttaggttattggcttatatgatttataagtgggatgatttaatgtcctaaatttattggtggttcatacatatacctcacataagtaaaaaagcttctccaacctagcttttgagttaatagtgttagagtggcttatggctttaaaaaagccaaacgaaaaaattgtttgtttgtttaggcttaaacttttcgacttataaattggtttataagcctaaacaaagagggtctcaacatgcttgcaaaaaacatccaaattacttttttttttgcctatcggttggacaccacttcatctgaataggaaatggagatggtttagctttcttttttctactagtgggtctcacgatagatttacacactacaagcatacttcccctgtcctaaaaattaaacataaaactggatgtgacttaatctagtacaatgaatctagattaagtcacatctaattctaagtttgtttttatgggacggatggagtactcaattaattgaaccatgtaccctcggtcccatgtttcgctgaatggttagattgtactctagagatgatataaggagttcagaaaaaaagagtggattctaaactcgcgagtaccgtgaagtgtgaaaaaaagagtggattctaaactcgcgagtaccataaagtgttgttactttcctgtaccgacttgagtaccgtaaaaattatctaaaatcaacgacctaactacctaggtggttaacattgtccacacctttccgtggttgggattgctacatattgtgatcttttagatgttgactaccactgagtggaagtagcgagcatccaccaaaaatacaacttgtgtgttgcaggctacacaaacctgcacgaaggatgcaaagatcaacatggcaacttggcaaggcacacggtttttcatttgagaaaaccctgcatttttgtttgcacattgccacaacttggctttctgtttttgagagctttcgtcattggagggaacaggatctgtgttattgttgttgtgaacagagcccctggtcatgtctttaacttcaaaggtcacctttttagggtgcaactattttatgaacataaaagactcatataaggagacatgtgttacacgtacgtgagcacatcaagctgtaattataagagtgtccttctggagatgtaaatatatccgtcttgaaattgcaagggcaaacttctacttttatagcgagtcatataacagacaattctctataaaattataatgttagatatcttccatttactataacaaaatcaagaacagatggtatcactttgttgttaatttttcaccaacggtcacgttaacccatttagtactgcccaaatctcataaaaacgcaaaggggtttacaactttgaattttataaagcacacattgttttttttttcatattatgcagtcccacatatttggccctgggctgtgccactgtggctgtaaagttctgttctgtttttcctagccagaattttggcctatatggttcttctttattcaattccatggcaatcttctgtctgttttgggattttttcccccctcttttttgcagttccaatttttctgccgtgtccggtaggatttagggtacaaggtcctgtaattttgtactacaatatccctttttcaatgcaaattactggtggaggaagtacagacatatagggcctctgtgtcagctggttactggtggagaggaacgcatcttccaaccagacatatactacctctgttttttaatagaagacaccgttaatttttttttacatgtttgaccattcgtcttattcaaaaaaatttacgtaattataatttattttgttatgagttgttttatcactcatagtactttaagtgtgatttatatcttatacatttgcataatttttttaataagacgaatggtcaaacacgtgagaaaaagtcaacggtgttatctattaaaaaatggagggagtatgatacttagatcatttgtacttgttggaggcattttttttccgcttgacatctcctccttttatacatatcacctaaaaagctatttagaatgagaaaatacaatggtaagatatatcaatattttacatgtatattattcacaaacatgaaaatggacaccgttaattttttttcacatgtttgaccattcgtcttattcaaaaaatttatgtaattataatttattttgttatgagttgttttatcactcatagtattttaagtgtgatttatatcttatacatttgcataattttttaataagacgaatggtcaaacatgtgagaaaaagtcaacggcgtcatctattaaaaaatggagggagtatgatacttagatcatttgtacttgttggaggcatttttttccgcttgacatctcctccttttatacatatcacctaaaaagctatttagaatgagaaaatacaatggtaagatatatcaatattttacatgtatattattcacaaacatgaaaatgaaagtggtttcatcactcgagtgggcatacactcaattcgtgcatgccaactaaaaacttatatgagtagaaataaaaataacaaatctcatccatagatgatacacacttttgatcatcatatttgtgtctgttttttttttagaatttgaacttgtatgtttgtaaaattgtatgtttgtaaaatgatatatatcatattgatatatcttactttttaaaaaaattttcatggtagctttttagttgaatgcacaaaacaagtgtatgtccacttaggtgaaaaataagtttcccagtaaaaaaaatgatatactccctccgtttctaaatatttgacgctgttgacttttttaaacatgtttgatcattcgtcttattcgaaaaatttaagtattattaattcttttcctataatttgattcattgaacaatatacttttatatatacatatagtttatatgtttcataaaagtttttgaattagacgaatggtcaaacatgtgctaaaaagtcaacagtgtaaaatatttagaaacggagggggtatatacaagttatctgttatttttatttatacttatataagatgaatttgaatttatatatttatattgtgatatatcatatattagtatatcttgtgacttttttaaattttataagtgaaatgaaaatcgatgggagttcctctcgaggaggaaaaagactttgcgatagtacgtacaaatagtgaatcaatgggggagaacatcttattctgacagattacagcagttgtaaccagtacattgctgtgcgttaacagttgaccgatcagtgagtctctgttacagcaccaagtactctcccggccgtgccatgctaaacatgtcttgaataagaatactcaaaacaatccaagccacaaacatgacacacacaacacaggtgcagtcactgttggatcaagaattgcccgcatttttcttcaagatcgagtttgaaggacgagacgagagcaccaccacatattctccgtgagggtaggcaggttatagagtccgactcgtgtccgaaattggtcaaacttgcatgacgctctcatcgctctcgtacaccatctccactctggcgttggcctcgcccttgctgctcccatcgacgtaaaccacgtcgatgctgtgcagtatcgggatcatgacgacggagcagaggcaagccaagaccgggccgaagatccacaggagaagcggcacgccggcgtagaacagccggtttccgacgaggttgaggaggaatcctctctcgagcacgtcggcgacgtagtccttggtcaccggcagcccggcgatgtcggcggcgaaggaggaggaggaagagagggtgttgaggaggaaggtggcctggttgagggtgcagatggcggtggtgtgggagaggaaggagaggaggaaggcgaggaggagggtgacgtacttgagcgccatcatgtactcgccgtgggcgccgaacacggcgtcgctgagcggcttcttgacggtgtacgtgctgctgaggatggcggcgacgccggtgcagaagaggatggccgtcgtcgccatcagcgtcgaccccattatcacgttcctcatcgactgcaccaccagcaccgccttcttctcgttgtcctgcgtttccaaaatccattaatccaatcgatttccgggccatgatcgaacaccatgatcgacgtggttggtaccttcatcatgcccaagacccagaggcggcgggtggcggtgttaatgccgacggtggaggagagcgggcggcggcggacgacgtgccacagccagacgtggtagacgatcgggaacacgatccccgccgggatcagcacgaggtccaagtagctgtccttccacgccatggacgacctctccaacctgctctctcttcttcttcttccttgccggccgctcgatcgccggagtgcgtcgtcggagaagctagagaggaggaggtggtcggcgtctgcactgtcttaattttctctcccatgtggagattatatagtgatgagctagcaagctagagcaaaaggtaggagatgacaaaatgtgcaccacactgcacatacggttggttggttggttggtggaaacatattcaaattccacgaaggcgagacgagaaatagggaaaaagcaattgtgacctaaaaaaatggtcaagaaaaaactgaaaaagaggggtcagctgatgagatgaccaaacctcatcttgccgcccagttgtgacgaaggagatagctccctagtgctgttataatattttagttcaatttcccctttttccttttctgttcttggttttctttattcagaaaagctttttactggtaaaggaaaagatttcgagtctatctggatttgtttagtgtgatactacctccatttttaatatatgacgccgttgactttttatcgatgtttgatcattcgttttattcgattttttttgaaaaatatgaaatatttaagtcattcttaaaaaatatttgatataaataaagtcacaataaaataaatgataattacataaacttttgaataaggcgaatgttcaaacgtatcccaaaaagtaaacgtcgtcatatataaaaaaaacggagggagtattagtgcttttggtctaatataaatctatcacgcccaaaaaataaaataaaacaagatcactttacaagtcagcctttttgcttgaaatgtattgtaaggtgcatgcaaatcttaattaattaatcttgtgttaactgataaggtgttaactgttaagtgccctggaaagggaaaattttgccttttggccaacattctcctacccctttaattgtaaattaagctgcaggatatacatgtgcggatcatgggttcatacgtgcaggctgaggcagcagaaatgtccattcggttccccaccgagtgttgtgaagaatgtttcaagagctagctagcgagtgacaggtaaactgtatgagttaattaattgccatgctgatcgatgccaccacaatgggcaaaaactcataacaatctgttgttacctattcgggaaaacatagttcggtgtggtagtgaaatcgtagatgcatgattacactcatcaatgttcaaatctcaatatccataaattccgctgtgtgtatttctagttagtctagggatcaggaattatatatgtttccattgtaaaaatcactcgcatttagtgttgtcccactgtaccataatactctctccatctatttttgatagacatattttcaaatctgaaaaatttatttttgataggcatatttcaatccaacaacttatcatcttaatggttttcttgaatttaatgcgtgactctccattcttccacacaagattagctgcatggacatcgagaaatataaatattaataaatcgcctgtttacgaggaatgactagtagcatgtttaaatggatgataattagaatcacttatccttggtctgtgtgccatgatgaaatatgactattaaaaatagataaagggagtattatttagatattaaaaaagtttagatatgaaataaagtatacatgtaatttattatcgatttttaaattacatttaattagaaagatttcaaaaagtgatcgacatgcatagaataggacaatacatattaccatatcgaccctcggccttacaaagtagtattctttatatgtaacacatatgcattcatatcagattagtggaatgctctcgttacaatatactcgtggttagctcaaaattaaacttaccaacatcaaataaaggggtacgtgtagtatataatatattcaccgagcaggctagcaattcttagtggggttgaattgtaaacgccttttttcattgtaaaaagaaaaaattctatatagtgggttgtatgagctggataaacccctcaacaaaagcgagctcgctgtctacctgaaaatgccattagccatttagccacgcctctgtgtatgtcggccggccggccatatgttgggttagtcttcgtcacagcgcacgatagaaactagctagtgtacgtagtattcttctttgccatcgtcttcgtcttctcctcctgatcttaacctttttttccctctctatctcctgtcccaatataatttgcattgcatctcctcgttggattggcacgagggaggcagtggccgccgccgccggatgcacgcacaaaaataatggagaaatggtggtagctagcgtggtagaataacggccggcagtgcgtggaagttactcgtactctcttcgtttcttttttatttgacacgttgaccaatttgattttttaccttttacaccaataaaaaaattttgaatcacgatttttattacgagatgctgtgatgaatgcaacagtagtatgattatatttagcatgatatctttctcgatgttcataactatatatattttaaaaaagacgagcagtgaaagtttaatttatatatagtatccggtgtcaaataaaatggaacatatgaagtactcctatatatattgttagtcgcgtgcatgggttgcattttgattgttggtgtgttgcactcatttgatgagtgtcaaagttactcagaaagtgttatatatctagaagataagaatggcatatgcatggaatttttttacacggagagtttccatatcttcggtatataccatatatatacttgatcttttaggtcagggcagattgacatgttttagtggacatatgtcaacctagcacttcctggaaagatcaatctgttttggagtgcagcatgaatatatgcattttctatcacaggcttctaagatatatatggttatagtgaaagatgcaacaaagttctcctgcgttgatctgggaagaagcaccggtagtgtgatggtgaattcataagtgcaggagcctccaccaaggttgaaatacttgtgcccataaatattgcattgacatgagtatgggaatttagtgaagaaaaggaatttgtcactggtttccaaatttaactttttaagagtgtgttatgtgatatactcatgggtgtgtgtggatatatactcatgggtgtgtgtgcgcatgtggcgtgtgcgtatatatgtatttttggtatagttgaaaacaaaaaaggtgattaattaggatatgtgaaaacta

SEQ ID NO: 4396 - DNA, 20994 bp, Oryza sativa
  unsure (1)..(20994): unsure at all n locations
tatgatttggttaaacttttaaaaccgtgacaatccgtaattaattacttgagaattattaatttaaaacaaaaataatggtatgagctagatttttctttaaaataccatcgtagtaccataaagtttgttactagacttataaacttaatctgatataaaaacaacaacaaaatgagtagaagaggcttctaaatcttacataaagttgataattaaaagttttaattaaatcttattctaattaatgtcaaatatttataaccaggaagtactttagcattctagcaacgtactatgtacatatatatgatactttatttttatagaaaacaatacagacgtcgcttatatacacatgcgcgactctatgaacacgcatgcggtacccatgtcaagttgaggacttgaatccgggtggacagatttccccgtaagataccttaccagttaaggtacgctcagttcatttctacatttaattttaatcatgcatataaaaaataaatcattttaaatgacaaatctattggagtcactttttcctaaaaatatcttttctatgtattagctatagttaatattttgaaagtcatcgattacgtatttacccgccgtctactacagctagtacctataagtttgagaggctgagggagtagtaccatccaaccactgttgccttatcaacgtatatctcatccaataaaactgaggctgtgccggccgccacggccgtatacctgctacttgacatatacccatgagtttaatttgagtttaatttggcctcactttatcgtctgatcaaattctgacctcactcgtcttccttaattagatggagtttagttatgtttgagattgataagatgaagataaaattaaagcactcaaaatgagaaagatgttagtgcataacttattaacttttaattattacagacttaaaaaaataggtttatttgatattttaaagcaacttatatatagaagttttttacacagggacaccgtttaacgatttggatagcgtgctaatgaaaatcgaggaaaaaaacggtcataatgaaaaaaagaataccactgtgcatacttccatgcaagaaatgatcagattatgacctcgtttatgttgattacttagatcaggttttgtgtacttgtacatacatccatatgcaaatcaagaaatgttgccgaccttggtccgtacaccgtatttggatcaacgatcgagtactatatgtgtaagactaaggacttcaagtgattgaccatgcaattaatcgatgtatggcctaaactttaaaagatgttgaccactggtactttatacagttaattaacagaaatggtactctatgaagcttgtagcctgtttgtacaaaaccgtaccaccagattgtgcggctctcatgcattagagaatatctaatgaaaatgttgtgggacggtgcacatatgaagcacatgcattaagtttgtgtctagttaattatgcctgagttaggacatttacattattcaacctttcattcgatagagaaaatattttgttcgcatggaaaatgagactatgagaggggtggctgccatcaaggacaagaaaagcgataaaaagttgtaaagatttcaataaacaagccacttagtcacgcgatgcgtgatttttaattccgtataagaacttgtatacggtctattagtttacagaaggttttagcacgagttaatttatttacaaagtatatattggtctagctaactatagatttagttatagaaatcactataaccccctagtttttgttttcttcgttatctttgccctctttttgtaccatgtgtctaagagggggcactagaaacctccagaaattcctatatgtttatcccattgttatttttttaatgcatatgtaacctttttgatcccatggctattatttatctaaattctttattcaatggttgatatatgtttttttacgatgtggcgtattctcgtgtaagaaagattgctgctttcactatataagataatatacatatgaaaattagacaattcctattccctaatgtactttgtccatcagggttgcccaagggcccagggatttcaagttccatagggaaaaccaaaattagtagttcaaaatataacacgtggtgagatggagttccgccaatagttttcaagattctagaaattcatataatccacttgaacaatatgtcgacgatgcatttaagaagatacttcctccgtttcacaatgtaagactttctagcattgctcacattcatttagatgctaatgaatctagacatacgtatgtgtttagattcattaacatctatatgtatgtgggtaatgctagaaagtcttacattgtgaaacggagggagtagtgaagaagcaagtgaagcaggggcaggtagggcgagagatagccagggctgcaatcgtactcctgagcttaaatacgcattgaaatttgcacttcaaaactaaaaaaaaaggataaaagcaaacttattgagcactaggcttggaatattctagatctgccccttggttcatgaattattaatggagactgtagtttgcaaaggccttgtgttattgggcctgttcggctgcactcatacggctgtggtgcagccggccagaacagtactttatgtaagtagttgtagcagtaacactgtggtacagctgctgcaccttgcagccgaacatgcccattagcggcacatagaaccttatatttgtgtggcgttgtagtttaggccaacgcactatcatggtttaagggagtgtttggctaatgggataggaaaatgatttcccacccactaaaagacatctttaaattctaacaattcattatccctcttccatttaatcctaactcttcatttatttcccaatcctaattccatgccacatttttcattatccaaacacaccctaaaaggtcttttagtggcgatggaattgatccatattccaacaatattggatatggatatcactgaagttgtctaagccccttaagttgtccattgagactttgagagatgcctgggaattgaagcaaggattgctgaagcaaaagaggcttaagagcttgcacagatgagattgtgtgttcccgtaggaatccggcctagactattgtatcagagatataatcgctatttttataattataattaataaagctctttctttttaccttaaaaagtaaaagatccgtacatacgatccatggtgatggtgtggtgttggcggaataaaagcttacggtacgatgtaggcgctcatatccaatcataaaatttcgagttgatatttttttaagaaccaagtataaaagtatcaatgaagtgatatacggatctcgagatggactaaatagattttagaaacttgtgtgtcatgtatatggcttggaaatttcattgtatatttagcctattagcgtttaacaaatatctaaaagtgctaaataaatacttcctccgtttaaggtgataagacgttttgactaagtttatagataaatatagtaattaatatttataatatcaaattagttttattaaatcaatagttgaatatattttcacaaaaaatttgtcttgagttgaaaatattatttttttctataaacttagttataattaaaacaatttgactttgactaaagtcaaaatgttttttaacttgaaaaggatgtagtaactttcgtaaccctttgctagaaaaattttgtacacaggagctgtacactgtgccgttacttttgcatgggcatgggccgttacttgtgcctgtgccgctttacagccaagcccattagcaaggctcaaagatgggctagtttttctcggcccaagccgtctgttgaacagcgtggagaaggccacacggcccacgtgcatacgcaggccgcgcactggatttcaagatgggctgcgcgaggtggacggcccagattgctacggccttctacggcgtcacgttttttcgtggtgcggctggtgcccgtgcttcgcgtacacgacagtgtacacgctgcactgcactccaaagaaatccgccgaaagtgcagttatacgtagcgacaatctgcaatacgtaccaacagccgaaagcatatatggacaagcagccacgcaagccatcagcacaacccacacgaagagcaggttttttttttcgaatcaagccatacggtagtgcgacgtttctattgatatagcaggaaaaaaaatacaaatctatagcattgagagactagttaggagaagaaaaagacggccacaccacatgcctacatctgatcctgctactgaaaacaaaacaagcacacgacacctagaaggaatggttcacactaagagaagttttaacaaaggagagaggtggttgttggaatcaacatgtaattccaatagaaaaaagaacttgattagttgtagtaatccgtaagtaaacagaatcatatagataatggtacaagcctgacccagttgttgatattttttttaatctccctgtcttgcacgtgcggtatagatgctaatgtgatgtggcagcaccgacgtcacacctgtgacatctggccatatgtctacagctaatgctgtgttttgttcaatttttattaaaggcaaataaatatctatatctacggttgtgcctataccaattgaagttatgtcatatgaggcgttttcgtgctatctactgatgaaatttacctctcgtacatcagaaccgtgcaatatcattacttatgtcagtgtaacgggataaattggtagagtttttgagagtggaagcttcctgttttttcaaaatttggtaagatagcaataacaataatgagtttggtttgttgtcctattaaaatttggtaatgccaaaatttagtagggttaaaaataacaacaaagtaaatattccttagtttaaattgttttagttgaaggttaaacattaccaaaaattggtaggttaaaaatgttaataaaaaaagcaaagcccttagtttaaattgtttcagttgaatgttcaacattgctcacaaaatgttctcttaaatagtactttattattacaaagagcatctgaatctgtattaaaaaagtacaaaaaaaaacattctgaatctagaaagggaaaatatctagaagcgactgcacgcggcccccacgaaaagcccatgcacgtgggccccatcccgaaaaaagagcaacagcctcaccgcctacctgcatgtgcaagtggacggtgcgcggctgcgcgccgcaacgcgacgccccctntntnnnnnantnnnanaaccaacggncccacacgtcagctatacagtgggacccacccctccggccccacatgtcagcaagacagtgatacctcctcccccgcctcctcgcgcggcgcgcaacgcacacgcttccccttcatctcagtcgcgcggactcctcagtcctcacactccccacgaactcgaatccccaactataaataatccaccggaaaattcacaattcgatcgcctctctcgatcggagatttcgcaattttctccgccatggggagcctcccgcactgcctctccgcgcgcccgctggtcgtcgcggcggccccgggccggcctgggccggggccggggccgtggctgctcggcggggcgaggcggcggaatgcggcgttttcggcggggaacgcggggaggcgggtggggttgagaaggtcggtggcctcggcggtggaggtcggggtcggggagaatgagaagaagggtgtgtaggagtagaagaagaaggtgaagtcggtggtgatgccgaaaaggtacgcgctgggtggcgcgtgcagggtgctcgccggaatgcccgcgccgctcggggccaccgcgctcgacggcggggtcaatttcgccgtctactccgccggcgcatccgccgcgtcgctctgcctcttcacccccgacgatctcgaggcggtgagctcgcttcagaccaccacaacggtgtcacgcgttcctcgcgaagttctcctttcgttttcagtggctctgttttttttttaatccgatgattagttgaggtggttttgcattgtgtgggatggtgcaggatgaggtgactgaggaggttccgcttgatcctctgttcaatcggacggggaatgtgtggcacgtcttcatcgaaggcgagctgcacaacatgctgtacgggtacaggttcgatggtatgttcgcccctcactgcggccagtacttcgatgtctccaatgtcgtggtggatccttatgccaaggtgatgcattagcttcattttgccttcttggtgttcttctcctatgtttgtgattgtactagttttgggaggcgcttatctgcagtttttttctattactgtaggcagtgataagccgaggagagtatggtgtccccggtcctggtggcgattgctggcctcaaatggctggcatgatccctcttccgtacagtacggtatgccaacgaatcagtttccttttttttttaactcccacttgtttccatttatcctcttttgatctgatacccgactacccgaggcagtcattatccgattatctggttgctgaatgtacaactaagatttgcatctttttttctaatattgtaattttgataataataataataatatttgtttgcaagtggaaaagaacatgatttttttttttccgaaggaattccatttattcgttgctgctatgaagtggaattgcatttatgtgccttgtaaaaaaatgaattgcattaatttgttgttgttactgtctatgatattaaatctcacagtaaaatgtttgcatttgcagtttgattggcaaggtgacctacctctgagatatcctcagaaggatcttgtaatctatgagatgcatttacgtgggtttacaaagcacagttcaagcaatgtagaacatccagggacttacattggggctatatcaaagcttgactatctgaaggtgcattttactaattacctagttcggtcaagaagctattgggccacagagcaatttataagactgttacatattcattttttataagatcttcacgtacatctagattttgcatggcttttgctgaagatatcctattctacaacttaaccataatcaagtatttctaagaccttcccggcgaaaaaaagtatttctaagacctatgctgtactttgtgatagaacacttaaaatttggtctatgcattgacaaatttacttagtgtcccagcattttttttcttattttgttcatgagtggtccattaagtgaatagctgtaataatagcctgtttatatttttagttgtgtgtttattcttaatttaaatctggaataacccctctacaggagcttggagttaactgtgtagagttgatgccctgccatgaattcaatgagctggagtacttcagctgctcttccaagtatgcagacttacatccagaattgagctataagcagtgtttgaatggggcctaacgaatcttactctcgcaaaactgatttcccccttctaaactgtgcattggttaacatccagtcaactattttgcataaggtgtttgtgtagacatgatagatatgacctactgctaacgctaccatcttgacttttataagttgataaaataaactagtttttctttgtgagatgtaaacaataattaatgttggtcacatcaatatcgtattacatttgaataattgatagcccaaatctcccactcttataagaggttccacatgcatagattttgcatagttgcagcataacagccttttctttgtctagattcttgaatgtgatttttttttccatctctaaactcagtttacctttttcccttcatttgcatggaatgttgcagttacgcacttactttcttgtaacatgtgtactgtgtacatccatacatgtttttacattattatgatttttcatattttcatagaaattcaatcattttttatattatttcatataaactgctcactatcttaccaggatgaacttctggggatactccacgataaactttttttcaccaatgataagatattcatcaggtgggataagaaactgtggccgtgatgccataaatgaattcaaaacttttgttagagaggctcacaaacggggaattgaggtaaccaagttgatatagctaattcttgtttagtaattgctgctttctcaacatatttttttacgtggggatactctattaggtgatcatggatgttgtcttcaatcatacagccgagggtaatgagaaaggaccaatattatcatttagggggatagataatagcacatactatatgcttgcccctaaggtgcgttatattgctcattgtggaaacatttctttttttttcttcagagatgtatataatgcagttttattatgtaattctatctaagaatttgaagggtgtttgtgcctacagggagagttttacaattattctggttgtgggaataccttcaactgtaatcatcctgtggtccgtgaatttattgtagattgtttaaggtacagttataaatatatatatatactgcacagtaaaacagttattgatctcttctcactgcttatcattttgtcaagaacttcaattgcaagcctgtaagggttttattcttttaatctccagcaaattgcttttttctgttttcaaaacacatactgatgatgtttcagtgcttgagtatatgtacacttggatattcttctatattctaataaagcagggaaactatatcccatcatcttatcatttttttatgctcattaataataaataaatcaaagaactgccatgtttgttgtaatatgcttgaatctcctgttaggccatttttcatgatatctttggtgtgcttatttttgtttgctttattctaaacaaaatagctttgacattgcagatactgggtgacagaaatgcatgttgatggttttcgttttgatcttgcatccataatgaccagaggatgcaggtaaacggcagttcatttattttattttattttggccgtgttttgtctttccagaagagtcttatttttttcctgttacttttacaagtctttgggatccagttaatgtgtatggaagtccagtagaaggtgacatgactacgacagggacacctcttgctactccaccacttattgacatgatcagcaatgatccaattcttggagatgtcaaggttactactttttctgacttttgttgcgcatctacaatttctagtacattcataccagtaatgttaccattcatatttttggcaatgaatttatttttctacacaagtaattcttttgttctgatataaagaaaatatctacaccaaatatcataatagtatgtactacctctgtttcatattataagtcgttttgacttttttatatgtcaaatttctttaggtttgatcaaatttatagacaaaaaagtcaaaagggacttataatatcaaatggagggagtatgatataattagcacgttgttgtatccttgtgaaatcctcttattcgtatatccggttgcatttatagctcattgctgaagcatgggatgcgggaggcctctatcaagtaggtcaatttcctcactggaaaatttggtcagaatggaatggaaaggtaacaactgcatatcttgatctattcgattttctaaggaaacaaatgtttccttgcatacactaaatagaggttatatatgagacatgtctaatttaacataacattattttactaaacttcaaaggcaaacacataaattattctgcccataaatgtacacagaagataatacatgaactgaacggtgagctatttctcagggctactgctaacaatacataaatacgccttttgttctttagcagggcatgggttatgaaaaagtaagaaacaacagtatactaagcttatatttgagctagacactgaactttggagttataacatatgatctgcatccatctaaagttaaaccaacatctaacatagttcccactttatatgtgtaattgttgttttatcatagcactgacttatattatgtgcttgtttctccagtaccgggacattgttcgtcaattcattaaaggcacagatggatttgctggtggtttcgctgaatgtttgtgtggaagtccacatctataccaggtacatagtgaaatacctttagatggatcgggtacaatgcaaattggatggggtctttggaaatgccacacgatgaactggtgataatagtgcatgaagcttacagttataattctagatccacgcatagcctttaacacacgacttgcgagtaaagaaaatggtcttgttttcttttcattcattttttggggtgctcttgtgtctggtgaggcttctatttggcctaacctctgaaaaaataacctccatgccatttttattttcttttgtccatttctctttgtgaaaagaggttatgttagatactgatagccaattggactagtacatttctgacacttaaaaatacacagagaagtaccaatgcaaagtagcttcattctagtctatgtaatttgttttttacttcacatttcctttaggtttgcataagaatcaaagctgtcacttgtatttgccattacaaatattcctttattaatcaggcaggggggaggaaaccttggcacagtatcaactttgtgtgtgcgcatgatggatttacgctggctgatttggtgacatataacaagaagtacaactcttcaaatggtgaggataatagagatggagaaaatcataacctcagctggaactgtggggaggtaatactgcactataatgtttatgcatagttcttgttttacttctattcaaatgcccgataatcttacaatggctttactcgatagctaaaccattagtgtgatgaaggtttcccctaccaaatatcatggtctgtaaacttcctgtatttcttaaagatgaaaatgtgtgttgtattttgtaaatgagatgagttatgggacttatggatgaaggttactactggtggtaggtaaaccatgagtccagtcactaggatttgatgctggtgggaaaaccatgtgagctcagtgactaggatttgcgctccgtttgcctcaccagaggcgcagacctgatatacattagcaatttcaaagtaattagttttctttcaatttgcagttgagaatcttatatagaatgcgcatttacaatttcatgtcaacaatgtaggaaggagaatttgcaggtttgtcggtcaaaagattgaggaagaggcaaatgcgcaatttctttgtttctctcatggtttctcaagtaagatttattatctgacctctttaattatcttagaccgtttgccaaaatgtaggatgacgttaagatgctagttctgtacttgccactttcattagtcacatcttctgcagtatttaacattttaaactattactttctcttaattctttagggtgttccgatgttctacatgggcgatgaatatggccatacaaaaggaggcaacaacaacacatactgccatgaccattatgtcagtccaatgtgatggtgtatttttcgaatcagctgtcattaaacccctcccttaatccatctttggttcttctataggtcaattatttccgctgggacaagaaagaagaatcctctgacttgcaacggttctgctctcttatgaccaaattccgcaagtaactactctggaacacttccacatgctaaacaagtgagaccgtctccatagcctacatcgacctcatgctttgttttcttttacattgcagacaatgcgagtcccttggcctcgcagacttcccaacagctcaacggttgcattggcatggccatcagcctgggaaacctgactggtctgagacaagccgtttcgtggccttctccacggtacctacataatgctctcacacaacacagccatttcccccaaaaaataaaagcaccgtctttttcacaacaatcaagttgaagctagatgataatttcttttatccatgtctatcacagaaagatgaaacgaaaggcgagatctacgtggccttcaacgccagccatttgccggcggttgttggactcccagagcgcccaggctaccgctgggagccgctggtggacacaggcaagccagcgccttatgacttcctcaccgacgacctgcctgatcgtgctcacgccgtccacctgttctctcatttcctcaactccaatctctaccccatgctcagctactcctccatcatccttgaattgcagcctgatgattgaaagaacaaagtatagcatagtatagcagagtaaaaaacatatgtttatagccctttttgcgtatatgttgaagttgtgcggtccttcaattttgatggatggtgtaatctgtatattcatgcatgtcctgagcggccagataagctcctccgggacgagctagcagaaaaagcattctctggcaagaacggattgatgtatatactagtgcagggtatgctgacatgttgagtggacgaaagatgatcctcatttcactcaacaagaaaggcggaacatcagggtatgcctgatgtttggaagagcaaggtacaataaacagcatatgttgctatgcagaatgcacttgtgtacatagtcattttgcttcaatgcgcagtacaatcagattcagagctgtgcggttgttctatattcatcggtgcagtctatccactcaactcaagcatgctcatcaaaaggatcagatcttcatccagattttccagctcgatcagtttcacttctgttcatgagtcattgctctctggataagtgatgcatttgtagaccctgcatcttgggcaaaggatgtaccctgcctgcaacagcagcaccagttcaaagtgttggaacgaagcagaaaaaggtgatggcaatgtgcaaaattgaagagaggagcgaaactcacggctttgcaggtcgggcagcggcggtagatccggctgctctccgacttgacgttgttcttcttccccttgcagaagtcgcagagcagccaccctgcgccgttgcaaccttcgcactctacaccttcttccttaggacaagaagaatcatcacagccaaggtagttcaacagcatcagattcgaatggtttttgcatcgaaaccacacacagtcagattctcagcatcagaagagagggcgaaggctaccaatggtgttgatctagggtatgtttggatccttcgctccgctagcctggctcagcaaggctaaaacatctcattgccagcttgctagccttgccgtacccctgtgtttggttggtttgcttccgagggcaaggaatagtggctagctgtttgaatccttcaaaaattattgctttgcccaagtttattttgcttcctttttttgtccaaaaattaaaaggcactggtcatgttaataatcttgcattgttttttttcccatagccattcttttgctagtagtttattactaccttaaagttatatggcttgtttggtttagtaccctaccaatatattggtagtgccaaactctacgcaagttttggcactaccaatattttggtagggtagaattgtaaatgagtgtctttagatcaatgtcaattgagagccaaattttgaattgtggtgaagaacattctagaattgtgccaaattgaatatagtcattacaaaatatttggcttcaaaccaaatcatcacatttactatttaaactaccaaaaaattggtatggcaacattttgatatcaaaccaaaatggcccataatattttaggattcacaaatgagaaatcaagagaattccttaatcaagtaccatcataataaatgatcttggcaacgcaaaggctgcatctagcacaaagcaaacgatctcaaagacgctcttttctaactctaccaacttcctgacagagcgattgaacaagacagcacaccatgtatctcagaaagaagaggttaggagctgacgataaagaagaaatcaaatctaggagtctacgcggatgagatcgcctccggattgagctgctgctaatgagttcgtctcctgatcggggagagaatatcagcgattccggagaagtccgcgtcgcccgcagacaatattttcacgcgagtgaagtttgacgtcgaaagcgagccaaattggctctccctagccggcaaggtttttctcgccctgtacaactaactcgcccttaaaagccaagctattttactagttccaaacggatagccttgccaggcaaggctagggtgacccttgcccaggatccaaacgtgcccctagtgatctgaaccgcctatggtagatcggacggcggagggaggtcaaggttaggacagttacaaatggtaagcggttggacttcctagagagaactaccacagggcaccactgctgtctcgctgacccgtgggcccgtcctgtcggtgtgaggattgcacggttgcaccacacactgctccggcaaagcgccggcgagctcagggagcatgcaagataactaacctctgtctcggcctcagcctccggcggcgccgccggctccaccgccgcggccgcggcgacctcccttggaacggacacgcagccgacgaccccgcccttccttctcgtccgccgcgacggcaccggcagagccgccggcgacaaggtacaccgccaccggcccacccacctgtctagcccagccgcgccgcaccactgcgccgccgccgccgccgccgccattgttccgcctctttacacctcgcctctccctctccacctcttctctccctcctcgtgtggataaagccgcggggaaaacgaacggctcccgcgcctgacgccccgggcccacgcgagtccacgtcggatcgtacacgaccactcaccaccgaggctgacactggggcccacacagaatccaactcgagacatttttaactcacaagtcaacggctccagcgttgaacacttgaaccagatctcgccaccgcgtccatggcgtcgcatcgccgcctccgcctccttttgctcgcggcgacgctcgccgccgccgccgctgccgtagccggtgtggaagaagaagaggcgttctgcggagtggagtccatgccggacgcggccacgctgaggccggaccggctcacggtgctcctgagcggctactcggagcggcggctcccgctgctccgcgccatcgccggagcgtacgccgcccacccgctcgtcctcgccgtcgtcgtgctctggtccaacccctccacaccggacagcctcctgtcaagcttcccgccggccgtcaccctccaccgcaccgccttcgcatccctcaactcccgcttcctcccgcacccgtccatccgcaccgcgcgtggccgtcgccgacgacgacgtgctcccggacgccgccgcgctctccttcgcgttcgccgcctggcagcagcgcgcccgcccgggcaccctcgtcgggttcttcccgaggtcccaccacctcgacctggcccgcgggaggtgggcgtacggcgcggcggcgcggcagcaggcgcgctactccatggtgctcaccaagctcctcgtcctcggcgcgggcctcctccgcgagtactcctgctcgccggagctcgccgcggcgcgcgccgtggtggaccgggagcgcaactgcgaggacatcctgatgaacttcgtcgccgccgaggagtccggcgaggggccggtgctggtggaggccggcagcatcagagactggggcgacccgaggaacgacgatgccgacgccggcgccggcgccggtggcgaggagatgaaggccgtcggcctgagctcgacggggggcgcggcgcactgggagaagagaggggattgcatcacggagttccaccggctgctgggaaggatgccgctccggtacagctacgggaaggtggtggcggcggccggcggcgagcaggcgctgtgcagcaaacgcggccgcctcgtccggtgtgaccaggagtagctctgacacgatgagtcttccctgattatcactgtaaattctgaaaacttgcagatattggtaaatttaattcagaggaaatccaggtttaaaacagtagtggagtataaattgtagtatgttctatagaaaccaaatttacagagagcgattgtagatatctgataattcaggcgtaaaatcaattcaaaccccaaatcagcattggtaaaattaattcaaagtttcaaaccccaaatcatcaagttaatcccaggcattggtaaaatcaattcaaactcgaaatcatcaagttaatcccgtagtctttcgttgagcatttcagagttatacaattacttaaaaacatttggcacatctcacggctgaaagctttgaatttccgccaaaacatttcaagatttagtaaaacaaagctttaaatttaaatttagcgtatgctgctaattgtggcgcgcacacggtattctttagtaaaaggcgaaagaatagttcgctttgtgctcaccacgcagctgcgtgccttccaccctcacacccaaccccccttatatagccacctccccctccaccacccgcctcgctcgccgaggtggtactaaactcaaacccccacctcacacggccaaaccgcgcgcgacacccctcctcggcttccgccattcggcccaccaccaattcggcccatcacccatccggcccagaatggtggccttgtgggccgcccaggtgacgcgctgtcgctgtctcgagaagcgaggcgcattctagaggcttccggagatggaaccgaagcttctccggtcttcctcgccttcttcttctccactcgtccactcctctctcgacgagccccgtataaatctcccgccatttcgcttccccccttcgctgcgatgcgagaattaaccttcgagtgcaccgggattaagtggcgagattagcgacgtggtgattgattagtggagcaggatatggtggtgctcgtggagtcccccggcggcggcgtgacgctgaagaggaagggcggggaggagcctgagctgttcatttgccccggcgacgtcgacggcgggctcccgctcgcttgccgcgcgaccaaaatgaggcggctggtgcgcgatgacaacgcggcggcggcggacgacgtggcgatgggcgaggcgccgtctgcggcggaggtggcggcggtaggtgaaagggctatggtggtgtacgagccggtcgaatctgtgggaggcgtcggcctcctcggccagctgcggcggcggctccggccgtgggccagcctccgcgctggcgccgagtggatccgggacatgctgcggaggcggacagccggacggtgcggcggctgttgtccggcgccaaaaaagaaaagagaatggcgccggcatggcccttgtccgttggggctccgcgccggcagcggcgggggattcatggcgaaggatactgtgggcgtctcgtcgtcgtcgaaggaggagaagaagaagnacgccgagggctcagcgaagccgatggaggtcaagaaagagggcgcgcatctcgccggcgccggtcccccggccgcctccggcgaggggtacctgttccggcggtggccgcagcattgcatgccgccgccgcagcagcagctgccggcgatcgggcaggcgagcccggtgatgtggtggtgaaattgggaaatcttttcaccccgtgtactctgttgctgtactgtaaaaatcagttttcaactgaaatagagatgaatttggatcagattcaagagaattgtttgaattcagtactaggaaaacgtacgatcccaacattctgcgatcccgaagaatccctccgcgtccgccgtggcagctcgccggagctccgccgtggtacggacggcccatttaagttgggccggaacgggattgcccgcagtgttggcctgttgggtttcgattggtcaggtattgggccgtgcagttggtgggccttttgccttcccctctgtagccaccttcgagactccgacccctatgttccacaatgtcaattccgtgttttatattgttatattatataattaactagctggctggcccgcgtaattgcgcggctagcacccaaacaaaatcataatattttttagtatgattttacttaaaatttataaaatagctatctggctatctcattgtcatgagactttgaaattccaaatcttatcatcctcgtgtttataattatgtagtttttaaaagtcacaccagttgctaccccttatgtcatctccttctttatttgcttgctcgatctaccactatttctattcattcttcttgcaacctttaaaaattggattttatagcttttagagtcgttggatttcatttttataatttctagatgtcctgtcaaacgttgccattatactcctttacggcccgtccactatctcttctctttgttgtcattgagattttaaaaatcgacataattatcgtttgggttcatttttttactttctagaagtctcgccaaaccgtcagcagctttaccatcgtactcctctgcggctcgccgctgccctcccttttttattgtcattgagattttaaaattgaacatgattatcattgtttttttttactttttagaagttttaaacctttaaaaattggacttgtagttttattttttataatttttagatgtcccatcaaacgatgccactatgcccctctatagcccgtccgccgccaactatttattgtcattgtgattctaaagattgaatataactatcgttggaattcattttttattttctagaagtcccgtcaaccgtcggtggctctgtaactatactcttatacatcccgcccgctgcttctcctttttattgtcattgagattttaaaaaatgaatatgattatcaatgggtttttttttactttctagaagtcccggcaccgccttactcgtttgctttacggcctgcctgatgtccctccttttaatcgtcattaggattttatttagtgttttattaacaatttctatatatcgtatcaaccgccaccactctactcctttataggcatgttacttaatttatctcgtcatgtgttttagatggtcttttctttcaataatctttatttttatcacaaattttagttatttataaattgtatgcctaattgaaatcttatttttctttttctaatttcagatttttttaaaaaaaaattagttaatatcgtattgtgttattttaatgttttaatgttttattttcaatttcagttgtttcaaaattgtactcctacttgaactctcttttaatttttctaattttagatattattttatttttattctgaattttaattaatctcgtattgggttcttatatggactcttcttttaatatttcttatttttaactccgaatttcagctatttttaaattgtattcctacttggactcttcttttattttcttttctaattttagattttattttatttttatttcgaattttgattaatctcgtattgggttcttatatgaaaacttctttcaacattgcttatttttaattctgaatttcagctatttttaattgtatttatacttggactctcctttccttttctaattttggattttattttatttttattttgaatcttgattaatctcgtattgggttcctatatgaaaacttgtttcaatattgcttatttttaattcctaattttaactatttttagattgtacttctacttggactcttctttttttttctttttcactgattaatgtggaaatttctaacttccacagcgaacgtggtgccttctttcaaagctgttttaataatataatagatagagagagtaaagatgtcctttgttctaatatatcttttgtaatggtagctgatgtctaattgcgtgttctatgttactatattttaaaacaaaaagacgaaaagcgtaaactattgaaaagtttaaaggcatgttcgctttgttgccattttcaaccttaccaaattttgacattgtcttgccaaaattttagcaggatttgttatgtagttaccaaaaatttgcagcaaactactttttggcaacattactaaaatttagtaaggttaaaaatggcatcaaagtgaacaggccctaaaatactcatgaacatatttagtataaacaacaaaaccctaatatagtaacgtgcaattcttttgccaaacagtaaaaacaaaaaaaaaggcaacatgagctgtaaggatgaactaattaaaattattgtatgatatttttgtaaaaaacaaacatttaattatgtttgcccactaccattcgcaatgtcaatgggcaataattcttgtcctcagatcggtcgcactggtcttaacaaatgcatttatctgcaaaaaaaaaaaacttggacaatgcaaagcttcattcataatgatatcatgactgagtagaaattgtactgcagtacaacaactaatgaaagcatacgcattatctcatctatcaagcgtgagtgatgtccaatcgcataaaccgcggagccgacaaggtgctcgtttggcatcacatcaggttttgctgatcaaagtgcccggagattcaattccagcgacgaaatcttctagggttcatcaggatagccggccgctttatttgacagattcctgatgatttgtcgtcagagtggataacatctcagtcatatctctattaattaattatactcctaattcttcattccaacagttaatatcactgtatatgcaagagaacattctt

SEQ ID NO: 4397 - DNA, 76576 bp, Oryza sativa
  unsure (1)..(76576): unsure at all n locations
gtcgtgcggactggccacgacggctcgcgggtgattcttggcgagatctccggccacaagctgtggaagaaagactacgcggccgccgcggaggcgatggcgaccatgtcggcgatggacttcgccaccggcgtcgacgagagcgggccgtcgcctaccgccaccgccgccgccgccgctggcaatgtcggcggcggcggcgcgcgtgcgcggatggggagcgtcgaggaggagatcgcgcctgtgccgaggctgacgaggttcagcagcaggaagatcgggttctcggcgagcttggcgaacatgatcatggtgagccaccggaagaaccgggtgctgacctgcaaggcgacgagctcgctcgccgccgtcatggcgcagatgctgtcgcacagggccacgcatctctgggtcgtcgaggatggcgacgccgacaaaggcgccgtcttggttggcatgattgggtacatggagatcctcagggcggtcactagaggtgttgttgtccctccggcttgactgctggctgcaaatccagtttggattaaacaaattttggtagattttattgtttgttgagatgtttttggagatggtattgttttcttgtttgagttagtaattagaatgtgttaattagctgtacagttattataattgttttgcttagatgggtgagtgatgaactgactaagtgatctgaattataaaagggattgcccaatgggcaatggcagctgtttttgtaactgtgaagtttctccatatttgagcagatatttcagttctgttatcttctgactatttcagacagcttgttactcgagcttcattcaggggttcaggcaatgcaagaaaaattcagtgagcaattcagatacgcatagttcagatagaaagactacaaaatgtcttacgtaaccacttccgtaataatggtgaacactgaataatacaacggtaatttaaatacatctggcaaggaaaaggcacattctgctagtaactgaatggtattgttgttgcacaggtacgaggtggtttgatagtatcccacgctaatccttccttagctcaatgaactcacggtgagagccggcgctgttgatgacaacaatctccagtttatctccctgcaaaattcatggaacaaaattagaatttgaatcaatactgtttagttggccactagtgattaacttcgagcaaccaaagagatttaaatcatcatacagtgtatatgtctcgttctgtggctgatgcaaaaacgtccttaaccagatcgacagcatctgattgagataatggtgtcactgcatcctgcataataacagtgaattattagagctctcattcgtcagaagaaacatacttgtatctcataaacgaattatattgttttgttttcacaattcttctagagagtcaagcactagctgaaattatataactcacccgagctggaagtagtaatgggctaggagattttagctgattgtccagaacaggcatcatcaaagctgcacctgtcccctgagcactataacctgtcctttcataagacccaacagcatcatatgtgaagacacatcctttacctgcaaaagaagaaaagatattctcacaggtcgtgatcatacgttcatactgatgagcggccactgtaagaggtaaagaagtaaccccaaatcataccttcgctgtcaagtccacccaacacattgaaggcatagtatgggaagaaccttttgtagtagagcgtgttggacagtaattgcgccatcgcagggcagctcattttcttgttatggttgtgttcataaagctataaaagcagaaatgatcataagcttgtactgaatagaaacactgttcatgatcaaaactttgaataaacaaagaaccatgtaaaagatcagataatcttcagggtcagggcagatagtagatcagattattgcgataaagttgtcgaaaatgtggttaatcatgaaaatttcttgcagttacagatggttttagagaattgttcagacttaccaattccttggcagtaaggttcctctgcaaagctttaacatcaccttgaaatccagatgaggccaaaacacatttatccgctctaattgaaggtttagggaaacggcattagcactttattcagaaaaaaaaagagagagagctttccaacaaatatgttatgcgcagctgcgtcgtgattatttggtagcaatattttaagggatagtttgcagaagttactataggaaagtttgtgcactgaaacagaggatttgggctgaaccttcatccaacgatacattcagattcaatttactcctcacgtataatttcgggtgcagaaaatcaacatcagtaatactacccaataaattcatgcgcactccacaaaatttcagctaggcctattttatttttttcaaattcacaacatatgcagtctcttcccttcccttctaaaaagaaaacatgtgaaatctctgtctctctggtaattaaaaaccacaaattcatccctagcaacgcatccatgattgactaactgactaactaacaaactaactataagcgggggattaatcagaatcgccgaatccaaccgagtccaattcgcaaatcggaccacacatcatcaaacgtgagtaggtaggtaggaaggagggtttggaaaacatacaggtgggcgatcttggagctgtcgcggctgaggatgctgtatccgacggagaggcgcgtgtcggcggcgaccacgcagtagtcggcgccggcgacggccacgcacgtgccgccgttgttctcgtacacctcgaacctcgccatcgatctctctccctcgctctcgctcctcctccttctcccgccgcctcagctccctcaccaacctcaaacctcggcgtctctctctctccctcaggctggcgcggcgcggtggcgcggtgcgttgcggcgaggcggacgggcggcgagtgcggcggcgatcgggcggggcggggcggcgcggcgtcgcggggaggctagttttatttcggctcggcttcttcttcttcttcttcttgtgctgcaagaagagggagaccggctcggaggttgcttcgccagtgggccgagtccgagtcgcggaagaagctaagagaggctcggtccggcccggaacggcccgtcttggagttggctggaaaactgggggccgtaagagatgtttgggcttaaaagcccggcctacaattgggccggtttatatgctcttcatcggcctaggggaagctagcttagcccatggccatagatgaacgtttttgcttgtttgtttttactcttttaacattaaccgattttgctatcgatcactagcgtgatttttttttgctgacatttcacgttttttttgcagcctcgtcagctggcgtgtcggacaccagcacgtcagccttcgtgtctgtgtctagctagcccaagcgcacacgataatggagattggagaagcacggtaacacagtggcctctgaccggcgagccagccgccggtagcacggccaatactgatcagcgagagacaccgttcctctcgtcatagtcatgaaatataaaattacagtcctatataactaaaattacatttgtaaatttagttgatttgataggtaagtgtactgtaattttgataaaaaataatgtgtaagtaaatatgtacttattattttctttaaaatataaaattacagtcctatataactaaaattacatttgtaaatttagttgatttaacatgtaagtgcattgtaattttgataataataatatgtaagtaaatatgtacttattattttctttaaaatataaaattacagtcttatataactaaaattacatttgtaaatttagttgcactgtaattttgataataatattgtgtaaataaatttgcattagttattttatttcaaatataaaattacagtcctatataactaaaattacatatgtaaatttcgttgatatgacatataagtgcactgtaattttgaaaaaaatgttgtgtaagtaaatttgtattagttattttattttgtaattcgttggatgcaaatccaaggaaagaaaaaatctgggtgattttatctcaaaaatcacccgagtgatgcataggcggtcccaacattaacattttattatctcggttttcattagcatactctttaaactgctaaacgatgtatttcatgcgaaaattttctatacataagatactttaaaatattagataattcaatttcatgtttaaaataattaaaactcaactaactatacggtaatgactttcccttatgtgcccatagttcatctttatctgacatgaattcgaatggggctaagttactaaagtttaatagtagtagtagcttattgataccattcgtgtaagttgcaagattaatatagtcccactttcctagggcaaagacaatataaggtcccttattagttgtatcgttttgggacaattaaattttgcaagaatttcacatgaaaaccttgatttttttttggtatgtacgatatgaagtttagattggataacccagattaatctgagagcctcatcggttgcctgtattacctaataagccaaaacagtttactaggaaataaaaattaatttataggtaatttttttaatatatttgttcataacgatttaaaagtcaatgctaaaaatagtttgcattgaaaacatcttaaaatcaacttcagaattaagtttgaaaattcaaattttaatttttgctttggcttattatgccaaccgatgaggctctgaaataggggcttttaactatttgccacttttagatttggcaaaaaactacttgtcacccctatctcaatgacatgtgggtccacatgtgtctatgacatgtgggcacagtggcaaaaagttaattgctgcatctaaatgtggcaaaaagttaattgctgcatctaaatgtggcaaatggttaaatatctcctgaaatacgtgcaactcagtgaattttatgtaaaccagctgggatgttttcatttgatcagccaaggcgtccaccttggtacgcacacagcgatcattttcttttctaaagtgtatatgactctatgagcaactgggttgaggtccgcgtcacatcgagtgggcagaacggtggaacagctcagctcccctgcagccaaaaacaaattcagttcaccagcaaaagaacacctgggtttaaacaactccgttctttaacgtcaaaggagatttactagtctatttctcgagccatgacgccaactgctttcttttgctttagttgccaggttttaatcttgtccgtgaatggaaagatcaaagtttgtgctaaatttggtttagaggagccaccactgttaagttagtgcgctgacctacctgcaggctagctcctctttaaaattctctccctttttcattgccatccaacatgttttgatcagacttctcttgtttcaggatgaaaagattgtttgccaaagcagtagccgtctatatatgtgctagcttacttgtttccgttcatcttttcattcttttcgcttcacagaatctctgagttgagtctcattgtaaagtcaccatgcttcatactagtttatagccctcattttaaaaaaaatctcttggtatggtaaaaaacagctagagccgttgtttgcatcttgtctttctctctctgttctttttttaaatctcccatggcggcctagttgcaatttccttttttctttcacttttcacagcttatgtcaaaaccattagcaacagaggtagtaggagcttgcaaatggcagatgaactaaatgatcagaattcagagcataaattcttgcgtgtgggatcaaatttttcttcaggtggatgctcggatatgttggggtagtagtactagtttctttggagtttgtaggacaagttgatcgaagccactcatcaatggtaagcatgtgctgatctgctctcggatagtggagttctgacgcaggaaaacatattcgtagggctattttgaaacgtaggaaaaaaacatataagaataggaaaattgtagaaataaaataattcacggctcatttaatactactggaggtgaattcacaagtatttgtaaaaaatgttgttacctagcactacatgaaaacataggaattttaagagaaaacatgtggtcatgtctctttctaatttttttttaaagataagcctcgaaagagcacagagagcacatgtttttattcaagaataaaatgttttgtctagtttttagggaaaattgggcccaaaaatctcacgtctgacgtctctttctaattttcctttaaaatacttatgaaattagctatcccatagaaatttcaaaatattttgtggaggtcatttcttcgttttaaaggggcatgtagaaattatttccaatggatttcaatcctccaaaatccctccattttttcccatgttcccaagcagccaacattctctcaaatgctacaatgaaatcaacatcgcagttctgaacatcaatgcgtccgtgcgtgcgtctctgtcgttcacgtttcccaggttaactattaccaacctcccgacttcgattcgatcactccctgtctctgtagcactaatgcgaaaatgctaagcttagctttgtcagatcagaatcaaattcgcatgtaaatatgtgagttcaatccgatcgctcaccgtgtctctaccacaagtgcgaaatgctttgctagcttgtcagatcagaatcaaattcgcacgtaatatattcaggtctacgtcgagcgtaatcaatcgaactatcggtctagcgcagcgcttgtttgtcgttccctgggttgaaggtgtcgtttcaagctttttgaatgaaaaatctagctctggctgcattacattcaccggatcttcataaatgtgttgtttaagagtagtcttagacttggtgtactcgtcctggatgtacgagagtgagctgccgcgagtgatttgcatctttgtgttagcttctttttctctctctttttgcgcatgatagatgcagagcagcagaggcacggtgtaaatttatcttttaattgaaatatatcctacgattaaaaaatctattaattgatttgtacttgcatcatccccttcttgcatccattcatttcacctaaataattatatatttttataaaaaaataacaagataaatttatatgatatatatcacttcacagatactcttgaacaaattctttaagttataacaaatataactgtggatatgtatactagtttcagtttattttattccttttattacaacttacatattttaaacttacatatttatggagcggtatgtataatattaatctattttatcaatttattttttatgaccatggcataaaaaaataagtggatgtcctgttgaggatgaaattccatctccaacgcattgcttatatatatgagatgttttacggtgtttgcgaggtacatagaggtacttggagggggaacaacgtgcaccgttgatcaagagaggggcaaggtacggaacaaattttgtaacatgatggcagttgagtaattaacttgtaaaacatgggcattatactttaattgaatactaaaatccatcgatcggtatgccatcagaaaaaagagtaaatctaacatccatcgatcggtatgccataaaaaaagagtaaatcacggatatccgatcgatctataccagatcgcatcgtcttctttccctgctttgttcttgttctagggtttgaacgtttcaccgaaaggagacagggttcaccaaaaggagacaagagggaaaaatgtaggcatggttgagggttgaataggagactagatcgcctggtcgacgactagctaggctcaaactagcgcaatataacaatataacacaatataaatctcttgctggaaataaaatataattttcaacagaattaaggtaggagtttttacgtattcattggaataaaatgtaaatgtagaaaaaatcacataattaggccaataatgtgttataagaacacaatataaatctagacttcaatacaacgtaaatttacaaaaaaaccatgcaaaatggaaaattaaatcctagtgccgcggtaaacgacttaactccaatacaacgtaaatctacaagaaaccacgcaaaacaaaaaattaaatcatgcagatagaggttttacggtgttaacgcgtaccgttatacctatgcggtaccttttataatttgagagacgattctacccttttctctctactagtaaaattatgtttttatccttagtacctaagtacctatatcaatacttaaatatctttaacatggtacctgtgattgaggagcgttggatctttacctcttttggaatgcaaacaccataaaacctctctatatatattcagctagaaatctgtaccagtgtgcaccaccattcattcgagtagaggtggaaaaaaaaactcgaagcttgtgacttggatcaattcaaactcatagtcttaatgagtcgatccgagctccgtttagctcgtgagcttaatgagctagcttgaactactcaagcttgagtttagctcgtttgtaaatgatatcatcatatctttgtatacttagtgcttgttaactagtccttcatttttttaattacatcaaaactatttgtatttagtgagtttaatgtttattatgttaatatattacaaaatcataattttgaaattattaacatgatataaatgagatagagctcgttaaccaggctaacgagcttaacgagccatctcgcaagtcaagccgagctagcctcttagctccgaggaattttgcgattcctcgaggtacttaaattttacactattacttttagtatcttaaggtacttactatctatactatctagaggtatcgaattttacacgtatctctgtaaaaattacctttcagctcatcaaaattaacaaactgagacgaactagctcattaaaataactgagttcaaacgagccaagctggcctaaattccatggtaaaagctattagctagcaatgtctccaccacgtcgatatcgatcgagtgcaccctccatttactaattacttccatattaaagctatcatcaatccatccaatatccatcgtgcactgacgaaaccagctgcattctgctcccagtaagaatcagaactcaattcctccacatatatgctctgcaaactgcaactctgcaactgcatccatcgattgatagatacatgcacatagctgcatctgcatttgtttgttcctgtcacctttgtaccatccaattccaaccccacatttcatcctcgatctttctggtttgccgagccaaacagagcaagcacagctagtagctagccaatattcagataagagagtggagtcaggaactcattagaagagacatctttaatttgctcatggccattgggacccaatcacccaacacatttgataattgatactccattttgattcctcttcttccccagctctagctatatataaaccactccaatggcagcacacaaattcatgaattcccagttcagagtttcaggtactctcaatctgaaacatatagaggagctagtagcaaagagaagtaattagagtgagcttaagtagtaattaattagaggaggttaattaattagggaagatgataggatggggagatgtgtacaaggtggtgggggcaatggcgccgctgtacttcgcgctggggctagggtacgggtcggtgaggtggtggaggttcttcacggcggagcagtgcgccgccatcaacaccatggtggtctacttctccatgcccttcttcaccttcgacttcgtcgtccgcaccgacccgttcgccatgaactaccgcgtcatcgccgccgacgcggtgtccaaggcgatcgccatcgccgccatggcggcgtgggcgcgcacgcgctgcggctgcgccgccgccaaggccggggcgcagtcgtggtccatcaccgggttctccctcgccgcgctcaacaacacgctcgtcgtcggcgtgccgctgctcgacgccatgtacgggaggtgggcgcaggacctcgtggtgcagatcgccgtcgtgcagtccatggtgtggttcccgctcctgctcatggcgttcgagctccgcaaggcctgggtcgtcggcggcggcggcggcgtcgggccggcggtgatgtcgtcgtcgtcgccgccggagaagcagagcgacgtcgagatgaacggcgccgtcgtcgcggcgccgggcggcggcggcggcgtccggctaccgttctgggcgacggcgaggacggtggggctgaagctggcgaggaacccgaacgtgtacgccagcgttctcggcgtcgtgtgggcgtgcatcgcgtacaggtatatacgcgtcagccatgcattgcatgcgccatcgccatcgccatcgccgtgaagtgaaactcaagtttctactagcttcttgacgtcgccgtcgccggtgaacatgcatgcaggtggcacctgagcttgccggggatcgtgacggggtcgctgcaggtgatgtccaggactggcacggggatgtccatgttcagcatgggtaagctagcatcggcataaagtttttctttttctgaatagccgaataattttgcgttataaagttggaaaataggtttaaagctgttgcaaaaatcgcaccatttaggaggccagttgcagggttcaaaatcccgataccagatcgaagtccactcacgggcggtttctttggatttcacataatccataaaaagggataaaaactgatgaaatccgaataaattttaccaaaagaattaaaacttagtttaatttttttaaaacttagatcgaaaaaccgagcggtatgtgttttcgacccagttcgaaaagttcagatttcacgtaattcgaactagattctactggatttatgtttgatgattcaagttgttagagaaatgttgttgcaataatggttgttgttgcatatgctgaataattgctgatggatatcatatgtagtgattggatatgatatatgatgagatgcagggttgttcatggggcagcaggagagggtgatagcgtgcggggcggggctgacggcgctggggatggcgctgcggttcgtcgccggtccgctcgccacgctcgtcggcgccgccgccctcggcctccgcggcgacgtcctgcacctcgccatcatacaggtacacctccttaattttgccttgtcgggaacacaaactgttcacgtcacatcgccggcgcttttcgccgtgtacttagatacatgcaggggaaagtgatttcgtgtacacaatttagcttgatagactaatataaaatataccactccacaaatatacaaattgaattttttttatttacaagttgtaaaaaaacaaatatagatgcggatgtacgataaatattttaagtttaatttgttttttttctaatttgtaaaagtcgaatttagtcttgtttgtcttgaaatgatatattttatattaatctatattattaatttttttataactatttagatgatatgaaaaaacaacgagatattttctcgacagtggtaatttagtttcgccttttgctttcactagtttatctcttctccgatctcaattaaataaactatatatatccggcttcctagagaaaacaaatgagctcgagaggtcggcagctagtgcatgctaactgcagatcacttcgatttgtcgcttttctgaaactcttgtttcgtgctaaccagtgagcaactaagcaacttggtgagtggtatatacgtacccaacttttcacattggggatgtgtatgtgtagtgcatcagcagcagtaaacgaactagctagtgtgccatgcatgcatggatacaccagataagtcacaagtatatatcgtggcttgcatttcaggagtttggaaattttcaaaaatcagtcatcactctcttcttgtccatatattggatgatattttcaatggttctcatctcccctgtattactaatttaaacaaagttaatcccttctttagataaaatgataaaaggttgaacaataaattattctaactgataaaaataatacaaaattacattttcttttactgtaatgcaaaattacatttataattcaatataacaccgagattccagataaattaaactaaaattgcacatcgcataacaatgcaattttaggctttagcaatgtgtaattgcaagcgacaaattttaacgcccctgaaatctaacaaatatgtaaggtgcttaaagttttaaaatttcagccacctttttcatctcttaaatgataatcctcatcactcctaagtcactactccttaaaagaggtttaatactcctacttctttgaacttttttaaaatgatgtaaactatttttttctttttcgaaatggcttgtgggttcatgacttcattctactccatatatatggtgaaatttaactgctagtgctaaaaagagaggtatttagaggttctatgcatacacacgcatgtataagacattagcatgcattccgatcttaattaatactgatcatgtaatcaattttcatgtacatatatgcaggccgcactgcctcaatcgattgcttccttcgttttcgcaaaggagtatgggcttcatgccgatgtactcagcacggcgtaagttaattaattttcattaatttagtatcaacctgatgattaattatgccgtacgagttttccttaactgcgttggattatagattaattacagtatcagtctgccgttgaagtactaataacttgattaatcactaacgaaaatctaattttgaatgcagggttatattcggaacattgatctctctgccgattctgattgcatattacgcggttctgggctttgtctaacatgcatttacagcacggcatgcttacttatattagatttgcttcggtccaacaaaaattatctcgagataccgatacctcacggtaccgataactcatctgctcagctagatccaacgatcgaaaataatttggtaccgtgaggtaccggtatttcgagatactttttgttggacgataacaaacctctaattacattggatgctgagatctaaaccaatgtggagcgtcaatgacgcaacagaaggatgttaattaatcagagtacttcagcaatagagagtttcagtgttgcaagctctgattaatgatctaatattccaattagtcgatattgtatttcgagcaaagtaaataataaagttttcaacagttttgctacctaatattactgtacgttggagcaccagggaaattaccatacacgtcgagatcgctttgtgagcatgtgtgcaaaattcgtgtgtttaaggtctccccaatttaaaatgaaagaatttcatgggattttcattggaaacgaactaaaatcctgtattcagaaagccttatttttctattataggaaattcggtatttgcttcaaaagaagctgtttacaaagtcaccagctcatcaaatgactacaaataacagtacacgtgatgacaaaagaaaaaaaaaggttaattatgtctctagccttttttttatttttgaagaaaaattctctagctttcattaggaagaaggacgatggaaaaagctcaatttattggtacaaagttcccattgcctccaaagcagaggcggattacgtagacaactagccatgcacactctttttttttagggaaagtcattcagcgagctttattcattagacaaaatggttacattgttcactaacaaattcaggataaagctaggtgattcatcaacccaaatatcagaatactagctatgcacacttggtttaacactatcaagctacatttggtaaaacaggtttttagctctatccaacaaaccggtttcatggttgcctatcgaccactccatcaaagattacacagttacactccttttttccaaaataaataattttttatatacaaatctagacatatactccatattcagattcatatacaaaagttaacttattttaaaacagaggagtgagtcattccacaacgcaagttcaccatttccccgtcaagaggaaaaataaatgcagtcacatcaatcgctccaccaaaaatcaagctcaaaattagtctgtacataaaagaaaaaaacaaattcagacgtgaataataccggcctcgtttacatatacgctaggtttgtttttcttatctttatgtgtgaattgagtttaaatgaaataattttgtggagtggtatatacatattgttaaattttttaaagattttttatatatactggaaaaaaatgcccgtgcgttatattggatgaaggctattttagttttattattaatgttatccagtttaactagggtgaaaattattgtaggaattggcttggatattttttaaaaaaaaatcatgagttgtaattaggagttcaactctttcaagttagcatgtgagtttttttaaatgattccttatacgactatttttgtatttccaaaagcgtcccaagttggcatgcgagttttttttaaagagatttcacgtcttttttatttcctaaagcaaacgaatctgcaaaccgactcaaacacatatatgtattttcaaaagcgaatgagcattaaaaaccaagtcaaacacgaatgacctatcaaattatcggtaaaaatatcttcaatttttataatagtagagatttagatggtaaggatgatccactcgagcgattaaaatagtttaccatacattctcaaataaaaaaatcacataaagaaactgaatttgctcaaagtgattcacatttgttccgaccgatctgcaggaggcacacagctcaccgatagatatatgatcctattggctactatctgaaaatgcggcagattaaagtaggcatgttcttcagtggtgcgatgcgtacagcttagtacgtaccaactcgatcgatcgatcagcttcagaccggccattggtgccactcccgtcgacggtgactcactcattatccatccatccatatctcgtcgatcggtcgaccatcttgatccgtagcgtacttgtgtttctactgggaaatcatcacggcgcgcactacacgtacttcctctatctcacttaaaacaaatctagaactgagcttatctcatgttcgttgtaatatatcatacctaatcatagatttttttttatgacgaaggggtacgtatcagtagtatcacacgacggcaaactgaagaggtggatacgttctaagagttttgtggttggttacttgctcgattttcatcatcacgcttttcgaacggttaaacaggctgggtgtttcggatgaaaccttttctagaaattattttagaaaattaaataaatccatttttaggtttataataatcaatgcttaattaataatatactaatctttttttttgttttgcgtgcatctgctaaacatccgttttagaacgcactttagacacgcggccgtagtgtagtgcgttcctggcgtgaaatgcacaacgtacgtacgcgagcgcgtacgacgctggctgatcatggcctttgcactttgcaggcacaagtgcaccacctcatccatacacgaaacacggtacaacatctatacgggctgtttttttttttctaaaactgtttggtgatcaacaccgtcgtgtcgtgggctcgtggcctggtccatcaacttggctagcttgacgagaacagtagaccgaacgagaacagtagctcctgatgctacagaccgatcagtccagactccagagccgaccacagctggtgcagcgtgcttccgaattcagatgatcggtataccttgcttccgaatgtttgattcctcgagaaatccaagtggattatccacccatcgatcgagtacagtacagacagattccagaagaatttggcgccgacgggccagctttccctcaactcatcactcgccggctcccatcggttgcccatttgacctaaaatggcttattagaaaattaaaattaatttataagtaaaacttttgtagatttgttcgtagcgacttaaaagtcaacattaaccaaaaaaaaagttacgttaaaagcatttcaaaatcaacctcaaaatcaagtttaaaaattgaaattttgactcattctttggctatttagcccaaacgatggggctagccgagtcgccgtgccaggtcagcgagcgagctagcgagagatcaatctccactagggttccccaaacagttttggatgagattaccgtcaccccacaatttagtggttatcgcggtaaccgctcggttaccacgaaaactatgcgattaccacaaggtatactgtaatttcaaaaactgagaaaattacctcacgtgataactacacagttttataaaccctgatccccacccaggccgcgcgccagaccaccagtgcatcgacgagcatcaacttgtcggagctagggagcatccatgaccaaacatttgcagagcactcattcagttttcttctgtccaaggtttcaccctgcagcatgtagatttcagaacatatatatgaaggatgaacaactacacttcttcgagtacggcaaagtttcaaaatcttccaatcagcaaaatgctgtgaactttcgcgcttccagtctcaacaacactagacatacattctcaccccacacaacagtgagacatgaacccagctactaacataagttaaaatcctgtttccctatgtatttctccggattacatagctaagggtaaacacaggccagtaaagtacaacaggcttcaattcagttcagcgattgaagatgcgaatcattcttcagcagggccagaacggtgagaacagattatgccacggtccaggttacctctaggagagcaaagagaccagcgagacgaactccgatgttaccctgcctttcgatcttgtgttgatgacaaaatgttccggatacttcctcagcaatgcaaggagaccgtaccatggcctaccttttgtttcagttggcgaccagtcctctggtgaaaggtacttccggaccctgctgtggtgccacacattgccaaactgttcaagaagctgcaagtaaccaaacgagttagttacttagtttgcataccaagaaagaggaaacatgcttgagtgtaaaggtagcaagaaaaaagagatggctaggtgaaacgaagatctctccacaagtgcacatatgctaatgaaaatacatacaccaactgtgccagttgaacaaataagattgccatcgtagcattactgtactcatgatttatgctaattttttagatcactggttgaaggcaaagaggagaatcagaaaagatgacactatatgagagttctgacatttataggtacaacaacaaatggttaacgacaagcacaagagccaaacatttcaatctctccgggtgctggtgcaatccaagaaatgcccactgtggcaaatcgaaaaatctgagcttttccaagtaacagaaaacttttatcttttatttcttttccatatatttggactttggatgcaagctactactaataataacttagcagaagtaaacacattttaacactagttttcctcatgcatctgtccttgtttgttttgttagaataacaaagcctaactactgtgtttacatttaggcatcccatcactagcagaagcaactctctgagtatcagtacaaggttaagtgcaaaacatgttcaaagtgataagttgtatgtaatcatactattgtctagagtatgtctctggtgcttgtattggcaaacacatgcatttgaaatcctaacagtcctgtagctgagaggaccaaagttacatgtctatataattgttttgtctcctgactatcaacttatacacaccggcagaacaagatgcactataacccgtgttttagacaagacaccagattttacatggatatttgggatgctgtgtgttgatgacctgaatcatctggttcagattgcaggatcagctactatgatgattgacacggcagggatgctgtcatccaatttttatccccagacgacatcagccaacaagtccccttactgatcaagttttctcattgactgtgacggctccatttaatctttcgaatatatgttcattttatcatgcatttcaataaaataccattttcttcttgttttagcttgttttagttcacaaggcccattcctcaattttcgaaattatctaccccaaaacttgctttttccaagccaaaaggcagtgaagtttcacagaagacagggactaaaaagacatgccagagtataatctagcctctacctatactgtatagaaattggatgaaatatttaagttcatccgtgacaaacctctgtgtggagttttgccataggcatccattctccaggaccacagaggtcagataacactgttgcaacagatgacactacatccttttcttctgcttgcaggatgtgctggttatccatatccctgtcaccccttgatcttatttctgatctgctgtctgcacaaacaattaacaaaggaaggtggttaagatcagatcaaactataagatgtttcttcaatggcacagctatgaataaccagaacacacactaacagtccccaaagttgaatattcggagttggaaactggaaagggatagcaggggtgatccaaacttattccacaccatctagtaattcttagagtgaaatagaatatctcattctctccggctgataggagtagcacaggtaatgcatttaacttattgctgaacattcacattcatttacaaaaaatgagagatgtattacatttgctaattgaaagacgcacaccataaaatagtcttgttatactcaacttagacaacttagagaaaatacttattggcacaggctatgcaattgcatctaaaattggtatagtcttgttatactctatcttgcttatagtgtaaactgtacaatcttcattctgcccagtacagaaggttgaaataaccttatcttacattgatgaccctgagtttcattttcacaatgtaaatgaactgagcaaaaagtacagctatatttagtgatcgtctgattgatcaagcaaaatcgcatataatttatatcgaaacagcaacgccatcaatgcagaatcaacatgtactatcttttacaagaaaacaatgacaccaggataaaatggaaaggatatctagtaagagtggagagcaacgattaccaccttcaccgagtgtcccgattgcttcaacattgatccggtgcccgccatacatctccgactccgcggacagcttcttgttcctcttaatcaacttccccctcatcccaccactctcactgataccattcccaatctcatcaccctcccggccatagtcaccctcaaaggacctgtcatgaaattcagacagacgagggcggcctgtccgcacataggatggtggaggcatctgctgcgggatgataggcggatgccgagcagcggcggcggacgcgaagatggaccgggtgggcagcaagaagtagaacttcttgtccccaatctggagcagatcctgggaatccagcttcacggggtggttcccggggaggtggaggacgccctcgacgaggcacccgttcttgccgatcacgtcgagcgcgaagcggcggcgctggaagtcgtagaagatccgggcgtggtggcgcgagatgttcatcccgccgccgaggctggagaggtccacgtccaccgtcgacttcttgctgttgcgccccagcatgatcgagtaggtctgcatgtagtactcgaaatcctccccctggagcttcgcgaacccggcctccacctcgccgtcgccgcccgaggatcccgccggcatcgcgccaccgccaaggttggccatccaatccacgaaatcgacgaaatgatcctgagcttggcgtggcgttcgggcgcgggcaaggcggccggcggaggaggggaggctcaccggggtctggagtgtccggcggagggggcgcggctgcgtggcggcggagggaggcggccggccgccggcggcggcggcggaggatcgcctgggttggggaagtggggaattgggggacagacaggtagatggagaaggggaacactcacaggacaatcggattatgttttactacctctgtcttaaaaaaaaatctccaaccctaatttttcgaggtgaatataaaagaaccaaaatacccctaattaatagcaaagttatattatgagtgggtaggtgagggttactgaagataattttccaaggtgaatataaaagaaccaaaatacccctaattaatagcaaagttatattatggggtgggtaggtgaggggtattaaagattattttccaaggtgaatataaaaggaccaaaatacccctaattaatagcaaagttatattataggtgggtaggtgagagatattgaaaagataaaattctcgatttacagatcgatgataggcaaaaaggtagaaattggtttatttgaaaatgttataaaatatttatttaaaacagacggcaatcttgcttaacagacgacaatcttgcttaatcacttaatcatttaatcattttgtaatacaacgaatctgaataaaaagtatctcatacttcatccgtttcatattataagactttctagcattgcccacattcatatagatgttaatgaacctagacatatacatctatatgaatgtgagtaatgctagaaagttttatgatatgaaaccgagggagtatatctctaaggtttttttttctgagattgagggaagtgtctcatcaatttctaagttgattttgttagaccaagggaataattagcacgatatcctatgcaatctattatatactagtataatttttgcatgtcaaatataatcttgaatatcctatgtaatctattaggctctatttgagactgctgaaattgaaatgatctaatttttctagttgtctgaggagtcgaaatgttgttttagaataccatatagtttcttttacatgaggcataagcttagaagcgtgtaaacgaaaattcaaagtcgagaacacaaaaaacacgaccataattgaatacattgtatatttatcccgctgaagtcaaagcaacgaattgtcccctataaaatgaaacaaaaaataattataagtggtaaaattgcttgcaaccgcacaccctaacaccatattcgcacacatgtgagtgcgctctaataagaacatgtagttataatgacgaagaccaatgataactctcttatctcagtaaaatcttattagcaaaaaggcatatattttcttaaaaaacattggacaaacacatgtattcacaacacacacgtactcatccatacgaacgtatatatgcacactttacctcccaagcacaacaactatactgatatatattaagatttaagattgacgaactcattgcatatatctctgtattgacgggtacatcgtttaccgctaaaaattaattagccataaatacaaacaaccgtgggcaggtttcaccgccataactactcccttcgtcacataatatgagggattttagagggatgtgatacatccagtacatgtttagatttttagtaatatgatgtgttacatctcttcaaaatcttttatattttgggacggaggaagtaataagtatcttctgaatggatttattttaagtgtatttttaaggaaatgatgcgttgaaaaatgccaagcatttcatacagagtaacacccctattgggaaaaaaacgtttttcgccaaacatcccctctctctctctaatgtaatccaagagaaaaattggataaacaaaacgacgataaaataccataatgggattgagagggaacatgcagccctatcatatcgaaggaaaaaagagaaacaatatactatttgcaaatgaaaaaaaaaaatctgtgtataaaacttatatacatgttcttggcgatataaaattaaggcccctttgattcaaaggaaattcataggaattttagaggatttcattcttataggaatttttcctacaaagtcctttgaatcaaaggaatgaaccctatgaaatcctatgaaattcctatgaaatgcctcttcccatataagttttggaggaattttaacaagaggtagaacctcagggaaaaaatcctttgagtctttatctctcctaaaattcctgtgttttttctgtggtacaatcaaacggtcattcctacgtttttcctgtgttttgcaatcctctgttttacaattacattcctgtcaaaaccctatgtttttcctattcctccgttttttcattcttgtgatttaaagatgccctaaaggttaaaaaataaactacgatgagaaaatttcttaaattaacttcaaatttaacattaataatttaaattttaaccgacaagtataagtataaatgaaaaaaaagtgagtccggtaaaatgtggttatcaaatcataattggaagcgcaacgcgaaggagagacccgttgccatcggtgtgtatcccacgaaggaacaagacgaacgccaaggctcacatgcgacgcgacattgcctacactgtgtcacgttcgttgctactcctccttgctagtgcttaccacccctctccctcctcctcctcctcctcctcctctccccttctctcctctcctccctctccgccgcgcgccggtcgccggagtagcagggtgactgggagggattcagcgaggcaaaaccaatgggggtgctgggggacgggtcggggtggtgcttctgctccggcggggcgaagctggagcggatcaagaactccgtcctcgccgccaagggcgccgccgtcgccgccgtctccttccccgccggaggtggaggagggggcagaggtgggagtgggttcctcatccaccgcgccctcctgctcaccacgcacggcaccatcccctccgccgccgccgccgccgccgccgaggtccgcctcagccacggccgcctcccggctcgcctcgtgccgcagaggtattgaaccccctctccgccatttcttggatttcttcctccgcttcctataataatcctattgggttgttcaaatgcggtgcccaaatgattttacattttttttgtggtgggtttgcgggtttcgaatggaatcgattggtgctgcattgcgccatgagaggattcggttttgaaacctaatgcgacgcctttagcattttttcttttcccttttgggttgcacgcccgcaaggattgctagatgtttgtttgcactatggtgtagagagatctaattttcatcattcgatgtaaagctgctgcaattttgttcaaaatcaaatgaatctagtctttaggggagttcatgagatagtcattttgggcttctgaattacaagaaaaagaaaacttttgcttgctcgaaagttcaggacttggggacattgtggtggggtggggttgacttccatatggttcatgatactatcatttggggcttgttaccatgggacctagacaatcttgatgttattaatgcattctgttattgtagcatccgtacttttgtagtggggataatatatttcctttgtttggtcgttcaggatcaaatgcaactatgtacaaataaatttatttatcttcttcatacgattttggtggatcaccgaacagatttatgagccagcagatgtatgtcaggaagcattattgccattggctgagtaaagtcaattttgtgcaatagctgcgagaagcagatatagcatcgaggattacttcacatctttgtacaagtagacataaactctattgaattctggatgcctgactagaaaatttaaaatgggaggcaatatttgctgaaagtggtccatggttcaatttattcacttgattgctgggcataggacatgttttaaatgcattctttgtttctttacacaaaatcaatgtagggtcaatctggatttctttttgaacactttatttattgggcaaccacccaacattcgaaacttaattgtaataacaagaaatgaaaaggtgaccgtatagaactggaatataaataaatgtgctgtgcatctctattgcttttagagcgggaaacttagcaagtttttactctgaaattttggagtactgaaacatttatttgcccaagtgggccttttatttccatcttttactatgaaaatttacagttatttgttttgtttcattattccagattctttatcactagccccattttggaccttacaatagtgggtcttgatgtggtgaacgatgaattaaattcacacgggcaacagcctcatttcctaaagacctgcctgaaccccagcttggaccttggcagtacagttttgctcctgggccacacaaagagaaaagacctgacaataggcgaggggaaggttataattacaacagacaaccttataaagttctcaactgatgaagtcgcatggtatcctggatctgctggttttgatatgcacggaaatttagctttcatggtttgtgatccaatgaagcttgcaccttctacacctactggatacgcttctgcatcttcagccgcactcctttcagcaaagaaggatgtgccaacacagtttgggatgcccattcctgcagtctgtggttggttgaagcagcattggaatggtaacttagaagatgttagcaagccaatgatgcctcctgcacgattaatatccactgggcaacgaagtgagtgttcttctgttggtcgtcttaactacatcaagaccatggagcgagagggtggtgatgggatgtcatcatcacaaataccacctaggctgacacagcatcatggatcatgcagttcagcttctgcgaagatttcatgcggtgaaaatgattctgttgactcgcactctattcatgaacaacaagatctgacctcacaaatgcatgaatctaagattgagcaatctgcttcacttatggataataactttcctccagggcatccaagatcaattcgcctgccacttcctctaaagcacatgatgtcccatgagaataagataaaaccgaacccatcattttcacatgaagcacagctagctaatgtgaggatcaattgtggcactcttcacaatgttgcttaccaggaaaattgctggagtgaggctcagtccagttcctctccaccagatatatcagagttgggggatgagaggggcggttttagcagtggagaggagacaatgtactctgctgaaactagggaaagcagaaacatccctagcccaaaggaaaagaatcccaagatggttgggagatcacagagttttgtgaatcatagcaagtgggattccccaaaaagtgttgaatcttcgaaaggggccccctcaaagtcacacaccttcattcctttgagaaaaccacatttgcaggctgcagccatttcgcagaaaagccaagattttttcagtcctactgtctcctcaagcatgaaaaagaggaatttatcacaaattcccatgaaacctcggcaaagtgctcaagttacctccaagtggatcatctgatctcaccaactttcctcaaaccatacaaagatagcaacatcttttggttcaaccggttccacaaaatacttcctttttagttctgtaactgtatggtgtaaatgtattctagtcaaactatattctctagtgattcttttcagtgtaacataatctagcttatattcttttctctctaccgtgcatttgcccaatgaagggtaaaaccaatcatcatacaaaatgtagttttttgtccgacaggtagccatggaggatggactgagcattctttatttttcccaacaatgaactgggattcattggcacaagaagcaggactgggctactcatgaagctgcataattggataagtagtgttccatttctgtgaggagaataattggataagccaatgcctctgcagcagtgcagctttctcttcatatacagaagcacagaactccttgaaaattgacttttttctacatctattcagaaaaatcaaatgcaaggacattccagtgctataggagttccttttttttttgccctgtttcttctgcactcattttttgtccagttttggcaggaacaccatttgaaactgtttggtatggttcactttttgaaatgtcaagtgccaaagcaatcagcagttctctcgatgacagtgagtatttgatgcacatgcaacaatatgctcatcatgacatggcagatcataattgtatgcacatattcaggaaaaaaatactaccaggatgagaacaaatgtcatatgatttaaaattttcttcaagagttaaggtacaaccgatccctaaacttgttcgattggtaacatattctcgaaacacacaaattacccacattagcgtctgtgtgacataccacgtaaaattttggaagatcgtggtaattcaggatttgaatgaaacattttaatgagtttatgagatatagatatgtgttttgagagtacgatgagcgaacaaatttagggatcaatcgtgcactttatttattttttttataaaatttcataatacgagtagacaacactactttctccatcccactactaaatgagagaatgaaaataagatggagagaaaatcacccaaacatcccctattaaatgagcgatgatatgaagtgagagggtagttgagagtaagacggagagaaatttgaatgggatctgattgatgtgatagtaaatagtatagtaggattgtattattttgggaaaaaaataaatctagaattgtattatagtgggatgaagtgagtattgttttggcactttactcttaacacattggcattgccagaaatttaaggcctatttagtttagtgtttaaataaacgcttccaaaaattagcaatgaccaaattttgataaattgataacattatcaagttttatagaataggttaaatgtgctattgttaaaattctctaggattggtaacaaataggctgacttctttctgtaacttttccaactcaccttcctcgcttcccacgcgcacgttttttaaattgttaaaggacgtgtttttttggtaagaaaatgtgtcgcgcgccaaccatacctcccgacacagccttaatccatctacatatttatcaattttttttaaaaaaataagatagtttgaaatatgatatcaatccgaacagggcttaaaacctagctcatagcctagccgacggcggcctcgcactcgccggcgccggcgccggcgccgccatgctccgcctccagaaccacctcctcccacttctccgcgcttcctcctcctcctcccctgtacacctccgccgcctaatcccatccaccgccgccgcatcctcttcctcctctgtgcaccccaaccgccgcctccactccaccgccgccgccaggtccaccaccaccgcgacacccttctccatggaggactacctcgtcgacacctgcggcctcaccgccgcccaggcgctcaaagcctccaagaacgtctcccacctcaagtccgccaccaagccggacgcggtgctcgccatcctctccggggtcggcctctccggcgcggacctcgccgcggtcttcgcccgccgagccacggctcctctgcaccaaggcgcccagcgtcgccctccgcgtcgcctccctccgccaccgcgtcggcttgtccgacccccagatcgccagcctcctcctcntgcccggcggcgccaagggcttccacacatgcgacatggccccgaggctcgagttctggatccccttcttgggatccttcgagatgctcgatcttgaagaggaacaacgcgatcgtcagctcgagcctcgagaaggttatcaagcccaacatcgcgctgctccgggagtgcgggctaaagtgtttgtgatattgtccagatgtcccagacgtccgcgcgggtcctcacgttcagcccagagagattgaaggttatcgtgcagcaagctgagaaactccgcatgccgggttgctcatgggcattcaagaacgctgtgggcgccgttgcccgtagcaatgaaggcattgtcaatgcgaggatggagttcttgagcagttctcttggttgctccatggaaaagctccgctctgcggtctgcaagtgtccacaaattctgggattatctgagagcaaacttcacagtaaaatagagttcttggttggcaaagtcggattggagcctgactacattttgcagaggcctgtactgcttacgtacagcctggagaagcggttgctgccgaggcattatgttgtagaagtccttctggtgaagggattgataaaaaaaactgttgatttttacggttgtgtatgtgtgagcaacgaagattttgtagcaaggtacattgatcaccatgagaatgctgttccagggctcgcagatgcctatgctgcagtttgttctgggaaattgcctgcgttggtctaactctacatcttcagacagagatattggaggttcatcagtggaagtgccttcaaagtataactattagcctattttgatgggcatattggagatcaattatctttcaagcctagagctattgcaccaatttgttctctgaggctcattagttgatgttaattcctggtaatgtctgttttgaaattctggtttcaacagtaccactaccaataatttgatcgctcataatggtaggcaagtttcaatcatcgatattatgcagcaactggactgttttaatgttgcggcccttacttctcatttcatggatcggtacttcaacagctatttccctgttcaggtactttgagcaaacatgattttggtctcattacctgcatgttgaggtttacattgctcggtaggattattggaaagtataacgcagacatcaaactgcatatgctatgatatagtgtacagttgttgtccaagttcagtctaaaccattcttgaatggtgaaataccatgatggattgaactgtagtaattatagacgagaaatatcatgacatgctggcaaaatgaagggtgtggggatatgataattgataagggtgatttttcaagtgtctttttcagtctctggttcatttttcattggctatcactgaaaaagcatctatgcatgtcatattgtctctaatcgtactgtcatttatttaccactaataagccttctaattatctacttcaaaattacaatatgttaaatttgatgcttacaaggttcgctgaacgctaaagctaactaagtgttcattggatgcctaccacaattacacctagacaattgatcaggaacaggtgtggaagatggaacaaggtgatattgccttggttgctgcaacagatggctgccactccttgtgttgaagcctgaaggcaagccaaaaaataggccaggccttctgcggagatgcctgaagcatcgaactgcagtgtctcacactggttttgcagtactagcaggttaaaacaaatcttccatcctgcagccggtaggattgaaaaggtctcataagtaatgatgagaagttttgaaatagcgtaaacatattaaggggtggcgattatgtgatgttgtcagactctaggaaatcagtagaacatcaaggctttatggttgatttgaagtcgatgtggttcaacttctatccagatcaagtgaagggctttctgcagcattctgagaaacaaccacagattctactctctcttttttttttcctgatgagaaactccacagaaagataaagagttcttggttaccgaagttgggctgcatggtgaggcctgcaatgctcttgttcagcctggagatgatgctcttgttcagcctagagaagtggttggtgccaaggcataatgttgtggagttgttgatggaaaagatgttgacttgaactataatctcttctggtgagaacgatttcttagcaagatacattgaccatcgcaagggtagtactgttcatggactagcagatggtcatgctgcagtttgtgctgggaaagtgcctacaaaagccctagcttagcatatctggacctagatactggaggttcattccatctttctggctcataggctcatagctaagacctcgctgtaaacctggttgagttaatgtaattccttgtaatgtcttccaaatcttgatttagtattatagtaacaactaactatcttatccttcttagtgctatgcaagttcaattcgtggagtatgcagcaactttattatcttaattttgatgctctgctgctcctgtgaatatgtgaggtcttattgcttctgccattttgttcttgttctgataattttccaaatgtcattttcgcttcatttccctgttctctctagattatttactggattgtttgctctgtgctttgaaaaactatgttttatctaaaaaaattctactatattgcttagctcatttcttttaagctagtacttattaagtttgtttctcaaaatatttaatttatccttacgatcgttcactggaaagggattatgtgtgtgtaagatatttgtgactagtttattgaatatattttgataatatgtttgtttgatgaaaaaatattacatatttttctataaacttggtcaaacttaaagaagttcgactaggaaaaagtcaaatgagtccacgtatcctaattgagccaggccaacacaacatgaccaaacatctcactagaccgtgtatgggctctggtattagcacgtgggccaacacggcatagtccgttcggtgagtcgtgcctaatcgggcagcgcacaaacgtacctattatttatccctatactatatatagaaaaaaagataaaaattcaccgtctcaaaattccagccacatgagctctatttgaaaaatgggattaggacaaatattagaaacgcccagtagtgttccggttagctctatatgatggtgggctagctagcctagattcgaagcctcacaacttcaattcattttatattgggccattctatagtatattcgcgttttttaaagttattattttcatttttcagattttcaccaaacatgtttgggacctttgggtaggggtggggatggggcgaaattactaaagtaccctcgattttttgacgcctctgtcgtctcgtcagtttgcccctgcccagttgcccaccgcctccggctccggcgatccccatccatccggcgagcgagcagggcgccgtcgttcatcctgctgcttccgccgcatccatcctggtgagcacatcctccgccaccgccgcctgcgccgatccccatccatcgcgcgagcgatcgagcagggtcgccgtcgttcgtcctgctgctgctgctggtggtggtggtagaggaggagttgacggcgaggggatcgagagggagggagggatgcggcagcagcggggcaggggcgtggggcgtggggatcccgggctgctgacgagggcggtggagaaggtgttccgcctcgtccgcctcgccgagttcgagatcctcttcgtcctcttcttcctcatcgccttcgtcctcttcaaggatctcgtaagtgcgcaccccccctcgtctctcttctcgcttacacatttcacctctagtaacaacaggttatgtttagttatagagataggttggttcgtgaccgatttgcatggctttgatcaatttggtacagcatggccttgatgaactgaaaatattagaagatttgggtattttagttgaaggtgaactgaaaatatagaagattgggtattttagtagatgcaaaacactactgttcgatacataattttaaatcttgtttgatgttgccgactactgttcgacacataacttttgttttatgttgctgtatgacaagtagattaatggtgtttttgtcgttggtagatgatttctctataaaaatgtaaagataacctttcatgtgtatcagcgcaggggcggaatcaggcatggggcagctagggcttgggccccatgcctagctccataatccctattataatcttgaaaaatgctatgtaatttatgaaaatatttgagatcccattagctcagccctaggcgtggaaattttctggcaacgccactgtatcagcgtgatattttagttgttgccttgatatgcccgaatagcaaatcatgtccattttgttaaaccttgacatcaagtgtactttggatcatagtcttttaggtcttttttgggctggagttatgtcttctttaactattgaatgaatgaatttacctgcagatgtcacgaccagagtacaactcgatctttgtcaagaagcctgatctagatgggagatggccaggactcatgtaatgtttgtgtagtgtgatcaatgttgttctttttcctcttgcccaaagtacacttttgaggtgcttctttgacttcagttcttatgactactaatgttatctttcaagatgatgaatatagtttttgatgaattgccttctttggttttctgaaagaatcatttgcttaatgctattggcatggtttcttggtatgggtcttgattcttcttgtttgcaagcttaccgctggaattttgttaagtgtcatgctgaagttactgccaacagcccttgtttgcaccatgttgctgtccaattttatgggtgaattgtgatagccatacccatcagtcctgagagaagcttggtgtttgatgttttgataaccttgcttcttttgttaaggccctgtttaaatcccaccccaaaatttttcaccctttcacatcgaatgtttgaagacatgcatggagtattaaatgtggacagaaaaaaaaaccaattacactgtttgcgtgtaaattgcgagacgaatcttttaaggctaattgcgccatgatttgacaatgtgttgctacagtaaacatttgctaatgacggattaattaggcttaataaatttgtctcgcagtttacaggcggattatgtaatttgttttgttattagactatgtttaatacttcaaatgtgtctccgtatatccgatgtgacacgccaaaactttacaccctgaatctaaacaccccctaagtcagtcattttggttctgagactaattttgtcatgaaacctgtcctgttaggcttatagttgttgggtcagctattcaatgttgcctatttcaatctttgcacctcctctcaagttataactgtactgtaagtttatatggttcactgtaaatcttgccttctcgaccacctcttaagaatggtaaatttctatatgtatgtaattcctgtgaaaagaacagaaattttcatcttagtcataggctcatattgtcattgtagtgtggtactggatggttattcaagtcccaatacttgtattggaagtttgatatccatttctatacataattaaatagacatacaagtgaaactgggtcatcttaatattatgcagttccttgactgtcaaattcttcagttttgctcaaaactctgaaatgcattggctaaatgagatggctcatgcagacctgcaccatgtcaggcttcaagttctatacctgaatcaattccgtttatgagggacagctatttataaataaggatggcgaaatggcaactgatcctctagtaaatgaaccattcaaattcgtatgaattcatgtaaaatccctacattggtttcaaacccagctttgccttcatggatatatggacagcagatggattaatttgtttaggtgaagtgggattccatcaccttgcagttgttgtcttcgaaattcgtatggtctttgcgtcaaactgcgtgtatgttaaagaggtcttctaatacagattctagttgacggtgcactatcattgaagaaaacacatgatcaaaccatcgcatgtgcggacgcgttaatgtcgttattacgtgagatccaacctaatggaactggaaagtggcaaatagaaacaaataaattactattagagtaggatgttcggcaaagttgggctcaatccaactcacatgcagcgagtgctcgacttgcgacagctaaagaaaacgagctaagattttagtcactttaatccagtcaactcaatggtgggagtataaaactattcatatcaaaagtataaaagaagttctaaatttttcatattaacgcagaaattcgcaaggttttccctacaaactggagaaattcatttttggtaggaattccaagaatttctcttgtagccatgtttttttttctaattaagatgcagatgattttatctcgatttttgttaacacatttttcaaactactgtttctggtaaaaactttatatttagaagtgactttaaaatatcaaataaatctaacttttaaaatatataatagtaaaatttaataaattatgcgataataagggggtgttcggcacaactccaactcgaatatttttttctagtgccgagcatttctagctccataaattcatagagctggatctataattatatatataacatttgaatcaatcgttttgttttcattttaggtgaaatataaaattttgaatcactataatttaacataggaatttcaaatacagtgtataaacatgtggctgactttcttttttaaaattttaatccatctcaaacactggcgcgtcggcggtcagtggcccgtccactcggcccctcctctttttaactctctctctctctctctccggccgccaccccctcgccgcgccgacgtctcgcctccgccgcctcgttctcgttccgatggctagacgcgtcagcaccacccgcctcctcctcctcctcctcctcgtcgccgccgcggcggcggcggcggcggccggagaccaggtcagcattccaccctcgcctctcctcgcgccccgcgcaccacctcttgtctctcgcactctatctaaaccctgcgtcgtggttcatctcctttctccaggaggacccgcgtggcggcggcgacaacggcaccgcccgcttggatcgccgcaccaaggtgaggagctaggacccgcgcgtgtgcgtctgtttcgatgtccggattctgttcttggagctgtgggggttggtggtaatctcatcgaggcactggcgatccccgtcacagatgttcctgcacgcggcgcgggcgagcgacggcggcgccacggggatggagaaggccgggctgggtctcttcgacgccttcttcgctagcttgtccatgattctggtcagcgaggtagtaggtgacatttcgggatggaaattaattagtcttactactctagctgctctgaatttgcttttttctttttgtatctgtatctgtggagtgatcacttaacttagtgttgcttgtttatgcattgcttggtgaagattggggatgagaccttcatcatcgccgcgctgatggcgatgcgccaccccaaatccaccgtgctctcaggcgctctgtcggcgctggtcgttatgaccgtaggtgaaactgcagcttgcagatgcagcggttgtctgtcaaggcaagattgggctgcagtgtagagtctaactaatccttacttggctctactgttgtagatcttgtccaccgggcttggcagaatcgttccaaatttgatatccaggaagcacactaacagcgcagcaactggtatgactgatctgattgctacattattgcgccgtgataaagcctagtatgaagtgatgtgttagatttttctattgaattatgtatcacgagcctggaagtcggagaaaagtgatcgaatcatcataataaattaagtggtatggttaattgctccaaaagcatctacagacatacaaacattattaagactgtagtactggatttattgtttcaagttttcgtactatactgctgtgcactagatagtcagcattgccatagttatcaagggaccattgtcagaaaatcagatgttacagtttcacagtacatcacatgaaagttcagacatttaggcatgcacccgcattggctactagttgcttcaaaaacagtgtcccttagatatagaaacaaatagaagctgtttgaaatctcatgctacggtaattaaagatatatgcttttctaccgacttaaaaggagtccaagggcctccacattggtatagaaaagttccctaagaaaccaactcctctttggcatcccaactgtttgcatgccatccagttaattttaacaattcaccgtgctcacctaatattttgtatcctctttggtattttgtactcagtcctttatgcgttctttgggctacggctgctgtacattgcttggaggtcagattctaaggcatcacaaaagaaggaaattgaagaagtacgcacattttattacatttactctttgcctctacagatttgcattagcatttttcttttgacagaaaactgcattagcttaatattgttagtttatattttgttgcgttaattttatccttttttgtgcatattcagtatactagaatctctaatttgcagcatctattgttgttgtatccagtgtaactgaatatctcttggagctttctgactttggattactctctgctggaccaatttcagcatttctttgccctgttgtgcttaaaaaatagaactagactgctgaagatatttagttatttgggaagatacatgtttactgtattgaactattggtagtccttttaattactattatttggttgtttatattatgcattataattggctctgacctttgatatcgtccaattgtttggtatgctacttgaaccatcttatatattttgaatcccttgacatacacaggtagaggaaaagctggaagcaggacaagggaaatcaacatttagacgcatcttctcaaggttctgtactcctatttttttggaggtacattccgctcttatcgttataaattttggtgcttcttggcaaaagtgcatttgctgccatctgatttcagatggatactgaattatcaaacactcactttttaccaacaaatggttgataaacacgtgatccaatttgtgtctttttaaatgaattcatccaatgtgtatgaacgacttgaaaatgcagtcgtttgtgttgaccttcctggcggagtggggcgaccgaagtcagattgccacaattgcggtaaggcctacccccttttcagcaattttccaacacttctcttcttgctcaattccccagcacttcttttcttgttcacaaaccgtaaacttgttgcatttcttgccaatgcagttggccactcacaaaaatgcggtaggggtcgctgtgggagcaaccttggggcacaccatctgcacatcgttcgctgtggtgggtggcagcatgctggcatccaagatatctcagggcacagtggccaccattggaggcctcctcttccttggcttctctctgtcatcatatttctacccaccattgtgaattttgtgatgaactgatgacatcctaccaagggggtgtatattccgttgcagccaagcatgctggcttgaaatataaacgcaggcgctacatatgtgcagcagtgtgcaacctttgtattgtttgtttgaaatcacaaatctattctacgtaggtttccgattgaattagtttgcgacaaccggtgtacatttacgatatactctctctccgttttaaaatgtttgacaccgttgactttttaacatatgtttgaccatttgtcttatttaaaaaattttatgaaatatgtaaagctatatgtatacatagaagtatatttaacaatgaatcaaatgatatgaaaagaataaataattacttaaattttttgaataagacgaatggtcaaacacgtactaaaaagtcaatgtcaatagtgtcgttttggaacggagggagtaaattttagagatggggtgggggtgcatcttacctccctcgactataggtcaaattcgattcgtatccgtgaactgtaaagctatgtatagaggctgccacaacaattaaaatcggatcaagttacctatttcatgctggatggttttgatgatattttcctcctacgtggtagtcccgtttcaatagtcgtgaatcgaactcggtgaataagctgagggataaaatatggacttattccaatttcgggccacctacgtggatgggccgggtctgtggcccatccatccaaacaaggcctagtgaagttggaggcctccaaacaaggcgctcacatcgacctgttcggtccggagtcggatacatcaaacaggtcagccaattttggaccgaatccaattataatcggacctttatatttattgagaatcacaaattcacgatccagacgaaagggctcctccgtctccttcatcaggtgtgggccttctgctctcgtttgttggcttttggaggcttaggtgtcgctcatttttattgtcgaatctcgatctggatttgtagaatttttgtgcgaacgtagagtagatcgatgtgttgagatgatcttccgtagttgatagttgacagatgataaaaaaaaatcgtctcctttctcgtttctgaattctgatcgatattgtattatactgatgcttccacaggaattccggcgctggcgatggaaataatattttttaatattattttcatataatatgttataaagaatagtagctatagtagtatggtaattgcctacagagacatacaggaccaccaatataggagaataaatgaggaaacaatagccgtgtaaaagatgaaaaaaatcgatggatcctatctaacctaagcgtccatcaattcttaaaaaaaaggcccaaacaagattgatcttagttacagatgtcagaacattggaccaaagcttcgaaaaaaaccaaacggacatgggagatgatggacgatagaaatgttatgaatctttttaatggaatcggatgttttttctttctaaattcggacagttttttttcacattgcacggtgccaaaccagattttttttttttttacaaacggtggcgtttttctcgcgttgagtcggacagttttttcaaagcggttcttttataaatggcgatgttttttcgcgttgaatcgtacggtttctcaatgggttttttttctcgcattgagtcggacgttttttctaaacggcgtattattctaacagttaattcggagcgtttattctaacagtttcttcggagtgttttttataagggatttttttctcgtgcggtttatattaacgttgacattttaggccgattttaatatatgacaatttgaatgaataaaaaaagtaattcgaaaggggattttttttttcagccaaccttttttttcttgaggtaattttggaaaatcagccggtttttttagtggaatcggatttatttttaacattgcgtggaacttttttttttccactaacctttttttgggagggccgatttatacagactctttttttagaatcggaccgaaaccttttttcttcgcactatttttttccttttttagaaaagcgtatttttttcttttccggtacggtagggatgacataacttttttttctccagtaacgttttttttgaccggtttatacggacgtctttttttaatcggacagaaaaaaaatttcacattttttgtttgctttttttttaacggaagagtggagacggaacttttttttcgcgcgtttttttttacgtttttacagacgatggaaatttcttttattttcaagtagtatatataagagatagagatagagatgtgctaatctttcctattaataattgaataatacaaaagcttcagtttgcctttgtccggcgtggaatcttgctgatgggattcgactattccagtcgttgtcgaagccgcacctgaggcctgcgcccacagcaacctgttcggcttggagtcggatactacactatttattatcacaaattcacgatccagacgagaggggggggggggggggcgtctccttcatcaggtgcgcgccttctgctctcgtctgttggcttttggaggtttaagaggggcttaggtgtcgctccttttcattgtctaatctcgttctggatttgtagaatttctgtgcgaacgtagagtagatcgatgtgttgagatgatcttccgtagttgacagttgattaaaaaaaatcatctcctttctcgtttctgaattctttttcattaagcatggaagaaaataatgtttaaacaaataacaggaattctggcgctggcgatggatccatctgaggaaacaagtgcagggaaagatgatcttctggcgattgatgactctaaccaggataaggctaaacaggctacggttgtatcagatgaaagtaaggcgccaatcatagaaaagaagaagaaaaaaaagatggttcgctatactcaagagcagatcgaatactgcattgctaacccagaggagttgtgggacatcaaagtcattaagctgactgagttgttgagcaaggagtgcctggcccgaatggggcaggagcaagtagacaagttgtacgctatggaacgtactgaggaggagcagattgttagacggaagaagctacaggaagtcctccgcaatgaacgggagaacatctacaaaatccccgataaaccgcaggacgtcctcaagcagtactacgccaaaggctatgccgagtacgaggttgttgttgacgatggagatgtcgatgtcgatgaagacgatgaagttcctgcacgagttgctcaccctggccggagaagattccgcaacgggattgtcgtgaagaagaatcagtcaggaggaggaagtattaggaagataaactgaataatcgtcgttagtatttggcatggatccatcttagttgtaggggaaattatatttttcccctctatttatcagcataataataatagtactagtagtagtaataacgctgtgcgactctgtggtttgacttaattttatattcctgctatggtttgattctaatcgtgctaattgtattatcgttcagcattgatccatcatcttgttcagggaattttaaactaccctagactgaagtcagagaacagagtttgtttcgactggagtagtttttactgctctgtgctctcccagaggcattttcaggagtagttttgttgattgcattttcaggagaaatttggaatcccttgaaagctcctcgcctgaaaaagatgtacaatttggaacctcttgcaaaaactaagctggtctctattgacatgttttctcctacattattcagagtttcatgataaggattacaatggacaaaactttttgacatggtcatatgagaatggcactctgctaccatctgttactccaaatgccaatgcaagttggatcaacacttgaaatgaaaaacgagtcagtcaggcagttgtgcttgagacaatcagacataatttcggtttagcttgcaaagttagtgtagctatcaggtctgtttgatttataatctgtgctcacctctgccatctcttcttgatcgtggcggattgtccccaccttgtcaaacattaatgcttatcaaagtattttaccaatttaaaatccccaattccccaccatttttattcagcacagaattgaaaaaaaaaaagagatttggaggaagagaggccccctctaaacattttttaagaaaaaaatgtgagtgtgttgaaaattgaacacggaatctcgggtgaaactacacagcccttaccacttcactatcaagtgcatctcttcagcacaatataacgggaagctttgtggcatgttctgtaacatacatcacacacatcttttgttactttttgttatgcaaagcaacaggaatgctctttgatcttcagtttgggcagcggttggctgttgtgggagaggatctgcacgacctcggcccgccggcgccgactcctcctgctgcgccgcggacggtggtgatggctggctggatcctctccttctcgtcatccccctcgtccccatccctgcgccaccgccgcttccgtgggctctgggtgcagtgacagaggacaccgcggaaaaggagaagaggcaacggcgacacgcgtcgcggaggaccaagcgggccactccctcctctcccaaatcgccaagaaggagaggagttggcggtggtggggccgaggttgtgcagctccattcttgccagccgccgcgcgccgctgcctcctcgttgcgcctggagtgaggagaggggagagagatgaagagaggtggagctcgttgaggcattcaggccctttgaccgcgacgacaatggcttcatctccgccgccgagctcgcgcgctccatggccgacaccgacaccgacctccgcgcgatgggtctcaccggcgacctcttcctctccgccagcgcgatgttcctgccggccacccttctctcttccgcccgcggctgaccgccagatgctagcgacctttccttctcggttggcgtggtgctcccgctagccacctttttctctgtcgcccatgaccgaccgtcggtgaagtcgtggagaagggagaaggagaaggggaggagatagagaaaagatgggatgaggtggaggaagtgggtccactgacatgtgggtcccactatttttaattttattattttactgacatgtattttatttttaaaaaaaaattgttaaattttgcttcagacgttacgtcagatgaagaccgaatcaaattagccacataggcgccacgtcagctaaaacctccgtccaaaccgccatgaaatctatattgcatcagttttgatagttgagggacctacctattgcatctggttttccggttgaaggacgaaaatcggatttgttgacaagttaagggacctcagatgaacttattcctaatagtgatgtttgcaggtgatggataagttgtcatgggctgacgtgcagggcacatatgtaattgagcctgcgttctagttgggccggaatctggcccatgtcgaatccagctaactcattgttaatccagctagcccatatgtatatacacacattttgtttgaagagatcacatcgccaaatgccagaaaatcaacagttaaattaaccggctataataggctagtaaaacaatagctagttaatctagtagtaattaatcatctaattaacaatgctatcaataatcatcatcataataacagttaattagtagttgaaccaccatcgccagcgtccgatgatcttgccgacgtagttgtgttcatggggcttgtacctgcacacggtggggaacacgccgagcacgtgggcgcactccctgagcaccacgtcgccgacgagcctcttctccctccgccgcgccggcgccgccctggtggcgcgccgcccggtgacgaggaacatcttcccgtcctcgaacaggtagtggcacccgccttcctcgacgcggcaccgcagcgcgtaggcggcgctgctgttgaagacgacgacgtcctggaggaagttgcccatgtacccccacttgcagaggatggcgtacggcacggcggcggcggagttcggcggcggcggcggtggctggaagaaggcgcgctggggcttgtaggggtcgaggatgaagtagtggaagtactcccagttgccggagaaggcggtgcggcagctgaggatcatctggccgccggtcatggtgctcagcatggacaccgagtggttccgccccggcgccgccggcgacgactggtcgcggggctccgccgcgtgcggcgacagcatcccgacgatgatcacgatcgacgggatggcgatgaacacgaacgggatcgagatgatggtcagccgccggagcaggtccttcttcttctcctccatatttattatgtacttttaatttcttgtagaaaatgcttcagttttgctcttcttcttcctcctctctctcctcgaagcctctaatttatcgtgtggttgacgaggtggcgtgtcaaaattaggaagtgaccacacctgaatgcagatgagaaatatgagatattttgaccaaatgtatcaacgatttaaacttgctcgtagctactccctccattccataatataagagacagccacttttcttagatgttctataatataaggttttaaactataacatattttttattaaattactactttttttaaaatccttcactgtcacattctttaactttattggatgcatgcattatatttattaggatgatccaaactacaagataataataactatttcttggtctttgggttaagagtggttgtggcttatattttggaagggaccacctatacatttgtcgacaaattttctcctaaaaaaataacagatgtaattatagtataattgtagtgtaattacattgtaacttgtatgtaactacagcataacttgtatataagtttcacgtaattttgaatcgttaaatctattacaagatttgtttaggtgaggaagaaaaaaatcacagcacacacatatgtataaggatttgttctcacaacctccattttaccgaaataacatattacagagagatttttgaaagttacatacaagttacactttatttacagtgtaattacactacgattgtagtgtaattatatttgtcaaatttttaggagaaaatttgtcgttaaatatatagcaaaatcgttttcgaatggagggaatagtaatttggaatgaaccgattggtcgtttccttgaatatcaggctctcgatcaggacgccgcctctcgacagatcaaatgaagcccatccagaaaatgggcccatcaggcctgataccgacattatcaggttagaataagttcactttacgtccctctattttgttgcttagtccgatttacgtccctgaaccgcaaaccgggtatgacccgtcccccaacccccaacttacgaaaaccggacaagcgagatccctcggcagtatgaagggcggttttggccgacgtggcgcctatgtggctaatttgactcagtcttcatctgacgtggtattgacatggcgctgacatggcaattcgatctagaaaaatattaatccatgtgggacccacatgtcactttaacgcacaaattaataaaatgatgggccccatgtggatcccacatgtcattatcacccttctcttcttcctctcctccctccctcttcacggcgtcacgaggaggtccggtggtggtggccgacgacgcgacaacgacgaaacgggagaaggctgggtgtcggcggcgagagcgttggggggaggggctccgcgtggggggcgccgcccgccccgagaagctactcctcgtcttcgtccgcggcgccggcgcagagcccgcgcgggggctcgaggagttcagggccgtgcacgtgggcggagggatgcagcagcagttcggcgccacgcggtggcgccggagatgtcgccactcgccggcgggaggcagcggcgggcggatctccatggcagaagcggcatcgcccatcaacaaccggctcgccgcgggccgtcagcggcggcgccgccatggctgaattctcgtcagcgaaatgctgcatgaaatctcggcggacaccagaagcaacctggtgtgattttggttagctctgttaattaattaccggctaaataaacacatccttttcacttttttccttaaccatcgttcacgagcacggtgacagccgggccacctcggcctaccaccagcggcctcggcggaggagcgcacctcgcctccgcacgccggctgccgggctcttcgcaccggcgcggactccagcgtcatcggagcagctcactgaatggccgcggagctgcgcgaagggggagcaggcaggcggtgaggtcgtggcggtggtggagggccgctccgccccgctcgtcgcccgctccgccggccgccgcccgccacggaggaagacggagaggagagcaacaatggcgatggggagcagtgggggatagagagaaggagagagaggatagagaggggatagagataaggggtagtgaagatgacaggtgggtccacgtgggccccaccaattatctattattgtgtgtgtgaaactgacatgtgggtcccataggatttattatttttttattgaattgccacgtaatcgctaagtcaatgccacggcagataaagatcgagtcaaattagccacatatgcgctacctcagccaaaaccgggatcccgagggaccttatttaaacggtttcataagttggacgacctgtcgtacccgttttgcgatcaaggacgaaaatcggactggccggcaaataaaggtacccaaagtgaacttattcccatcaggttcgacattatcaggttgggccttggttaattagcacaaatcgaccaagcccaagacggcaaagcaccatcaccttccttccgctctcgctctcctcaaactttcgagctcgtcgcggattctccagcatacagctcgagcgcggggtgggtcgatccgaggcgctcctcgcgtactccggtaggttcgttctcctcccacattttgcttccctcgtcccgctgttcgtcgccgacgcgggggttggttgatcgcgcgcttggtgggtttcttggttcctgaatccgcggcggcgcagttcttggtcctcgccgaccttttttttttttcttgttggagcctctccatatggttctctcctcttcgttcgctttcttgatccattcctagtccgtagggttcctcttgcgattattgacgggttcgagttggcccaaatgttgatttctcttggcgattttttctttcttgttctcctcctcttttcctctctcgattcactttgtacgatttcatcccctagtccgtactggttctttggatttatggatttacgcgagttttttttctcttgtggttgttgcaattccaggtgtgatgaacgaggagaagagggcgagggtgggggatactgccgagaccccgcggaaatcccctcgcctggatcggccagctgcggcggcggcggcggcggcgccgttaaccagcaacggtagtattctgcggtgccaacacgtctttcgctttcttcatcagttcttggttcatcacgttcatcagttatttggggtttatggatttacgcgagattttttgggttcctgcaatttcaggcgtgatgggcgagaagaagaagaagaatgcgacgcgggatgtgagcgattggtgttggtgggggaaagcggcggcattactatccggcggcgaccgccgtactcgacggtgccgccatgtcttgtgtgagcaggctgacattgatgtggccataacactgatcaagacccgcgttgacaccccggtgtgttgtgttaacaagtgtgatgatactgaggggagggaaatctcggtgtgtttggattgccagttgagtttctgcacggcacacgggaagccgcacgtctttatgaacgaccattggattgctctggtgtacaagaggcccaatgtggcgcattgcttcgcgtgtgaagagtgctatttcatcagaaccgacagtctcggggagggaatggcggtcggtgagaatggcttctccatcggtacccataagaaggatgagaagggaatgacgacggtcaacaatgaggcaggtgttcatgcatctatggtgtctgattatgaaagcgccctcatggtggctttactcagtgatgtcggtactccacggtgcaggcatgacatgtataacaaggatgaggttgatttggtccaaagacggatcatgttctgcgatatcaccagaatgtgtagtgattgtgacaacatcagtgtgcttatgatctttgtgtgcttgggatgtgaaaagcctttctgcactgtacactccagtttacatgctgagagcaccaagcatttggttggtctggtgtaccataacccgtatgtggcgtgctgcttcctgtgtagtgaaacctttgtcctcattggtgagggggataagaggatgccagttgacaaagcggcaggtggttatgcatctgagtcagttattgggcatgcccatgctatcaaagggataccgaatcttggaaacacttgctacttgaattcattgatgcagtgcctccttgtgcttggaaaactgcgggcaaggatgttaggaccggacgctccatcagggacccttggtactgcattgcatgacctctttgagcaaacatacagtgtgaataatgcaacaggcctgctggagacgtcattgctcttggattgtgtatgcaatttggacccacagttcgtaggaggttttatgcatgataaccatgaattgctttgctgtttacgtaaaaatttggatgaggaggagaggatgaggacgcctcctaacatgcaagacagttctgctggtgcagtgcctcctacggtttttaattccattttcggtggtcagctatttgttaccagatcgtgcaaatgttgctcgttttgttcagtttcccacgctgtattctatgatctctcagtaccagtaccaccgaagaagcctccagccaaaagtgttgaatcaacaccatggattgaaggtcacagatctcaaccgaagatttgtatcaaccagtttgaagcaatacataagaggaacacagaaaagactcatagaattgttgaagatgccgattctgatcctgcttcagaattgaaagatatggtcatggtgaaaacatcagagccattggaagttggtaagttcatgcgctccgctcatgtactgagtaaaggaatggaaggcaatattaaacagtcctgcaaacgtgcatggtgtatcagaagtcagaacataaaacttttcatgattgaaagcaccaaactatggtagtaccacaaatatttgttactagcttttgttctagagaagacaaatgtcactttgcaaaatggtgctcttgtactagataaatgaagaaacttgttcaaggacttgattatacatggactgcagaaataccagaaccttcaggatgtctacattagacaagcaggatgtttcagcaaatttaacatggcatggctttttgttgcagtgtaacagtaacacttattattcacccggggaagatagctatgggtgttgaatgctcaatgcttcaactcttcatataataaattttgctcgaagttgttggttgacaagtacatgcagagatcttgaagaaaagaaacttcaaataatcaaatgtagaggacaaagattctcaaaccatgtagagaatggaggttgctcctttcatgaaggctgatgaggacaaaactaaaaacctattttcttgattctgcagattatactgaagtggaacagatctcacaaagcaaggactatgtacaagatcctcaaaatgtgttggctgatgtcaaaactgcaggaatggatgcgacaacaacagatacccgcattccagaatatatagggccacatccacctgtctctcaattaagggaagagaatgcacagttagaatcatgcaatgatgtggggaaagatggcaatgctattctcgaagttagttcagaacacaagatagacactttctcagcagaagttactacagaagacaaggggaaaacttgcagtagtgacgttgtttgtggaaaggcacaggatatcgactctcttccatcgattacgagtgcttggaactgcactttaaagcagagatgatagaatggacctgtgagaactgctccaaaggtgctcggaagtcagatgtcactgaaggtacatacagtgaacagatgctgtcaagtactaatgaggacacagcagttggtggataccagagggaacagtcagagaagataacatgccaaagtgagcaatccaacaaaaaacctgaatgccctgaaggtgttcaagacgctgtacctcattgtgtcccagctgagagacaggacaacctgttgagcagtcaggatcaaaatgccaccacactagatgaaggaaggggtaagcaaaagcttcatcatagtgcacaccaagtcgaagaatgccaaaatgagcagaaagataggaataaaggtgctactcaaacacggattagcaagttgccacttgtgttaaccattcatctgatgagatctttgttggggcctgataaggtgatgggacatgtgagctttaaggaaatccttgatatgggactgttcatggaccccaggtactgactactgcattttttttaacaaaattgtaactgttagcatttctatacagcaacttctaatgattctattccagtttaatcattttacttatttgcagtaagctaatagatattatttttcctaatttgttcctttgctttaagaatgcatctcttctacaatgagttgctttcagatgacacaagcattgctggtcaatgaataatctgtatgcccatttttcatgttctcttgctatgagtatgtcgatgattttattgtgcatgacaagatgttgtccagatgcctcgtgtaatattgaccataactaaataagacaagatgtacttattgatggctatgtggctccatctgctagtaattttcacagattatgatgttttgtgacaatttgattgtttcaactttatttaggaaattaggtgtgatttggattttataataatttgaatttgtgtgattttaagaactagatttgattgtagtattgtactctactcttgttttttcctatcctttaaagtcagattatacatccttagactaaatctaggtttgtcgataatatccatcatgctgaccaaagttaattcactgcagcagaacatcatttacttttatttggatacctacctccttttgttttgaaaaatcacaatctccttaagaaaccatccattacgatttctcgataacaatattcatttacaatgatatttaacctagaaagatgtgctgttgtttacatcgagctatatgagttaaagccacatctgctttatttttatttttttagctctgaagacaaagataattccatttatcgtctagctggtgttattgagcaccatggccgcggcaaagattcagggcactttgttgcttatgtgagaccaagtcctcggcagcagaccaatggttcttcctcatggttttgtgcaagtgataccgacatcagagaagtctctttagaagaagttctcaagtgcgaggcttaccttcttttctacgagaggatggaaggctgagatgtctggaatctatatccacaagctgctaatcagaatagcaatcaaaaggattctttggatgtccaaatatccaatttttgatttgttcgtactcacgttggatcaaaatcaagaagagttttgtttctttcagttgttcttaaatagctggtctgatttgtgcatatccaattctctcctctctttttttttggataagtgaggaatgcagtagggtttcatttggaaaaatatcagcatagtaggacatataggccttggtacagttttgtaggacggtactgttatttacgattgctttgcagtactggggaaattttggaacacattggagtatttgatttgatacgttgtgcttttcctcaatgtttttgttatggcaagctacattgtatgcaagatgattcaaatacaccttgaacttgaagtatcagtaacaggagcagcgttaccaaacccgtttagagtggggttaccgctgctctacggtttgacggttaccgcgaaatataccatggttttaaaaattgaaaatgttatcacacatgataaccgcacggttttataaaccctgaacatgatggcattaattttgccttcttttttcctttcttcattactccaaaaaaaaaatagcctgtttgttgtcggccttgtgggcttatggataaacccatacctagattgggcccataactccatgagtcagaacgatattggcccattagcccacgattaaaataagcaggctttttactcacgaggtcacgcatcccggctgattaacagaaagaaataagtccacttgccatcctcaacttacgtcgggtttaattgacatcctttatcctcaatacgagaaatattttcccctaaactatacataactgtacaacttgagtcctatagcagtagcaatacgcgcgtggcctggcatccctgctcatcggggcaggagccagccgcgtcggcagccaccatgagttaagaccgtagctagacggtgagaatggccattgctttcatttgaggagtggtgtggatatgggcatgataaatggcatcgtcacggagatgcctctcctcctccatggtggtcgccctccaggacggagcagggctcacggggccacctccgccttagagtttatgtccatcttcttcggcaccgtaaggagcggcgtgccatagtggaggaagctcgctggcccccttgtctccctcctcttctcgaaaaagctcgttggccacctccacctcactcgcatgaaggctaagtgagctcaagctcggacgagcttgccgaccacctccccctccctatcctgcctccgcctttctcgcacgcaggccgcttgagctcaagcttggataggttcgctcgctgccttcctcaccgccaccccataaacgcgcatgcgtggtttggggaaaaaaaaagagggtgaagaaagaagttgtggctgacatgtgagtccaatgtttttttttacttcttttgctgattaggatgccagtgctcattctacctaaattagacggttttgcgaaaatgaagggtggtgattggtgaagattcctagtatttatagggatttcaattaaacttgatgtaaagaagagggatgacaagtggacttatttctaacagaaatcgtccaagcccaccatcctcatcaccaccaccaccaccgccgccgcccttccgctctcgcctctcgcttcctcctccctccaactccaacttctcctcgcctcatcgcgacctctccatctcgctctctgctcgattccgagcggctcctcgcgtgctctggggtgagtcttcgcccccgcatttcctcccctggtcctgctgctcgtcgccgagtggtggttggttggttgatcgcgcatgttgggttttcttggctcccgaatccgcggcggcgctgttcttggtgctctccgggatgtccggtttcgccctgtattgttggcggggttctctctgcatctcttcttcgttcgatttcttggtccattccttgtccgtagtgttcttcccgaagttcttgattgatgcgagcttgatggcccaaatgctgtttttttttcttttgtttctcctcatttgctttcttggtttcatgagtccatcccctaatccgtactggttctttggatttatggatttaagcgaagtttttttgtcctgtggttcttgcaattgcaggcctgatggacgagaaagcgagggccggcaaatccccacgcctgaagcggcgctcttctggaagcgatccgttggaggaagcggcggggttaaccagcgacagtagtagtattcggcggtgccggcacgtctcgtgtgaccaggctaccattgatctgggcatagcactgatcaaggcctccattgatggcccagcgtgtgattctttcaagtgtggcaccactgaggagaggggaatcttggtttgcttggattgcggttcgagtctctgcgctctacacgcgagatggcacgcccggatgaaccggcattgggttgctttgatgcacaagagacccaatgtggcgtattgcttctcatgcgaagacgcctatttcatcagccgtgtgaggtttggggggacggccgatgaggatttcttcccaatcagtacccctaagaaggatgagaagggaaataaggttgacaatgaggcaggttgtcatgcatctgcggcgacaggggctggttctggaggcggcacaatggcggtgttaaccagcaatgtcagtccccagcggtgctgtcatgtgtataagaagggtgatgttgctcgggtcataaaaaggatcatgttaagcgatatcgccgcggcgtgtagtgattccatgtgtgataccactgggaggagcctgatcttggtgtgcttgggatgtgaaaacccgttctgcagtggacatgccgatgtgcatgccaagagcaccaagcactggaattatttgatttaccaaagcccatatatagtgtgctgctttgtgtgtaaaggcatcgttttcctcggtggtcaggataaggaggagatgccagttgacaatgcaacagctggtgatgcatctgggtcagttattgagcatgcccatgctatcagagggataacaaatcttggaaacacttgttacttgaattcattggtacagtgcctccttgcacttggaaggctgcgggcaaggatgttaagacctgaagatacaacggggaggcttggtacagtactgagatatctctttcaggatacggacagtgtgaataactcaggaggcctgctgaatccaagtggcctcttgcgtagagtacggatgtttgtcccagagtctcaagtcacttctatgcatgacagccatgaagcgctttgccgtttgcgcactaatttggatgaagaggaaaggttgatgaagtatggtgctctcagtgtagaggctcctaccgtcattgattccatttttggcggtcagctgtctgttaccaagacatgcaaatgctgctcacttagttcagtttcacatggtatagtattccatgatctctcaatgccaataacaccgaagaaacctctagccaaacgtgttgaaccactatggatcactaaaggtcgcagatctcaacggaagaggaacacagaaaagactcatacaattgctgaagacggtgattctcagaatgtcatggtgaaaacatcagaacctttgggagttggtaagttatgtgttcatgtacctaaataaaggaacagaagggaatgttgaacaggcctgcaaaaacgtgcatggtgtctcagaagtcagaacgtaaaactatgaccgaacacaccaaactgtgatagtaccactattatttttgattttttgctccagacaagaaaaagggcattttgtagaatggcactgttttactagataaatgaagaaacatgttcaaggacttgattatacatggactgcagaaataccagaactttcaggacgtctacattagacaagcaggatgtttcagcaaatttagcatggcaatgtttttcgttacagtgtagcagttattggcactgggaagatagctaagggagttgagtcctccttgtataataaatattgctccaatttgttggttaacttaagtacgtgcggagatcgttgaaaaaaaaagaagcttcaaataatcaaaaggaagtttgctggtttcatgaagcagctgatgaggacaaaactaaaattttatttgcttcattctacagattctactaaagtggaacagatctcacaaagcaaggatgctgtacaaggccctttgcagattcagaaggataaggtccaaggaaaggctgttgatttccttcctcaaaacgtgttgtcggatgccaaagttgagggaatggatgcaacacgagcagattcccacattccagaatatcttgctccagctccaaccttttctccactaagggaagatgatgcacaggtagcattaggtattgatgtggagaaaaatggcagtgctgttcggccagaagttagtactgaggccaaggtgaccacttcctcagcaaaagttactgcaaaagacaaggggaaaactcggagtagcaatattatttgtaacaaggcacaggatataaactctcttgcgtcgattgaggagtgcttggaactgcattttgaagcagagacggtagaactgacctgtgagaactgctccaagtttgctcagaagctgaataaaagtgtaattcaaacacgtcttagcctgctgccacctgtactagtcattcatctgaaaagatcattgttgcagtctgataaggtgaaaggacatgtgagctttaaggaaatccttgatgtgggactgttcatggaccccaggtactgattactgcatttatttcttttttcgacaaaaaatgtaaccgttctaatgattctctgccagtttaaataagtttctaatttgtagtaagctaataaatattatttttcctaatttgttcgttttgctttaagaatacatctctcctgcaataggttgcttttgggtgacatatttttcatgctttctttctatgagtatgtggaattgtggattatttgtactgtgcatttcagtgtgtcatctagatgcctcgtgtaacattaaccataactaaataagacatggattgcttgttgacggttttgtggccccccttgctagtaattttcaacagtacgctgttttcctgcgaaatgaaaacaaggtgacaatgtaaatgtttcaactgtatttggggaattatgtgcgatttggattttagagtaatttgaatttatgttattttaaggacccaattttgattgctctctactctcttgttctttcctatcctttagagtcaggttatacatcctcagagtaactctaggcttgttgataatatccatcatgttggccaaagtaaattcactgtagcagagtatcgttcactgttctttagatccttgtcttttaaaataacagcctacataaaaaaaccatccacaatggtttctcgctaacactatattcatttacaaagatattttagccaagaaagacgtgctgttgtttacattagaaaagtcttacgcctggtctgattttcccccctctaattttcagctcagtggacaaagataattcaatttatcgtctagctagtgttattgagcaccatggccacggcaaagattcagggcactttgttgcttatgtgagacaaagtcgtccgcagcagaccaatggctcttcctcatggttttgggcaagtgacaccgacatcagagaagtccctttagaagaagttctcaagtgcgaggcttaccttcttttctatgagaggatggaaggctgagatgtgtggaattctatatctaccagctgctaattagaatagcaatcacacaggattctttggatggccaagaatccagttcaaatttgtacatactgactgttggcttgcgatcaagatgatttctgttgctttggctgagtcattgcaggacttcaatttggccgcaacatatacgttccagatttcggttgttctttgactagctgatctagttacaggcattcttatctacctttttgtccgagaagaatgcattaggcctttggtacagttttgtcggattgtactgttgttagcaatttctgtacagtactatggaaaatttgtaacatatcatttgatttgttgagctacactgtatgcatggtgattcagatactcgttgaagtagcaataacaagagcattctttctttcttccattgctttctggaatctggatgaacatgacataacatgccaacatgggagggtgagaacatgctgttccaatggtcaccgttgattctgagatatcgtgcgttctgtttagcatcaccgttctcccaaaggaataatgaggggagggattatttttcttttcatttttaattacatggaggcatgtggaaagtgcaaacacaccaccacagacgcataccacaccacacactttatttttcttcagatcaaaaaatcagactagatatgaaaaacatataaaaaaaaagaacaagttttacagaatgagacaacactcggcgtgagtttgtttcttcgtattcctgacctccacttactccttttccatgcacacgcttcctaaactgctaaacggtatgttttttgcaaaaaaaattctgtaaaaaaattatttaaaaaaatcatactaatctatttctaaagtatttttaataataataatttttaaaaatatttttaataatattaattaattaatcatagaaggtttccaatcctagcaattaaacacagcctcaatatcgttacggcagtagagcaagacgaaagcccatctcatcgttgggcccggcccatcatgccgcgaggccaggacgacctcggcccattaggcccacgatcgatgaataaaacgcagggctcacgcggtcacgaatcccggaggtgattaacacaaaccggccaaaaagcccaacgcgccgcacgccaccgccaccctcttcttcctcctctcgctccctccctcctccgtctccgccttctcctccaagcttcctcctcggcctcgccgcgcgcgagccctcgtcgccggattccccagctcgagcgcgcgctgggttcgagattccgagcacgcgcgcggtgctccggtgagttctcgcacccgcatttcctccccccctctctctgtgatgctttgctgctcgtcgccgacgcggggggtttgatttgatcgcgcgcttttgggtgggggtttattggttcgcgaatccgcggcggggcgcgggtggttgctggtcgtcctcgccggaatggttcgattattggtggagttctctctcggtttctccgattatttcggtttctagtccctagaatctcctcgcgttgttcttcccttgcttaattaatggcccaaatgctgctcgccccttgctctcctatggtggagttctctcggaatttttttcccgatttctttcggttttttcttggtttggttgctcctcgcgctgttattggttgctcctcgcggtctccttttttggtgaactcatgcggcgtgctttgaggtttatggatttttccctaattcgttctggttttcttcggggtttattgattcacgcgagattttttggcttgtggttgttgcaattgcagacgtgatggacgacgagaagaggccgagggtgggggatactgccgagagcccgcggaaatccccgcgcctggtgcaccgaattccgacgacgacagatcaggccgaatctggagtcggtctcaagtccttgcttgggttgatcaaaaacaatccgagcaaggagctcgatgacccaaatgctgcctctctcggtgaacttctatgatcttgttctcctcctcctcctattttcgctttcttcagttcttggttcatgttctcatccctagtccttaccgataatttggggtttctggattcacgcgagtttttttggcttttgattcttgcaatttcaggcgtgatagacgtggagaagaaggcagcaaggccaggggatactgcggcaacggcgctggatgtgaacgattggtgggagaaagtcgtggcgttacaatggatggcatcggtcggcggcgactgccgtgctcggcggtgccggcacgtcttgtatggggaggatgacattaatttggccatagcactgatcaagacctgcgatgacaccccaatgtgtaatgctgacaattgtggcaatactgaggggagggaaatctcggcgtgcttggattgcgaatcgcgtttctgcactacacacgggaaatggcacgcctcggtcaacaagcattgggttgctttggtgtacaaaaagccacatgtggcgtattgcttcgcgtgtgaagagtgctatttcatcagaactgagcattttggggtggtaatggacaacgaggatgactatttcatcagtttacgtgaggaggatgagaagggaatgagagttgacaatgtggcaggtgatcatgcatctgggtcagttattgggcatgcctgtcctattaaagggataccgaatcttggaaatacatgctacttgaattcattgctgcagtgcctccttgtgcttggaagactgcgggcagggatattaggactagatgctccattggggctccttggtagctcactgcgatctctctttgatgatgcagacagtgtaaataatgcaggaggcctgctggacccagagaagctcttggcttgtgtacgcatgctgaacccagagtttaaaggcaatggtatgcatgatagccaggaagcactttgcattttgcgcactggtttggacaaggaggagagggcaatgaagctgtctaacatgcaagccggtgctcccagtgcagtggctcctacagttattgattccatttttggcggtcagctgtctgttaccagttcatgcaaacattgctcagttagatcactttcccatgatgtattccatgatctctcagtgccactaccacaggagtctccagccaaaagtgatgaattatcaccatggactaaaggtcgcagatctccacggaagattcgtatcaacctgctttcagcaatagacaaacacaaaagtgacaatgaaaagactcagagtcctgcttcagaattggaagatgtgttcttggtgaaaagatcaaagcctttaaaagttggtaagcttatatgcttgtgtgcttaattaaaggaagggaaaacaatgctgaacaatcctacaaatgtgcatgctgtctcagaagtcagaacatagaacttttcatgaatgagcacagcaacctttgatagtaccagtattgtttgttagtttttgctcaagataagaaaaaagggcattttctggaacggcgctatcgtactagctacatgaagaaaaatgtttaaagacttgattcatacatggactgcacaacaggatgtttacattagcaggatgtttcggcagttttaacatggcatagatttttgttacaagtgtggcaataattatcaccaaggggagatagctcggggttttgagtccttgttttcgtataataattttttttctccaaattgttggttaacttaagtacatgtggagatctttgaagaaaagaagcttcaaataatcaaatgtagaggataaaggttctcaaaccatgtagagaatgaagattgctggtttcaggaagtagctgttgaggacaaaactaaaaacttatatgcttgattctgcagattctaccaaagtggaacagatatctcatagcatggatgcaggtggtcctttgcagactagaaaggataaggtccaaggaaaggttgttgatgtccttccccgcattccagaagatcctgcttcaccatcatttgtttctccactaagcgaagagaaaaatgacagtgctgttcaaccagaggttagtacagaagccaagatgaccgcttcctcagcaaaagttactacaaaagacaaggggaaaactcagattagcgatgttgtttatgacaaggcacatgatatcaactctcttgcatcgattgagaaatgcttggaattgtatcttgaaacagagatagaatggacctgtgagaactgctccaaagttcttaagaagccaggcatcatgtcaagtactaaggaggacacaacagctggagaccagagtgaacagttagagaagagtgcacaccaagtggaagaaaaccaaaatgagcagaaagataagaatgaatgtcccattcaaacacgtcttattcgcaagttgccacctgtattgaccattcatctgatgagatatttggaggatttaacgaaggtgataggacatgtgagctttaaggaaatccttgatgtggggcagttcatggatcccaggtagtgacaagtgacaactgcatctgtttttttccgaaaacatatgactgatgatgtttattagatttctgtttgttctatgcccgtgtaattaagtttcttatttgtagtaagctgataaatgttatttttctcaatttgttcccatttgttttacacttctcccctaaaagaatgctttcagatgacactagcattgcaggtcaaagtaatttagtccatttctcatgttttcttgctatgagtatgtggattattgtatggtgtgtcaagttgtaatctagattctagatgtctcctgtaaaattaaccatagttaaataagaaatggtgtgcttcttgatggctgtctagctccctttgcaagtaaatttcaattgttacgctgatattatgaaatgattacaacgaaacaaggtgacaacgtgaatgattctgctacatttggggaatttaattgtgatttgggtaatcaaataatttgaattttgggtgattttaacatcccgatctgattgtactctcttgctcttgcctaccctttacagtcagatcagatcatacatccttagattaactctaggctagaagcttttagctctttttctttaggggtgtgccttcaaatggctaacctggaaacctttttattttgttagaagtccgggctgttcgatatagttctgttcttgtttcagtattttagtgtatgatggatataaacaaacctaacattttccattggattgttgaaattatgactgtttatttgttgattttcataacatcatggttatttgcttaagatgatttagaccagtctttttaactgacagatatctcgctaacaatattcagttacaaggacaggcgttctgttatttacatcgagctataatgagttaaaagccttagatctgctctgatcatctttattttctctaatcttcagctctgaggacagagataattcccgctatcgtctagttggttttgttgagcacctgggccctagcatgtatgcagggcattatgttgcttatgtgagaccaagtcctccgcagcagaccaatggctcttcctcatggtttcgtgcaagtgataccgatatcacagaagtctctttagaagaagttctcaagcgcgaggcttaccttcttttctatgagaggattgaaggctaaggtgtctggaatcctgtatccaccagctgctaatcagaatagcaatcacaaaggaagcagatgttttcagattatcaagcattatttgggcacgaaggattcaattttaatcagtgtacatactgtactgacgtaggctcgtgatcaagttgaatttcgttgcttttgtctgagtcattgcatgagcgcaacacgtacataccagttgagagatttgggttgttcttgaacaactgattatttccacttctcttttgtccatgaggacgatattaggaattcatttgaaaagaaaacatcaaagttggacattttgcattagaggattgagcaagatgaatatataggcactggtacaattttgtcggatgttactgttacttgtagttactttacagtactgtaaaatcaggaacacattttcttttataccttgagctttgcctcaataatttttgtgatggcaagatacattgtatgcaagatgattcagatacaatcatatatcttgagaagtagtagagataacaagagcaattctttggacctatcttttctgaacggatacaatgttttttttttgaaaggaaagaatggatacaatgtgacatgcaattagagtatgagaccctactgctccgctgatgtcttgatgatgagatggacatttgctttgtttgcatcactgctgttcttctgaagcaatcaagaggaggatttgtttttaactaactctcttggaggtgtcaatttatagcgttggtgttgcccaagtgttgtgcaatcgagttggcctgacatcacgaatgaaaaaactgaacctcatttggaaaagaaaagcataaaaaggagaacatggaattctggaaagagggttcttttaagtaaatttaagataacttaaagttgcataatccaaccttagtataacttgtggcatgcaaccctgaatttctgatattatagtcccaggattccagaaaatccacacccatataatccagataatatatttaattaaattttcatgccataaggtgtctacagaattttaaattatttgttttttaaaattcagatgattgggttaactctctattactttgaaatattatttcacatatcataaactctgcggttatatgccatgagtatatacatgctttctattaaaaagatactaaatgctatttctagcatagtagtttttccaaaaatgaagctatttatctacccacctgtcatcatctttaccaatcacacacattatccactaattttctcatctactttctctacttaactaatcacaactttccttcattattttcacctacttttttaatatccgtggtcaaaccattttaggacgaaggtagtatacgtgacatttcgaaatttactttcattttttacaggaggaaatatatactttccatgggctccgttgaactcacgacggccacctaggcccatttagcccaatatacacccacccgagcgccgccgtccccgaccagcgacgccgccttcgccgctctccccccctcctctcctcctccaacttctcgccgtcgtcgtcgccgtcgccgtcgcggacgcctcaccccgcggcgctagtcgactccgggtcctcctcgcttcttccggtaagtttcctcccacatttccacacaccccctaaaccccgctgttcgtcgccgatgggcggtttgatcggtgggtgttggtgtttttttttctattttttttggtgtgcggattcgccgcggcgctgttcatgttcgatttccgatcctgttggtggattctcactttttttttggctatgttgattgatctcgctaatctgtagggtttgaattggggtttaagacgcgatggaagaggggaagagggcaagggcggcggatactgccgggagcccgtggaaatccccgcgcctggagccgccggctgcgtcggcgtcggcggcggcggacgattctgagtggttccaggcgatgttgctggaggccagcggcaccggcgttgagcggtgcgagcacttcatgtctgaccaggatcacgtcgattacatcgtgtcggggctcaggttctccgaggacgtcccggtgtgcggtgattacacctgcgacgtcaccgcggcgaacgatatcatggtgtgcttggaatgcgagttgcgcctctgcgccaaccacgcctgtatccacgccatgcacgaagaagagcattcgattgctttgtactatgagagattgaatcgggtgtactgcttcaagtgtgaagaagcctatgacatcggtgttaaggatgatgatggggggatgactgacaacaatggggtgccgcgcgaagagagcccagcgaaatcagcgttaaggatgatgatgggggaaagcctacgacagaggtcacatgtgtctgggttagctgatgggcatgcccatgctatcaaagggatactgaatcttggaaacacctgctacttgaattcattggtgcagtgcctccttgtgcttggaaagctgcgggcaaggatgttaggaccggacactccactggggacccttggtacaatactgtacgatctttttgatcagacatacggtgtgaacaatacaggaggcctgctggacatgacttggctcttggcttatgtacgcaagtcggactcacggttcataggagcttttatgcaagataaccatgaattgctttgctgtttgcgaaaaaaattggatgaggaggacagggggacaaatcctcctaacatgcaagatgatgcagtgactcctacagttactgattccatttttggtggtcagctgtcttctcacatatcgtgtaaatgttgctcatttagttcagtttcacatgttgcattccatgatctctcggtgccccttccaccaactcaatccaaaagtattgcatctccaccgaggactaaaggatataaatctcaacagaagatccatgctgaactagaagttgacaagcgtaacccagaaaagattcatactattgctgaagacagtgattctcaaagtccttcagaattggaagatgtggtattggtgaaaacttctgagcctttgaaagttggtaagtttatgtgctcctgtgcctaatgaaaggaaaggaaaacaatgttcaacattcctgcaacattttttttaacagtgcctgcaacatgttgggtgtctcagaacatggaatttttcttgagtgaatgcagaaaactctgatattaccacaattatttgttagtttttgctcaatataagaaaaagggcatttttcggaaagagttaatggcttgactgttaaatatactacagaaatattagaacctgcaggatgtttctgcaattatagcatgtcatagctgtatgttacagtgcagtagttattcttgccactggaagatagctctaggtttttgagttctccttgtcttcatataataaattttgctccaaattgttggttaacttaaagtacacagaaatccttgaagaaaagaagtttcaaataatcaaatatagaggataaagactgtatttcagaccatgtagagaatgatggttgctgatttcatgaagatactgatgaggacaaaaaaaattatatgcttgattctgcagattctactaaagttgaacagatctttcatagcaaggatgctgtatgtcgccctttgcagactcagaaggataaggtccaaggggagactgttgatttccttcctcaaaacatgttacctgatgtcaaagttgaggaaatggatttgacaaaaacagatgcccatgttccagaagatatagggccttcactaaggaaagagaatgcatggatagaatcaggaagtgatgtagggaaaaatgtcagtgctgttcttgatgatgtgttcagtgagccagaagttagttcagaagccaagactgacactttctcagtagaagttaggaaaagtcggagtagtgacatttcttgcgataacgcgcagggtatcaactctcttgcatcaatagacaagtatttggaattgcattttgaagcagagatggtagaatggacttgtgagagttgctccaaggttgctcagaagccaggcatcaatctaggtaaatacagtaatcctatgatgtcaagtaccaatgaggacataacagttgatggagaccagagtgaactgtcagagaagataacatgccgaagcgagcaatccaacggaagacctgaatgccatgaaggtgttcaagaagctgaacctagttgcattccagctgagaaacaggccaacctgttgagcggccaggatcaaaatgccagcatactaagtgaggaaaggggggagcaagtaaagcttcatcatggtgcacaccaagtggaagaaaaccaaaatgagcagaaagattggaataaaggtggaattaaaaaacattttattagcaagctgccacctgtattagtcattcatctgatgagatctttgttgggacctcataaggtgataggacatgtgagatttaaggagatccttgatatgggtctgtttatggaccccaggtaccgtcgtaccgatacctcatctctgtttttttttttttgaaaatatattggcattggcgttcaacgacttctaattgtgttaagccaatttaaatatctatcttattggcagtaagccaattaatattttttttattaatttgttcctactttaagaatacacctctagcacaaaatgatgcttttagatgacaccagcatttcatatcaatgagtaatttatgtttccttgttctgctgttatgagcatgtggattgttgtactgtgtgtgcaatgctttttatttgtccaattcaacctgtaaagctctaaattgagcaatctcctgttccacgcaaaaaatgaattgacaccagagtaccagactgctgtattttcctggtataaccagttcgttttgtgtagcataaaggttgtttaggacatgggatagcactgctcttgtttcttgctgacagaccaacatggattaatgataaaaccaatgttttaattgtcatgggagcatttggtatggaatagctcattaagtaggcaatgagacaatttggactatgacaaattggcagtaaagtgaatagacattcttaagctgcagcagatcaatgaaccccctcccacatgggatttactgaacattattaacccatttaggatttttccctaggtgcacctgtgaatggctgtctggcacccttgctagtaaaattttgaatggctgtctggcacccttgctagtaaaatttcaatggttatgctcttattatgtgaaatgtgaaaaaagaaaacaaggtgataatgtgaatgattcaactgtagtggggagtcaagtgcgatttgattttaacagcatggtttgactgtactctgctttcttgctcatcctacctttagagtttagagtcatctattgtacaccctctctaactctaggtgtgtttatatgatatcacactcattttcctacctaaatcaacccactgtaacagagtatcattgactacactggattttttcaatcacaatctaattaaaatccaatttataatatctaggaacttctattctttccttttcttttgtcggtgtgtgccctcaaataactaaccaggcagcacttttatttgttaaaaaactgaattgtttgacatactttttgtttcagtatttttagtgtatggtggactcgtaaacctaatacctgtttaaattatcacagtgtgtcttatttgttgattatttttgtaacattacatggttattcacttaagatgatctatactagtagtattttgtataatagaataattattaacaatattcaatacaaggatattaacacaagaaagatgtttgctgtttacatgtagctataatgagttaaaatctgcttttcatcgttttttattttttctaatctttcagttcagaagacaaagataatctcagctatcgtctagttggtgttgttgagcaccgcggccttggcaacgatgcagggcacttccttgcttatgtgagagcaagtcctcggcaggagaccagtggctcctcctcatggtttcgtgcaagtgatgacagcatcagagaagtctctttagaagaagttctcaagtgcgaggcttatcttcttttctatgagaggatggaaaactgagatgtccagaattcaactaatcagaatagcaatcacaaaggaagcaggtgtgccagattgtcaagcgttctttggacgaccaagaatccaattctaatcaggttaatttggctgagtcatttcagggcttcaatttgatcgcgacatgggcatgctaagggatttcagttgttcttgaccatctgatctgcttacatgcatgcatatccatcctttttatgttatgaatgcgttaggattccatttgaaaacagaaattagtatagttggacatatagcgttagagaattgaacaaggttactatataggcacaggtaacagttacacccctggtacagtttttgtggatgttgctgttatttgcaattactttacagtactatagagaaatggaacatttactttgaaatttgcctcaatatttttgtgatggcaagatacatcatatgcaagatgatacaaacttgaaccttgaaatagcaataacaagtgcactttttttttctttcttcccttgttttctagatggacattatgtaacacctaatgatctccaattctccattgatgatgagagacatgtgctgtgttagcaaaaaatattttctccctaacaggccccatatgggtagaggaaagaacaaaaaaaaaagggggtccattttatatgttccattcatatttctcaatcgaaaatcagatatcaattgtcgttaaactgttaaaactagtataagtctaaaccagtgtaagtcaagttgcaaaatcacgatgtggcccgatttaattctgcctgggatgctagagatagagtagaggaaacggatcatgatgctaggggaaggggagacaaggagctcgagctaacgtggctgcttaagccaatcgctattcatctgcgtccaccaagggtagaggaggaggaagagatgttaatgacatattggtcccactattttctttctaattgtattcatccaatagacgtcacgtaggagatgacaaccggttcaatacaccatgtgggtgtcacgttaatcatcaaaaagcaccatccgaaactatctatggattttaagggtgtgtttggttgtaggcaagttatggtagtcacaaaagtgtggtgaataaattgctagccacagagtatggtaaaattggtaagaaaattaagtctatgacatatatgacatgctgttgaaaaagtgtggcgagtcacaactgtgacagtgaactaaacacatatctaacaaactgtggcaataaaaaatgtagtgtggcaaaatgtggccatgaacctaacacccctgcatcagctttaatttgctgtggttgaattatcggtggggagaaggcccagttaatgctacttgtcgtctcctttaatttgctatagtccagtaggacatcctaggtactcactactcagtccttcactcctttgtcgtcgattcgttcgtggtgctcttaaatatcttcgaaatatagggcctgttcactttggtgtcattttcaaccttactaaattttagtaaagttgccaaaaaagtggctacatttagtttgctgctaaattttggtaactatataagaaatcttgccaaaattttggcaagttaccatgccaaaatgccaaaatttgataaggtttttttttggcagcaaagtgaacatgcccatatatatcacgggttaaggagatggacggtttggatttcgctatcttttgcaaatcatgcaatagtttgtttttgttttttgttttttgtttttttttcggggataattgtgccatagttagtggcctctctgcctcactcgacatgaacaagaacagcagcagcaggaggagacgagggcaataacagcagcagcattttctgattcttctcaattggagagagtgctcagtgctctcctataaatcctactagcactagcacacccaaagcgaccaacgagtgatccgatccgatggacagtcgccgtcccttgcttattccgaatgagggtgacgagccgccgccgcagccgccggagccgccgctcgccggcgtgtccgacttccgagggcggccggtctaccgcgccacctcaggcggctggcgctccgcactgttcgtcgccagtgagcgtgtactgcgtataccgatgtttgttcggtttggttaattttgttccttaatttgcaaagtttgattagatttcatgagagattaattgattaatgaattgttgcagtgttggagatgggctgcagcttctcctactacggcgtgtcggcgaacctgatcagctacctgacggggccgctggggcaatcgaacgcgtcggcggcgaacgcgtggtcggggacggcgcgcatgctccctctcctcggcgccgtcctcgccgactccttctcggccgctacccattcatcctcctcgcctgcaccctctacgtcatggtaatattttatttattatttactatatattcctccatccatttgttattatttattgttaagattgtaaataaaactggtcactcttgttttttccaactcccacccaaagtcaatttgctgcaaaggctgacccaccaaatccatccgtgcacgcaaataaacaaaggctagatcagccagctcgatacctgttgtactctctgtcttaaaaaaaatataaattctagctatgattctgaatatttaatttttttagacggagggtgtagtttaaagcagaaagatgaacttgaataacttgagggttgaaggcaacggcgatgagccgatgagtagtgacaatcaactacggtcatgctctttccttcttattgaataatgcattataagaagtgaaattattattaaggataaaattgaaaaggttttgaataagacaactaacactccgtaatgataagtattttggaacaaaatttaaattctaaaaagaagtaatttaggataaaggtagtactattctaaagagaagtaatttaggataaaggtagtactatgggtacacgttggctgattggctccataatgataagtatttatcaaaaaagggtttgggtgattggcctttgtaacaaatcagcttttgagggtaaattcaaaacagaagtgataatttggtggtttattcaattttgtcaatgttaatttagtacttaccactcctcgatgaataataatggagtagcaccccgtatatgccagcatgtctgccatgaaattcgtgttacttctactaatactcctctgaccacttgttatattgcccattaacgtacgaacacaattagtaattgatagtacagtactagtaatcatcatcaggacaaaaatataatggaaaagatagaaatgtgcatatcgatctgcatctgcaagcaacaaagacgtggatgacgcgtattaattagtacaagcactgtcaaaagaagaaaactctctgctcacacatttggtccatccaattaattaagccctgtttgattcagcttataattattataatctagattattatgagtaagctaaaacaaacagatagcttattataatagattattataatatataagccagattactataatttggtaagccactctaaagatgcttattttagattattggatgactaacaactaacaaacagataataatccagagaaacaaacaactagcagcttattctatatcggcttattataatccagcttataataatctagttctataatctagattataataattttaagctgaaacaaacatggactaagtacttatatatctgaccctttcgcaactgagcgatcaaatcaaacactgtcaccatctccctgctccaccttatcttaatcctatcttaaaaatgttactcccactggtagagtattaatcttactcactaatatgcgtgcattcttaaaataaacaacaaatgtgatttaattgaaatgaacgtgcgtacgtccgttcgagagtgatcagtacccttctccgaaaaattcaaatacaaattttaaaaataaattaatttgatatttcaagcaactttatataaattttttttacaaagaatacaccattttaacaatttaaaaaatgctaagaaaaatctatatcttaagtagaattaaatggacaaaggttttgagaagaggagttattaggtagggaaacttgaacggcggaagattattattggttgaaaaaatgatatatatatatatatatatatatatataaactacgtacaaaggagttatattttatgataaattttaaaggtaaaaacttattactacaaatattttagaacggataaatacaaaattgattggatttcacgcgcatgggcgcatgattgcaggggcttggcatgctgactgtggcgtcctcgctgccggcgtgcgccgccaccgtcgccgccgccgccgcctgccgtccttccatggcacaggtgatcttcgtctacgtttcgctctacctcgtcgccttcgctcagggattcgacaagccatgcgggttggcgttcggcgccgagcaattcgacccgggccaccccagggagagcgccgcccgcagctccctcttcaactggtggttcttctccatggccgtcggcgtcgccgtcgccatcgccgccgtcagctacgtccaggagaacgtcggctggggcgtccccttcgccgtcgtgtcctgcgcctccgccgtctttctcctcggcacccccacctaccgcctctacgcgccgccccgtcccgacaccgtcatggatggcaagcgatcgtcgtcgtcggaggaggatgcgcgtggcgcgctgcggcgcctgcttccgatatgggcggcgtgcgtggcgtacggcgtggcggacgcgcagatcatgacgctgttcaacaagcaggggcggatgctggaccgccgcatcggcggcgtggagctgccgcccgccgcgctccagacgatcgggccggcgaccatcgtgctgttcgtgcccatctacgaccgcgcggtggtgccggcgctgcggcgcgcgacgggcaacccgagcgggctgacgacgctaagcggacgggggcggggctggcgacgtcgctggcggcggtggaggggcgccggctgggggcggcgcgggcggggcggcggccggcgatgagctgggcgtggctggtgccgcagtacgcgtcgatgggggtgtccgacgtgctggcgccggtggggatgcaggagttcttccacggcgagatgccggaggggcggcgcagcgtcgggctggcgctctactgcggcgccgtgggcatcggcggcttcgtcagcgccgcgctcatcgcggcgctggatggcgtcaccaggagggacggcggcgaggggtggttcgccgacgacctcgaccgcggccaccctcgactacttctactggctgctcgccggcgtcagcgccgtcgcactcgcgatgttcctctgcttcgcccgctcgtacgcctacaggaacaagacgctgcttgtaccatcaaacaccagtagtattaatactcatcatgcatgatactagtacgacggatcgatgcatgtacggacagacaatccagattgcagactgattaattgattatgcatcatgtaaataattcaccctctaattcatagtaattccattccatactggcatgctcaaaagcaaagcagtcatttgggtaaaaacttgctagtactccagttgtatcaagaagcaattgcttcttcaagatatatgctaaaacaatataaaattataattattttaaaacataaatagtactagtttctttctacgccacgtaggacgatagaccagatcaatgcaccacgtaagtagtttaaccaaaaccagcgaccaaggggaacttaatttgcactagttttataccttagttgtactctatattcgattttgcagttgagtgaacttttcaaaaaaaaaacaaacaaaaaaacaaaacaaaacacaaaagaactgccgctattcctcaattccacccctccatgtactccttccattatattggcgttcatccaaaacaaagcagggttaggtagcaaccatgcgatccacgcacatgaccacctctctaacaggaaactatttaaattttttttaatttttttaacaagataaattaatacgaacattcttaatttaacttttacatattgccaaaaaaactatttttactgttaatatacattaacaatttataatttaatttgttttttttaatttgtagaagttaaattttaacagtgatatatcacatatacttcttaattttttataattatttagatagcatgcaaacaatagagatatgccttctcgagagtttaaaatccactccctctttctttcgggattaggcacctctaccttcaaagaaacgtgtgtttgtcattgtgaacccgatgaaccatggacccacctattatctcaagagaaaatccaagaaataccattgacaaacacccaaatctaaaacatgctattgacgagtccgagtttccacaaaatattcgtacaaatgatttagtatcagaaatgccattgccgttaaggtttcgtccatcctacgccgttaaatgcattgtttattctatagcacttaatggaaggatgctaacggaaccctaacaacgatgatattttagagacaaaatctcttgtatattgatattacatcaaacttgtatttatccatgatatttgttggaatataaagtgaattgcccgccttttctcatcagcttaaatttttgggttgaactggtcggtgcatacaactcaatatggtattagagccagatgtctcgagttcaaatctggctgtcgcgcaattaaataaaagttgctgcccatttctattccacacttgcatgcaactcaatactaatatttttgaaattggatgcttattaattaccaacctcaactctcag

SEQ ID NO: 4398 - DNA, 42214 bp, Oryza sativa
cttcatcgccgaggaggcggggtcggacacggaggacgcctccctggagccacctccggcgaagtcgccgggagccggaggaggcatcccgaagagccccgcccccgcgccgccgtaccgctgcccaacaccgccgccgccgttgttgaagctggacagccgcgcggcgcgctccgcgaaccccgggtcgccgcagagcttgtcgaggccgcagtcgccgccgccgccgccgcctcccggcgccacgatggcgtccagcaccggcacgccgaagtcgagccggggggaggagctgaggaggctggaaatgtagtcgcccccgaccctgccgccgtccatcgccgccgccgtccaagaaacggcacggtgccccttctcttggctcctgtaggggggagagcttggggtggtcggcaatggcggaggaggaggtcaaagaggcggaggcggtgaaggtggaggttcagcctttttgggttagaggggagaagaagctgtttttccagactgcggacactgcccccggtgccttttaaggtcgggggtgggtctcttccgcttccgctgccacttccacttccacttctacccaccgtaagaacaggtacaatagcggctataagccaactataaacatattttaaagaaataaagaaaaagagagaagagcagcgggctacagatttgtagccagctgcagcatggactctaagacgtaacgtgtgtatgataggtgggaccagatattaataatatagtaagcaactattgtatgaattggctattacaatgactctagatgatttggagctagtagttagctatactattaaacttgctctaacgggtggtggtaaattccggcgcacggtgaccgagctctaacgtctggtggagatggagggatcaggctcctctaccgtcaaaggtaggtgcctttatcaccgatatgtcgcatgtaagtgacaaaggcacgatgcctttgaaggcaaaggatttcaatccgagatggaggggattaggatgggaggcaaaaagatcgtctaacttactgctctctgattttgagtagatgacatatagatgctataacttgtgggcctatatgttagtgatccatgttagagggcagtatgttagatgagtttcttctagagtgagcgtagagaaagaaatattttggcatctgacactgagtggttgatatgtggtcttcacgactagttggtgtacatgtcactgtcctacgttaatcagatggatctctttgtgggagtagggggacgaaaacggttagaagtgatattaatttttaagaaatgattcttgattggtcgttatttttattatatttattaaattaattgtttcagagattgtactataatgttgaaagaaatttatatgtggccaggattgaaaaataccgttttatgcacaaatgatccttggtcagttgagagtttctgataccgttttcatccctagatggaagagtacgttggtaataaatcttctatctgtaggagaaaaacagagccatcgcattcgttgtgaagatacattgttctatcacaatatagattgatcatgtacaatgcaatgatgtagcgtttataagacaatgtgcagttttgcacacctttccctatattttagccctcactctcctagcttcctctttaatgctcttatggttagcgagatcgagacgaggaaatgttagctagcagtgagctcaaatagaagagaaggtgcaaccgaccgtaagctcgagtagaggaagggctaggtcaccgatgagcttgagcaacgggggttggccattgtcaagggttagcttgagcaatgaaagaagagattgtggccagcagtgtattcaaatgacaattgacttcggatgcaacgaagaaagaagagaagagagtgggagaagataataagaaagaaatatagaataagagagagaaaaagtatggcctttcgtctaacgaactagatagcacaacatcgttcctaaactacttgatggcaaaagagcaaatacacacaaacttaagttttgtttggaacaaggtatcttttaagtaatttcggaggtttgcattcctttggaattatcttttttttaatataggtttgtttggggcaaaggaaatgttgttgaattcctttgaaaatgtagcaattctgcatttttttttgggaaagaaaacatccaatgtgagccaaaggaacttttcctttgcgtcattcatggctctgcatctatctctttcctagattttttttcactcatccaaacaactcaaatttcaccattcgcttggattgaattccttagtttccactttacaccatatcctaattccgtgtttttcatttctttgttccaagtagaactttcgtgttatattatcaattttccttagaaaaccacatcatgccttcaaggttatttcaaatctctttaagaaaaaagtaaattggactaacatacacatacctcaaagtacttcaagatgtgatttgtgtattacataaaataagaaatagaattttttttagataataaaataagaaatagaatggaaatgaagaagaatggtgttgtaaaacaccggcagtcttatccctcaagcacactgcagacatccaagttaattgtattatgcacaagctacatgcccctacaagtactttcataaaggatgagccaaatctatgcttttccttccgttttgtatttattagttattgcagatctgaagtgaaatgcaaaatgcagggtctatttgtatatgagaaaattaggtattgtatgccaaatttgtacatgcacgataataggcactaggcaatagtcatttatgcatccttataggcactaaaatactagaccacagaatatagcatcagcttaattgtctaccattacttctgaacaacagaaaattgatggtttttggcaaacctattgcctaattgtttagccaaaagtagcatttagaaaaggaccatcgatttctttagaattcaatggctcacatccgtttcaggtttatcctcgtggataattagatctgcctaacatttcaccatcttcttatcagttccttgttttcattaaagagatctgcattttcgtgcatgcattatgttgagattcagagagctgccaatattactcctattatcaggaatagaaagcccatgtaggcttttcttttaaagaaactacatctaggcgcacacgcatgacgcatccatactcaaatattatcggaggcatcagataccaccccgcaaagcacagtcatgcaacacactaaagtctacatcgatacaattggtgaacgccaacattaaccgctgaagcggcatatttgcaaacgaaaaataatttatgaataaagcttgtatataggtgttcttagcgatctaaaagtaaaggctagaaaataaacttcgatgaaaagaccccaaaatcaacttcaaatttaaagttaaaaatttaaattttggctgataagcataagtataagcgaaaagatgaagccataaatctagaatctgaattgtaatgagtttgtaacacaattgtactacttagctagcagaccacgggttaaccccatgaagattcaatctcacggctcccatgactccataagctaagaaaatagtacaacaaatgagatagattatgttttcaaaaaaaaaatgagacagactattgattagattaatatcgtggattatctacttcatcgtacaaatatattaaatattttgagaaataaacttaacaaataatttagaataaatagtctcagcaatatatgagagattttgtttttaagaaaacatattttagaagagttggtcaaataattcacgataataattcggtgaagtcattatctttttaaaaaaaaaatcggtgaagtagctggtatgaacatggtcctctcacacaattacttgaaactgttattataaagagaaaacagagcttgatcgatattacaattacctttgttccagcagaaatgcagcgttttggcttcagcgaacctcagcctagtttataatgttctgaaaagaataagttagaaggaaaatcaaattgtccaagttgcaatgataagggatcacattttaccacgacattgttctctacgggcacaatcattttacttcagatatgttcttgttcccccaaatcatttcacacctgcaagatcatgactaaactattttcaagtggctttgagcatctaatttcctctctagaaaacaaatgtgaactgcgcgttcaaaccaagtttagctgtattagtttcctacgccgaaactgcaatgagtttcttgccaataatttcaaaactcacaagttgccttcatttgaatatttgtccctcaaggcaccatctatacattcttttgtcaacggaatgcagagccagagtcgaataaacaaacgaactgactatagaataaacagatctttggcccaatcaaaactgttcccaatcagagctcacattattctagttaatcactgcatctttattctaatctgcatcgggatcgctgcagcagtcacatgcatcaggacgttaaacaagtcgtcgactgtactgacaaatactaatttgcaaactgaagtagagtagtatattttgcttgtggtcacaatctcgaattcacgaactgtatatatacgactgcacgattaacaattggggaaaggaaatgtcagtcttgagcaatgtaaattcttctcttctgaagaataatgaggtgcaaaactattgcgtattccagaagaaatgtctttctgaagcaagggcagacaatggtaattcattttgtaactgtctctgcatttcgattgtaatcttggtttataaatcagtaaagcatgaatagatcctgatttcaaatgaaaatgaaactagagattggcaaatttttgtgctgatcaaaaactaaaaaagaactggattttgtcgatttcgaaaacgtgttactgatgaatatctgaacaacactatagtctacagatgatctgaagtattctgaaccgtgttctacaatatattgccaagaatctaccatcttagcttgcaaactcgcattgccagctactgctaccactgtccaaattgaagactccattttttttctcagggaaaaattaaggctatgttcgcagcaactacccgtcgaaaaactggacaagcaagtaggtgaaagtgaatttgacacggttcttgattataaattgctcaagggacaattacaaccaactgtacgatggaacatatcttctaggaatatacagtaataaatagtagtagattagggcatcttatgagctaatatagtacaagcctatgtacttgtttaatcaaggagccatagaaaaacttggcctctagttatttactcctcctgctcaatcatttgaggcaaaatggaatccatgggcgtccaagaactgcctgttcctgcagttccttccaaaaacaattttaatagttttttccaatccaatttcttggcattgcaaacaccacagatgcatggcaacacaatgtgagcatcactgacatggcaagttcatccgagatggtaagagagagtgtcggattgccacattggcgccacgtcatgcagagacggttggtttctccagtttgtgtgttgctttaacgttggtgtttgttttgtagttgttggatctgaactttgagcataaagtttggtggatctgaacatagaatagctgcagaggacttgcatttccccaatgtatattctctctcgagatgaggtcaatgattgctgccattttctacctgtctcggcttacttcttggtttccctgtcgggctcatggattaatctctgcctttctttcgctgaaaagttgacagttaaagacattaacatatcttcatatcagaaagacaattttattgataaaaacctgggtattatgtgatccaagttgcataaaactacaataattttgatacgtgacccataatctttgatattatggtcattatgatcttacagttttataaatcacacagttaaccaaattgacttaatattataaaaaaaatatagaatatttgatacaacatttatatgacgaattaaaataactaatacattttgaacacaagtttagagatcaatgaaaaattggttaacgatatgttttgtcaaatctcagggctatatgcgacactctaaagtttgggcatatttggtaggtcctaaatttaactatatgggttgggtctagagtggagttatggaactgcctaaaccacatctctagttcattttgtgagaacgctccagccaacctcgctctctttttggatggagttgaaaccatttggttggattctagctttagaagagttagagctgtaccaaacgagtccaaaactatgattttatacaacttgaaccgtttatggtgttgagagatttactctatcgaaaaaatccccgatcctatcctaatcctaatataaaatgcgagtaaatctccatcaacaaaaacaaacaaatcaaactaaagatatgctatgcatgcaccagaatacataatattcagtcatatacatccaacccttcgatctgaactatcactgtaattaatttccaaccgttctgacggacagagagctcgatcgccattgatacaccctcccgttctcgcgctcgatctcccggcgtccgtacgtaccaccgccggcagcaatggcgccaccggctcatcggccagccagctgccggacttcgccggccgcctcgccgtgctgcgagtacagtgccgcgtgcgccttcagggcaactgcgatgaacatgcagagaggtacactggtactgcgtacttcgccggcaataatctctgaaaaataaaataaaattttccattgctcgcagcttttgacttttactgttgccctgcactcgtaaagctggaaggacgataggaaaaagaattaacaaaaagtaaagcttttcctacgttctagatggtgtactagctaggaagttagtcagtcactgcaagaaatttgatggtctttttatttgaccgtaactaagatttcatgatcttggcctcggtcaatatttcctcgtttttatgagaattgaacggttttctgtgaaattcccgcgttccaaactttctgatagtctcatacagtttaatttgtggtcctccatctgtttcaaaatataaggcgtattttgtttcattagaagaatggtttgacctacaattgctctattacgatactataatttatgtgatacaaaagtataataataagtaatccgttacgaatctaataaattcaagtacttgaaaggagtgtttatggataggttgtccctgaaaagggagattttttcagacaatgccctgaaaaaaggaagaagagacagggaaagagagcattatgctgttaagctgttgcccagaaaacattatgctgctaagctgttgccaccaccactgcaggaattcagaggacactgcaatgttaggcatcagcacaggctttgcacactctcctttattccaaagggagaacaaaaaaaaagttggcctacttattacttgaaaccttatgccaaactgctgttctgcatttgctgcagtagtagttgtagtgcttcatcctgaactgtcaactgaagctttggaacaaagaacaacaacagcattggccagtgtggccttggattggattgctgaaagctaaagcgttggattattacctgcctgtgcaatccaaggaagagagaatcggaggaaagattagctttggtgtcgagctgtggaagaagatcacctttgtgacagagagagagagtgatggtactgtagctttgatgctgtagcggccgtggaactcccgtcagaaagctgtcattctactcgacctaacatgatgttttctttgcaaagagtgaacacgaaaggtgccctttattggattctctctgaactttgatttattattattattatttgttcaaaggtagtagcttctgttttttttttaacttttcctactgaatttgatcgttgacacgagctgaattgctgacaagtcctttctgtcacctgctagtgacagaaccgtaggtaagaacaatatcacgattcacacaggaagtatgccttttgagactatcgtgcgagttgtaggtatgagattattcagtttcaaagctaattatgctagtacgatgtactgaatttggaggagcaaggaagaatgatggagagatgtacagtagtaaactgaagagaggtgaagcaaaacaaacctgcacctgtttcttacacacaccacaaaaatgagaacatttgtaaagatctaccagttatgtttgccatcctgagaatgacctaaaagatggagaaaatttatagagtaactgaaatccaagataacctgcaaacagcacttctttgcaagtttcctctgatactgaatcccatggcctcttaaagctcaaatccatgtaagtagccgtcagtaagcaacagactgtctactactggtatctaaaatcctaagcagataggctggttatggatgactaatgggcttgtctttcttaataagtatcactaccgtcattagagttccaagatgttcttttgagtcatccaagcccatatatagatagttctccgaaaacccatttgggtaactgaccatttccaagttagtttcacatatgttgctgccttttgacgtggtacacaggcaaaactcaataggatactgcctgaaatttgttgtatccagttgtaagcctttatgtaaatgtcagaaaaaaggttgcatggatgtagatgccaggtaaaaaatacctttctctaaaaaaaataaatgtcagaagttatatgttactaggctattatattttcagcttattcaccggattattaaatgaatcgtttgctctaggcttcgttacggcttcttaaaaactatattttactgtattgtttagatcacttattttaagctatttgtaagttaatttctcaaaattttattaccaaataatcgacaacaataatctaaatagaataggaccaagaactcaaagtgagtcctgctggagttttctagtgatgtataatgggcaatccaatgatgaacgaacacgtctacctgaatcatttttcctggtttacttttgaaacgaaattgtttgaatccgttcgttccatgatattattggccggcctccatacattcatcaaaaactactagtacgagtagtttaataaaacctttaatggcttggccgtgttcttttttcaattctggattctgaagttctatttgcattcatgaaacaatcttttgttgctctttagtttcagatggctcattattttgcaacaatcgttcagtccactggcacccatcaaggtgccgcctgcggttcaactcgaattaccatcaaaactaaaagcttctcggtaatgggccatacccttcgcggaatgtccggggtccagatttatatgggccgatatatggggcacagcatctgtgagtcgaaccagactctaacggcccaaactttactggcccaacgggaccatttcactctgtattaggcctggcctattgggttccctgaattgggcctcgatcaattatcttgggccgcatttattcgatgaagcgccacgtcaatgcgagtcaaattagccacgtagacgccacctgagctaaaaccgggtcaaatactgccgagcgaccttatttgttttgcgttcaagggacgaaaatcagactagacgacaaatagagggacccaaagtgaacttattccgactcggattgcccaaacgctattcctcttgtatcttgctttgctgatgctatcggagggcgaaggttacttggttggctacggttttgagcaaggtttacaatctcgagcggtatcatcggatttcatgggatccgtcaaaaaaaccgatgaaattcgaataaatttttatcaaaaagttaaaattcagtttaattttttaaaacttgaccaatagatgactgcaaaatttgtatgcgaccaatcgggtgaatataacatggcagctgatggcccactagatagaattgtgggcttgtggcatctctattcttaattgccgtttaatagcctggacggaagtttgagccttcaaaattttctaggctccagaaacccaattggaactacgcaaatcacgttaaacagaatcaaacgcagctgactagataaccaatgcggccaggccactggcaggtgatcccgatcctacccgaacattatagccagaaacatgctgatcaggacgatacctcaacacaataaattcaacagatacaatacagcattcatccagagcaaaaacgcaaaatgcaggacatgtaggctaatgatgcgatagtaatttggccacattagagtagctgctggtagcaaaaaggttgacataatagttatctttcacagtaccacatcgattgaaaggagaatacttggaggcgcgacagtttcctacaatcaaaccagaccaaaacattatactgataaaacagcctactcgtcctcctggctacggagccttgcaagcttgttggtgaccacgatgtcgagctgcgcagcacgctcaacgatctccttgcgcttcttcgtagagacgttgtgggcaatctcggcacagtaggtcctgtttacaggagaattagctcattagcagaaagtttgtaactgcagctggtgctgacaacagaaaacagcaatgctgaacaccaccccgctgaaagtaagcttggtgaacaaagtgattacctgttgtgcatcatgagcaactccagctcagagacattgtgcaccacaaacttcttgaacttgttggggaggtagtgcctggtcttcttgtctgagccgtaaccaatgttgggcatcaaggtgcatcccttgaactttctcctgacacgggagtcaatacccttgggcctgcgccagcttggctggacaagtatgaacaagttgaagttagtctcagcaaatatgccaaatagccatagttacaaacgaggatgccatgcccactaatgaaagcaataacatgcaggaactcatatgaaggatgataacagtaaacctttaaacggtggcatcacattagcatccatgaaacaataacatagtttactattaccaggacaactggtgcaatagaagtgcatagaagtccataacagactttgcaaacaaacttcgatatacttaaacaaaaatatcacaatgaagtgttggtccaacaacaacattctcagctaagctgactagtagatagcaaaattgtcagtagtgctatacatagctcaatatctgcacacaggccttgcagttctgataatacgaatagaaggaggcagcactaggagcaatgttcacacttcacaacaaaacagtttcttgacgcaacaatcctaatttcaagtaatcacatgcaagaatgatgggagatatcttgcctttcattgcgtacaacatcatgcaaatgggtaaatttaggttaaccaaccacaattgaaagagcattcagctactgggaaaccaaccacatctagttactatacaagcgtctcttgttactggacactaaactacttcctcaatttcacaatgtaagtcattctagcattttccattttccacattcatattgatgttaatgaatctagatagatatatatgtctagattcacaaacatcaatatgaatgtgggaaatgctagaatgacttacattgtgaaacggagggagtagtagttagcaaaatagcacttgtgtgtatcaagactaagcaaatcaccacatacttcaagcaaatccaaaacacttccatagcctactaaaccaacccatgaatttgaaacaaactacacatatccacaaatcggtcaaacctgagcaacacgtatgacctaattcaaaatcaagcaggaaacccagctgatctcaccgcagctactactactaccactaatcgaaatggtccattccagaaagcacaaactcgtcatcaccttgaggcataggtagcggtcactatggggcctcttgaactgcttgaccctcttcttcacgatcttcttcgtcagcagcggcaccgccatctctgctccaccaaaaacaacaaaaacaaaaaaaacttaagagacgagatcgacgatgcagcaagcaacaaatccaaccagctgcgtgaagaaaaatcttgattcctgggcaagaactgacgctgtaccttcggatcggagagggaagcggagcgacgaatttgggggaagaagacgcggcggcggtggcggtggggaggatggcgaagggttcttatacggggggagaaaccctagcgggctcgtggccttggtcgaatcgacggctaggatctcgtgagatggaagcggacggccggatcaagttgtatgggtgggccgtcctggcattccaaactgggctggatttgctgggataaatgggccacgtgcgtggttaggcccatatgatctgaactgggctggttctgctcggataaagctgcttctgggctcgtttgatgggcctcatcccacccggccacttagatgggccaggaaattctggcccaaactatacggagattcgtgatgtccaagcagcttgtctgttcccgtttggatttttctgatttgcagaattcagtagaccgaggagaatttagtagggtgtggtccgtagatttggaaggattcttatcaaattttcggcaaaagcgtctggataagacaagccaaatgttaggtggaaaagtataattttgccattgttgtttcactttgaacaacatccattttaaacggcatgagtcaccaaactataaatcctaaatttggtttgtataattgaatcagactgtgccaatgttacagcccatgtgcagtgtgcacgctcctcacatcttggtaggagtagctaggagcgcactcagctgtcgatcgcccttttcctgcactccagtgaagggggtccaacacaactttagaagaagaaaacgaagaaggaattttcaccatctcggcacatgatagacggccgtgccgggcccgttcacttttgccgacccatcctcttatcacacacccttttctctgatccattgagtgctcatcttgcttgtgttcatgcatctacaactcctcatcctatattcctatcttgatttctgctgcatcagtgcatacacgattcggtcatttcagactgcatgtgcactcattgtactctcgctgtatttggattgctaccattgcatttttttttgtcagtgctaaaacttagttaaattttgacactactaatttttttagggtaagattatatttggtttgctatcatataaagccaacttatgaattctagttaagattgttctagatattgatgtcaaatctagcatgggcattaccaataaattggttttagtccaaactaaacacatgtactatttaaactaacaaaatattggtagggctaagttttggtagcaacccaaaatggctcttagacttatcctaatgctacaaatctaaggtatatttagattcatagtagttttcatccctaattactactgtctttatcttaaattatgaaaacctaaatgaaatactagtattttctagtagtacaatctgaccatgaggtagtactgcatttccttttcgagtgcatgctgctgtactgcatcctcatcgattcagagacacagtacacatggtagtacgaaagagaaataaaatgtgcgtgacattatcgccgttttttactgcaaccatgtgtccatctgaacattcatgctcctgcaggtacacggtatatgtacacactagctgctactactagtacagtattagtaggttattttgtgaaggagacgagacgcaatctggaccgtccgatccatggcttcatacaaaccggtcaaccgtgtacgtttggcaccgtagcagttggatcgtcgctatcatcggtgttcgtttcggcaagctgacaattcctgctgctactggtgcgaatcatcctgctcgtagcgtccctgattctcagttacaccgaaaatccatactactttaacaagactctaataatgataacagtgaatctgtcactccaactgcttccatcgtaaattttacaaaccattcgatgaacttctttatgttaaaaaccaatcaatctaaatggatagcgacgtatagaatcaaattgagacaaatattttccatagcagaacgacgggtagaacatttcaccaaaaatgcattttatccgtagtaaaacacgggctttagctagtctaccaaaattctctactaaagcatgtacatgtgtgtgtggaaatatatttaccactgcctttatcttaaaatatgctccaataactttgtctcggttcatagttgctatattagctattaataatttggataagtcagtatctagattaataattaaaagttaatacttccttttggaaagaaagttgaattcttggctatgaacttagacatggcacatgtctatattcctagtcaagattcatttgttttggaattgagggcgtgtatatctaataggacatactctctccgatctttccgtttcaggttataaaacgctttgactttaatcaaagtcaaattactttaagtttgaaaaatataataacattttcaacccaaacaaaatttattataaaaatatattcaattattgatttattaaaactaatttggtattaaaaatattactatatttgtctataaatttagtcaaacttagtttgactttgaccaaagtcaaaacatggagtaaatctgaacatagctatatccatatttatagctgaaaagtgagtactattttgggaaaaaaatacatagtactacctccgtttcaggttataggactttctagcattgtccatatttatatagatgttaataaatcgagtcacatatatatgtttagatttatttatatatatatatatatatatatatatatatatatatatatgaatgtataaaatgctagaaagacttgtaatatgaaacggatgaagtattattagtatatcttgttaattgctattgcacggacgtattactgcaaaggattaatcctcagtaaaagctggcatttacactccctcccaacggtctccagctagctgggctggtgaatagcgtaaacaaatgcaagctcacatgcacactctgttcagacattcatagttgcacagtccttgtacctactgcagtcactgttgccaacctcactgacaagaaatacaagacaaattcatgggtaattaccccccggcaacacataattatatcgcaaatacataatcaaatccagataacgcaactgcacagtgcacactcttccctgccaacgcacaggatgttaaaacactgtaccacactgatccggagatccgaaattaaataaccccaaattaccaccagatcaatggcatgtacaacaatagtaaaatcactgtactaatctagtgccgaattaacaacaagtgctgtgcaccaaccatttttttattgcaaatggaaaaatcaaagaaaaactaattataacaaaaaaaaagcaagagaaaatgaaaaaaaaaagaggaaaggaaacaagaacagtagggaaataattgttcaagaaatgattcatcatgcaaacatcaatgaacaccactaatcatggtactaggacgtaggaacgtagctgtcaataatctttatcatacaatcgccaagaaacccaccaacgccgccacggcgagcgccggcgccgacacggcggcggcggtggtcgccgcgttcttgccggcggtcggcgcgacggaggacgacgcgccgctgtcgctgccggaagagggggcggggccaccggcgacgggcgcgggcgccggctcggacgccggggaggtcgccgtggcggccttgctgccggcgaggacgagcttggccttggaggcgaggttggccgggccgaacgcgtgcttgtcgggcgcgccgccggtgacggaggagccgacctgccacacctggttcacggacttcatccccttgtggagctgcagcttgccgtagaggcggatcttgccgccgctgccctcgtcggcggcgaggtcggtggccgggaacgcgatgggcgtcgaggcgccgccgagcgcgacgtagccggtgatgttgtatgtcttcacggcgggcgccgacgaggacgagccgcccttgagcgccacgagcgcctgcgtcccggccatcccctcgccggtggggttcagcccccacgccacccacccgccggcgcccgccggcgccgccacgaacgccaccgacagggacgacttggacgcgtcgtacgtgtagtgcagcgccgcgccgaggctcggcaggtcctcgcacgccgcgtacgccctccccgccgggaacttctcgccggcgcacgccgcctccgccgcgcgcattgccgccggcgaggcgaggaggatcagcgcgagcaccgcgacgagccgatgcggatgcgccattgccgagggcgagtggatctggagctcagtggagggagaagctcaagtggttggctgatttgctttgcttggcctcttcttctcctcctccttgaagtgtgggagtgtgagggtttataaggagtggaagtggggttatgtgtgattatgagggttatcagggggttatttgttaatgttttttgaattttttgaagatggaaagggcaaatttggtccgtatttagaggggtgtgatatcatttggttggtgacaaacatgcatgagacatgaatcctgactcccgtgagtttgttgcgtgtgttatagtagccacgaggttgtggggtttgtactttgtacctctgggttttattatatttgcaaggtgtcatttgtcgttagattcaattttgtttaaacactactcctagtactttagaagtacattctcacgctataaatattaatgactagggtaagattcggttaaactttcaaaattccgacgattggtaatttttagaatgtttaatttggaaatagaagaaatggtatacatatatttgtcttaaaagcactatcatattgttagtattctaaatatgagatatcatatacttctcgctccacatatgtactagtattagtggagcccactatataccaaatcatatacggaatcaatactgctatggcaagtgtaataagtagataaggaagtagtcatgtataagaaaaaggaaacagagtcctatttagatctaaccaagagtccaagactacccgaattgtatacataattgattttcctagttttacttgatcaagagggtatttataataacagtataaatacaaaacctcacagaaggagaggagacacgaatccaacaaggagggttctagagccacctctcaatcttgccaagtttgttctcaaggaagccgatatcaattagccatcaagcacatgcctgagcttcacactggtgtactagcaaactagattaggttctactccctattatatttatgagagatattgatatataatggtaacaccggtttcggtcagtaggaataggaatattacttgtcaataggaggttggaacccgtatacttttagagttttgtttgcattcccatatcagttggtccctacgttctcaaacatcctgtatatatatatgaataccgtgatcgtggtataactcgtcgacgaatactgtaataattttttactagattatataaggttgttttaaaatagatgatcggaattttaaaaggcaaaccaaatcaatttgtccaaattttcaaatatttgccaacaaagcactattttatcataaaggtgcggtattgataaataaatcaataacaccctctctgaaacagatgaattttacaagcactaccaactactactacacacgtccaaatatagcaacttcctggatataggatatagatctggaaaattacttatacttatccacattcatctcaatataaactaacttttacgcatgaatttggatataacgtatatttagattcatatataaaagttagtatattttgtgacggagggaacatattttaggacggatggagtattttccaaataaacagtaaatcttcgtaaattccaaacaggacatgaatatttgtcaaaagagctttgaatcccaactcacaagtcatctaacttcacaaagctagtccaatattgacttgcctaactccaaatccttcaaaaccgtgtgcagagagttgacggtgggttggctgaaaaatgtaaccacacacgtaaatgatccatgttaggagcaccgccactacagagtgtaatacacatgcgaatttttttattaccaaccaatcaatggtcaatgcatcttggttaatttgttactagctggccaattttttttttgtggagatccaacagaacagaacaccaagtctgaaacattcagaattcagacgagcagctctgaatctggccatgtgtgacccatgtgagaacttgacgcgtgctcccaacggccgggtgattagtagactgaatgatcagtaaaagacttgcaagcttgctaatcttaatcagtctaaattaaccctgaagctagtatatcattcttgactaagggcacatgaaccgatgcatgttcaactctgcacaggctatgacaggcttagggttaatttgattctgaaggttgacccgtgaattacgagattgcatgacgaatgggatgacaactaggtgatgtaattacaggatacacatggaagcattcaggatggagtgattggattaatcaactacgataacatgaaacagaatgtgatagcatgaagcgtacatgtgatcgattgattggagattatgttgtctgaaatgaacccggagatctcaatgaacctgtgttactgtgtacctatagatttggcagatccagaaatcaatacataaacacatcccttcgccatctcacatgatacgaagtatgaaacgtatccaaccattttggattcatctcaacaagctgctcaaaaaaaccctgtaaaattcacactcaaaacaaatccttttgcctctttcacctctgaactctgaacatgtctgttgctaactacaatactgtgtatcatgccatcatgcaaatcaaatcatcgtactctgcgcaaattgccaagtttgcaacggcaggggtcagcaataataggcaagaaaacaaacacatcttccattttagtattaccaaatactacattggagtacttaaattaatctgaaactataaaccccgtgatcattgataaccctatctgcagtactcgccaaacggccagctaggccatcagatactaaagcttcacgcaacgccatccagaagctgcaaaaaggtgacaggctacacacttgattattgcaaggcgggttatgaacttaatcagcatgaaatggaaggagataaaaatatgatatactcgattagatgagctattatacgggaagaaaaagttcggaggtcactgtcaattcagtataagtaaagcactagtatcctaaacacatcttgtagaagcaactcaatgatcttgtagaagcattgcatgtgattgtatgaaaaatgatcaacttttggtcatcagagtggctagtgttttacagggtgtaagtgaccccatctcgcaattggagatagcttcaaagggaaaactgaacaggatatgtgccaattaagtgattaggtgcctgcatatatacgaatgaatcatttcttcaatgatttgtgtctggtatacatgccagtattgaaatgattttggattcatggacttttcagtaactatcttttcatgatactgtatctgccagggtctgttttggattgcttagcttatctgaataaattcatttcagttttcaagatggcatatattcatttgaggttaggaatgaaagaatggacgcacttctcgagtaccatgtgattttcgtagaaacttttgatatatgatttttaaaaaagaataatcagttttaaattttataatagttaattcattcgtttgtactctcgaatagtgatcacaaaatcattcagccgttcagctctttagggggggggggggggtcactcttagctactactacttgcataggagagattaggattggaaatttgagcttttcaacttagctgaatctgagtctacttctgcaaaacagtcggtaaaacctaataaaaagagatgggccagagtgtcctatgtaagttctgattctttctaaacctgaagaaagctgttgaaaagctcctcgatggacgatgccttttggtacaaattaatctcttttcagatccaagcgttcccatcctgttgggtggttaggtttcacattagtagcaagctctgcacgttcacaactcttttgtgctggtcacagcgtttctttagcatcctatctcctgtgttttcggcgtgattttcaggtttcaggttcgaacaattagctttttgataggaccactctgagactatctaagtgggcattagccgttgggaattttggtaatgacaggttacaagcatcagaattaagacatactccttccgtcccgttccatactataagttattttagttttatcctaaatcaaacttcactaagaactttaattgagtttataaaaaaacactaacaattacactaacaaataaatgcgctgttaggacacattttctagtgaatttaatgaaaccaattcgatgttatagccgatcaaaggtaaagaagtttgacttatgacaaaatcgaaaatgacttatataatatatatggaacagagggagtattagcttatcttaacttttttttatatatgctagcttatcttaagtttggtttagatagtgagggagaagaagaggaaaaagaaaatgaactgatgacatgcatagtaatggtaatgggccaacttccataaacgttggatttgggccaaatactttaggtcaactgaacgtggttgaccattgatgggatgatgaaagcttcaaagccaccaactttttttctcctcctaacatatgggtgtgtttagttcacaccaaaattggaaatttggttaaaattgaaacgatgtgacggaaaagttgaaagtttgtgtgtgtaggaaagttttaatgtgatggaaaagttggaagtttaaagaaatagtttggaactaaactcggccatattttattccaacttccatgtggatgagagaaaaactggaaggactttttattcggctgtagtaattctgaagtgaaccacacttcaattttcttcaggtaataatgcccaagtccacaaaattgtgctgaaacaagtaataaaagttcacacgcttgactttgataaatcacagctgcggtagactgtatgaatcttttttagataatgaaaatggtttgtgctagtatagaaacaaattattcactgggttattcctacggattatctactttattgtagagatgagttaattattttggaattaagcttaataaatagcttcgaaccagtggtctaaacaatacaatagaagaaagttctttttttctttaaaaaaagttatgtaataaataaatctgtgacaataatccagtagaacagctaaaaagaactggacctaaggatggattggttactgaacaatactacatttttcttccatgctaacttgcccacgggggatttgcaattatgacactgcaaacattaacctttgctataatgacactggacccacatttcataaatacagatgggcccatttgtcatccactcggagtgtcaaaacagcgaaacccctatgtttgcagtcccaatattgcaattttctccttgcgcaccggtatgaagtccaaaagagacaattcaatcgtcacattaataagagaataaattcatgattgtagaacgagtttcaactttcaaccagcagtagaactcttcttctttgtgcgtttgtcgtacctctacagtgtaagtgcttacaaattttgtggacaagattttcagtggtcagcgagtacaaattcagcagggaaattcaatgccgaggattttcgtggcatttgtaggtccaaattgagcacatcacggttgaaaccatgcaagtatgcaacatgatagctgccattttcgtcgagtttcagatcgagaagcacggcagtttgactgacgaactcaaaaacatggcgtctttttttttaaaaaaaattgtttcaggaaatttgttcatgggacatgggggaaaggcgtgtggctagcgcacgtacggctgttgctgtcaacggacgagtgattcgtgatgcatattggaattggattcgtgattttaatttgctgtgtgctttgtactacagggtttagcagaagttgttctgaactttttgattctggttgcgttgagaatgagaactcttttcggggatatatatagagacagcgactacacgaaggtgataattaaatggagatatcaaatgtttgatcgagcaggagtcgctgatttgatttgatttcagttttgatgacctttgtgaataatcaatgtcatgcaataaaagctttttgtgcagaaagcgaccggtcagcagattgtaaggagtagtaataaacttttctaatttgtttggcttggggcatggcaaagagcgtgacgtcaggcgggcgtcaccgtggcgtcaccggggccgcgtccctctcaaccgcggcgcgtccttttccggctttgggcgacgggacgagacgacgacgagaggggagagaatcgcatcgcgaagcagcgggggctgcacgattcgtcgtcgtcgctttcctcttcatcctctcctcgccgtgtgcgcggtgcggcctcgttcgcgtcggcgtcggcgtcggaggcggagacggaggcgaaattgcaaggaaaacgacgacgggcgtcggggacgggaaggagcggagggaggcgtacgtggatgtgaactgattggtgcgtaggcgagccgcgagcggcggagctagcgatgctctactttcgaagtcacgttactttgtcaccgatacatggtgcgacactctgccccctcctgttggttggagttacgtttttaatcgtcgtaatagttgctagctcgggttttttatttttctttttctccccctctcccggcataagccagtctgactgtttgttttgtgtaacaaaaactcttttcctgttaatatattgatgtgcaatctttttgcgcgttcacgaaaaaaatatgggtgcgacagatattattcccttgatctcaaaaagtcaaaataactgtatttttacactgttcatctccaatgtttcaccgtttgttttatttagattttttttgttagtatttttattgttattagatgataaaacatgaataatagtttatgtgtgactaattttttatatttttttcataaaatttttaaataagatggatggtcaaacattgaacacggatatactttgatcattgactgaatccgatagactttgaacctatatgtcagcaactaagacacggtgatttcgaagatagaaattcttgatccgtgaagtgaacggcatggagcgtgaataatatgggccaagtgtgaacctatcttatgtgggagtgggacgacgtgctgcacggttcgtccctacatatgatgcaagcaacagcaaacccgacgctggaggatggatggatggctggctggatgctcattctcattctcattctgtttctcctttcacggctggtgtttcttttcccacggcctcaggctggctatgacctcgtttaaacgagtttttttttttacgaatcgacgaggctgttaattttattgaataaaggagacgaaaaatgtaaaaaaaaagaggtaaagtatagaaaataaaaaacccagggccgtggccctaactataggcagttacattgtcaaccagacggcaagattttttgcgcccgccaacccccatgtttttgcttcctcctttgtcttggctagcagagttagcgacgacagctccttgtgctggaaagtcctccggttcctttcgttccgtttaaacgagttttacactataagaagcagcggatgagaatacatagaaaagaagaaaacaaacatttaacttctaatttatcttatatattttaccattatagattcttataatatagacaaatagctaaactatttgtgaagaaaaaaattaaaaaaaaactgagctaccaggatatctctaaaggtgtgtttagttcacgctaaagttgaaagtttggttaaaattagaacgatataacggaaaaattggaagtttgtgtgtgtaggaaagttttgatgtgatggaaaagttagaagtttaaagaaaaagtttagaactaaactcggcctaaacaacggaacctacatgtcgtgtcataggagccctatgacatcaaccatctcctgcatctctatgcacagatggctgatttgatctcatcttttcacttatatttatacttatcaattaaaatttaaatttttagctttaaatttaaagttgattttgattttttttttatcaaaatttatttttcagtctttaaatcgttaaaaacacttatataaaaaagttttaggtataaattattttttatttacaaatatgttgtttgaggccgtttttcagtgcgaagtgaacaactgcatgccaaacgcatcgccggagaaggaaggggaaaccggtgacggtgagagtcatttaaggcgttctggtagcctacgctttttattttttttggcagttggcctgcatcggtgaccaacccccgaatgaaatcaaccgttgcaatctcgcaatttctttctgttggaacgccattgatttctttctcccccaagactaattaacatgtggatgtggtgtcatctttcttccagccaccaacccaccgcaggagaaactctccagtcaacttggttttgaaaaacgcgatgagtgttctgatgatgtgtacagtacgtgcttcgccccgcacgccgcggcgccaaggaacttcgaataatttaccgagttgtatacaggccgctgccgctgctgagactgagaccgtgcttgctaaattgatcgtcctcattgtgtcgcgctccttccacgtagggctgatgtttcttttcgtatggcctctgactatgacctcatttacaccgtgtttagatccaaagtttttcttcaaattttcaacttttttatcacatcaaaactttcttacacacataaacttcaaacttttccgtcacatcgttccaatttcaaccaaacttccaattttagcgtgaactaaacacacccttaaacgagttttacactatgagaagccggggaggagaatgtatgcaaacaaagaaaacaaacattgatcatcatatgataagaatccaaaatttctcaaattgatcatcatataactacatgaacacggatttcgtcggaatataattaatgcaatataagtgaatgtgtgcatgctagagtgtaattggcatggggttttaagagcatgtacaatagtgctattaagaaggctccaaaacttattaatcagcctaatacgagattagaaaaagaaaatcgctaggagagaaacaaatgggcgcttgttttagcgctagcgcttgcacagcaccccatgcagtatcggtcacgggagatgagaaaaaaaatgctaggtgggtcccacacgaaaaaaaaatgttatatttaatgtatgtatgctttaaccaaggcagcttatagctaacttgtagttaattagcatgttgtatgagttggctttgtaagttagctctaccttgacatgataaaattttggagcttgccgctagctgcactattgaccttgctctaatcaatgcatgtattgtgggagaatgtgtgcatggtgtcttcattgatgtgattagttttggtgtataaacttatatgatgatcaatttgggaaggagggagtgctattcacaaggtttttcttaggccctgtttagttcccagaacaaaaattttcaccctgttacatcgaatgtttggacacatgcatggagtattaaatgtagacaaaaaaaattacacaaattgggtgtaaattactagacgaatcttttaagcctaattgtgccatgatttgataatgtggtgctatagtaaatatttgctaatgatggattaattaggcttgataaattcgtatcgcggtttctaggcagaatttgtaatttgttttgttattagacaaagtttaatacttcaaatgtatatccgtatatccgatgtgacaccccaaaacaaaaatttttgtcatctaaataagcccttacttcctccatcccagataaacaaattcatagtgtatcatatttgtttattttaagatggatatagtcttgttttaagatgggtttaggaaagaaggttagaaacttctcctatgcacctaaaacagggtaactcattaccacatgattaatacttactaggtaaaacaataccgaaaaatagattaatatgattaaaaaaaagtcttccctatcaacttttttactttttattaaaaacatacctcatccgtcttaaaatataagaacttttagttggatggacacagattcaacgtactaggatcttatattttgggacacagaaagttattatattttgggacgtagggattatcttctaaccgttcatagaacgtttgcgtgaaaaacgagaaaatagaagttgagacatgtactttcaaacatatctttattctccttttgaataataggttcccaactttaattagtcatgacttaatgagttactcgttccatctacttttgatagtcatatttctaaatctgaaaaatttatttttgataggcatatttcaatccaacaacctatcatcttaatgactttctcggatttaatacatgactctctattatttcacacatgattggctacaagagcattgagaaatgtaaatattaatgaattgcttgtttacgtgattataaaagtagatagagggagtatttcgttttctatacggagaaatgatttacgaacacatccaattgtattacggttaccgcggcgtgctgactgaccgcttaccaaccacggttcacacccatcttcctggatcaaaccggctagtaagctagttctgtgatttatgagtaattaattaagaagcatgcgattatctttctcatcatgtgccaaagattcagggcggcgaggcaatctcatatattctcaacggacaaataataacaacgctttatctgcagcagccatccgaatccatcggcgatgcacagcgaatgcattgactccgatgagtactactgtacttgatggtgttctagaactgaaggaaggaatgaattcggtttgagtccgtgagtggttgattgatacaggtagtaccactgtaccaccatttgtggggttcagtttggcatccaagtgattgtgctgattaattgtctcattgttcagccaatcaacggtacaagatgagatgagatgagaggatgggctgttatctctgatgtgttttctgcctctcatgtcatcatcaactcgcccataacttaaaccatattatttttagggatttagggatattcagtttatttaccattttcaagcctaactaattttagtaatattaaaattttgtaaagtttgataatgccacaagatttggtaataaggtaaaattatgtatgcagtattgtttagtttgttaccttgtaaagaataatttggatgattaccaaattaattttggtatggtaggatgtgataggttattcgagacatgtttggattgttgtcattttaaattttggcaataccaaaatttaatatgtttgaaaatagtaaaaaaaaagtgaacacgcccttagtttatttatccgattattgaaatggcttatttattttatgctttgaaaaccaatttccttttagaaaaatagtactgtaattgatcaggctatttattttaacttatttataaagttcatcttttaaaatacttaatctattttaaaattgagtagataacttacgacgataatccaaatcaaacaaacctaactttaacactgcaagagaaaccgacaattatagcgagtaaaggaatcaagagatacgttatcatggaaacggtaagtactgaaagattagcgagcatacattaaaacggcaggtaaaaaacccaaaaaccgaaccggtgaacgtggacgcgaaaaagggcaacgtgcaaaaaaccttcctcaaatccaacctccgaccgcgtcaatggccgcccaatcacacgtccccacgtgtcccccctcacctccgccttcttaacctcgccacctcctcctctcctcccacctcgcctctctctcctctctctctctctagtttacttttcttggagccaccaagaaaccagccatgtccgtgctcggtgtcttcttggcgtcgctgcttctggcggcggtggcgccggcgagggcggcaggaggggggtgcgcggcggagaggttcagcagcaaccgcgtgtacgcggcgtgcagcgacctgccccacctgggcgcgtccgtgcactggacctacgacgccgcggcgtcggcgtcgctgtccgtggcgttcgtcgccgcgccgccgtcgcccggcgggtgggtggcgtgggggctcaacccgaccggcggcgggatggccggcacgcaggcgctcgtcgcgctgcccaaggggggaggaggcgggtacgaggtccagacgttcgacatcgaggggtactcgctctccgcgccggggaagctcaagtacccggcgaccgacctcgccgcggaggtcgccgccgacggccgcgtcagcgtcttcgggaagctggcgctgcagaacggcaccgccgaggtgaaccaggtctggcaggtcgggccggtctccagcgggtccatggtgccgcacgccatgagcagcgacaacaaggccgccatggggaagctcaacctcctcaccggggcagccacctcttccggcggcggcggcagcaacctcaggaagaagaatgtgagcactcttcaatcttgatttctagtatcattttgtttgcctttcttgaattcctaatcaaatttgagtgcacaaatcaaattgtagttagaaaaggggggcgatttcagctcgaattccaccagggaacttaactccaaaagctaaaatcctggggatttttttttttagcaaaagctctcatattgttgttttcttttattgctttatgaattagcaacagtagtggttactgaagtctgaagcggtactggtatgagtcaatttaatttgaagtatatgcttatgaggtggtagagcgttgaaaagaaagaaaaaaacaacacattttttaatgcttaagagtcaatctttggttaaaataatctttcctgcttctgttgccatgtgaaatgctcaaatgtttatacatatgttcgactgttatatcctggttggtttgagatgatttcaactgtgttaaaatctgtaggaataagatgacgtttgctgactgattatgtgtgacaaaatgccttctttgcttccgtactacacactcaaatttctatgctttcagattgcaattttcttgcctgtattggtttcttcctgctttggtggacttcagcacgatttgtctttcctgttgatggctacatcgaaatgctcatttcacacaatgcaaattcagtagagagtagggagccgtggtgttattgatgttctagtgaagggatcgatctttggttgcaaaccaaacaagctttttcttcttctgttgattcacattcacaaattgcttgaccatattgataatgatattatgatgtattactaattggttcaaacttttttctaattttatatgtgcagacccatggaatcctgaatgctgttagctggggtcttctacttcccatgggagccatatttgctagatatctcaagacattcaaatccgccgatcccgcgtggttctaccttcatgtagcttgccagctgattggttatggtgtgggagtttctggctgggccactggcattcatctaggtaacctgtctaagggaatcacctattcgcttcacagaaacatcgggatcacagtatttgcgcttggtaccctacaggtatgttctattgcacacattgttatgacctctttatctgccaatatttcaagcccattttgtgcaattgtacgatcatactgattgttctatgtgcactctttcttgaagatctttgcgcttttcctgaggcccaagaaggatcacaaataccgtatctactggaacgcctaccaccactcggtcggttacaccatcatcatactcggcatcgtcaacatcttcaaagggatgtccatcttgaacgtggagcagaagtggaagacgggctacatcatcacgatcagcatcctgggtggcattgccgtgatcctggaagctgttacatggagcatcgtcttgaagaggaggaaggaggagaacaagtcctataacggcgcttcaaacggtcacttgccactctctatgtaattcttgtagaggcaggagggacttgtgatccctacttatatattcaggaggctatattcagttatgtttatgcttataggattaggccttgtgatcttggtatctcttcttttgtatgatatttgtatactgcacactatactggagatgagagatgccagtacagcttgtttgattttttgttctgtttgtgaattgctgagttgaacatccactttgtatgattttggtgccattacaaatgttccttttggaaaagttgggcaaaggtgtcccaagtggttggtgaattggagaagaaagatgcaagaaaatgcttgctagtggaagcatgatctctctagaaagtttgatgctcgtagcagcctagcagaaaggaaagggtactgaatactccatttgctgctatgtttttgtgttgttcaagaaactgaagggagtgtggtgatgtcagatttcactttgtttcagtagcaaggaaacaaaatgtttggctattgtttcttcaattattagcttcattcagaagagtggcatgtgtccaaaacatgcaaatagaatccatctaaaataactgtgaacatgcaaacaactgaataattgacatatcatggcagttttaagtttgatgtaatagcaatttgtctgctttccatgcagacaactttattcaagattttgtgccaactggtccatgcattagagtgactccattgaaagaatagtacaccctccgttttttttatatagacggcgcgttcacttttaaacatatgtttcactaatcattttattcaaattttagtttacaaaatgtaaaaaattaagtaatgcttaaagtaccttttatgataaaccaaatcacaacaaaacaaatgataattacttttttttataagacggatgatcaaacgccaaaagtctacaacgttatctattaaaaccagaggaagggagtagtagttagagtggagtgtgtggttcaatcagactcagctaggagtcctgagcagaaaaagggtttgtggcgcgtgatttagtgcaggtcagttcacaactttcttgcttgcaaataggagaaaaaagatgctagatgttgtggcaaaccagggaaaaagttcagaaagcaacgaccttggcgagatctgtgacatcagagatgcccctagctagctgattgcacagatcgccagcaaacaacctcatgtcatgtgaatcccctgcgagtgttcgagtgatcatgctatctggcactaatcaactaaaccaaacgttaaacccttgttgcaatgatgctaatctgctattatcaggtgttaaaaaaaatgcatttttgactgcaacatttggcgaactctgatgcacctcgtttatttaagtgtaaagatgttgaatcattgactccacaactactacaagttagatataaagatgatgaatcattgactctctacaagtaagagataagtagattattagtagtgctcaagacgtgcagacattgttccagaatcctcactttccagatggtctctgaactcactggtaaacacctaccaactcaaaaaattaattatagtagacgacttcaccaaaactgtccaaaagggtttccagcagtagtggatccacaacataaatgcctgatcatttgtgagtgacacaccttctaagtgaacttggccaaactcaactactcctgcattttctgaactattagtattaagctgcagcaaaatcaggtagaaaaccaaattatgaccaaatctctgcatcactgaacttagatgacgaattgacaatgcagtccatatgatttgacctagcctaactcattgatttttgtcatctctgaatctaaacgtcatgtagctctcaactcaaacccttttcaattttctaatcgttagtcatgttcaaaccagaattccatcagattgtcaaagctaccaaacagtttggttgtgttgagtatgacccatcatcactcagtagggttcatgcaaagtcagttttgcttgagcttggctcaaacttccatcttagctcaaccagaactttttgggtggtctccttcagttgagtaggtagaactgcatccatctctggaacaagttgcaggtcagaaggagagttgagctgtattaggcctgaaaaaatgttcagaagtgactagcaagcatcaaaagcgactcatggattagaaaagcttttgctgctttatggaaggaagcaattcttgttgagctatagtagaacagtgcaatgtgtgcagtaggagcaaagcatcaactaactccaaacatcttattctcaacagcagacagcttggatggtgctatcaagttcccagcaatcctgcaaagctggtatttgttgaactgcctgaatattagtttctggaagaaaaaaaaaaggggaagatatgtgcctgtttggatgctttcagacagattggaatcttgttaacaaaggacatagcccacacaaattgcatgtaccatttgctgtaaaacaaagtaaaagaagattcgcaataattcattgaagtaaaattatagtgttgatcggtcacaactcacaacaacttctgaaaggaaaagactcgaagtaactttctttgtattcaacctgtaaagaatattttgtatcaccatgtgtcctctataaaaagaagaggaaaaaaaaaaactacatgagatatcttgtaactatgcacacatttcctttctgatgttactcaacgaatggtgagaagtcagtggtgaatatctacagaattaacagtgggacaccttaattctccctttggtaagtaacgtaagactcaactcctatacagaactgctacaccaaacagacaaaaacacacagacacactcatttttacatgtttcacaaggggcacaaatcatgcacctctgagctgccgaatggcttaaagtcagaacgttgcaaataattcaacggattcttctttgaacttcttgtagatgcttcacccgatagaacatcaacggatggggttgtgatagacggtggattgatgggcggggatgcagaaatcgttgagcagcaatgcctgacattgatcctgtgtgtaatggtttcagttgaggtgctacctgttacattgaccaaaagaacggcctccttatctctggtgacttcgcaccaacagttctgcagtactccattgacaaatacttcttgggtgtaatagtcttcatggtgcacggtaacttccattgtttgcccaggttcaatgagaccaactgatggttcaacctgtaaaacatagcacgatgaatgattaaattaccaaatattggtactgtgaaaagcaaaatggaacatgcaaagcactgaaaaatataataaactagtataacactcaagtcaaaaggcttgttatgaatggttagtggtagcagctgttcttgtctgttgactgtcatgacaaactggtcagtcagcaactccactgagatccatatccagtttaggcttatatggatgggttaaatggcagcccatccacgtgtatgggatgggttgggaatttgagctaaaatcctagcccatagatgtggataggccaggatttgggttcatgcaaatgaggcattaggatttttggctgaaacacatttatgaactgagcactgacagatatgatcatatgatgttgtctatcaactcatgcaaagtttggtatgattttgaccaaatatatgtccacaaagagtatcctaaatgaccactagaagacaatacatgcaaccaaacctgagcccacctccatgactgtctaggtacaaggtgatcgaaattgtgtttcatctcatttgcttttgcaatttttttccttcagtttgctttctcataattaaaagaaagtctgatatagttctcacaaagaggttggagtgcagctgatacagaaagtgcatgtcatagaagtaaaatactccatcccttctcttttacattatgtgaggggagtatataggttccatggttgtccaaaattcatattctagaatgacaagatatcttctatatttatgagctaaattttattttaggtcttgcaaactgaatacataatggacagactttctatggttttgaacttaacaggctttctatatacaagcaaaagaatggtcaacactacagatagaaatagaacactcaactgagagtgtaacactatgggttttcttttttcttaataagggaaaaacacaatgggttttaagactaaacaaaagaaaaaaatgaatgcaggaataaacaaataaacatattaatgcatacctcaagccaaagcggcaacccaaaggatgcccttggaggaaactcggatttagttccatcctgcttgctgattgactggctttcacacaggatttcaaaagcagccttgtttctttgacaatcatttgttatccggaggacaacatgttcttggttttccaaaattatattgtttgtgctgattatagtgtctggaacaaaatgggactctcgaagcaaactgtgtaatcttttgtcagattggagtatttttccatattcctgtcttcttgtaaactcatccactcttgcaatatcaacactaaatgcacacctcactggtttatgatcactatctgtgacacccatgcaagcttcatacctaccagaagagcaataaaacatcaaattatgtatgagggagtgattatgatcaagacaaaacaacatgtgtgtcttagattctccttctcaaaacgagtggtaactggtaagttgtagaatcttacgatgtaattttagcaacaacagggcattctaatgagcactctgctgttaatacatcacggctatctcgatacagtattctgtcgcaccaagcaggtattctcttcttctcacccgagtcatatcctaattatttttggtgtggaaaaattagctccaaagcagttgcgtcaatttaatcagcacataaaagaacatttgaatcttgtgacagaactggaactatttaattaaggaggtgccgctagcatcaaaagtaaaaacaggccatacctgcaagacctggtaggtgtctttggaatttgtaagtcggaggaaatctgatcaaaccttcacgcattccttggaaaacctttcctgccctcatttctgcttgaagttgatccctttctttaagccagtcaaagctcctttgagagaccatgtcccttgcttcatcataggtgataccgtaaagtcggtagttgaaatcaccaagaaagacaaccatatcagcttctgccatctcaggtatatcttcatcgacctgatttccattggcctgccattatgacaatagctataaataagtattctttatttccacggaaaaatctgcaatgcagttcagcgattacatacattcacggttttatgcaattgaacagatgtagcagaagctgtagaggaaaccaaaaaaaaaagatgttatagaattcatttacaacaaactagtatttaaatatacttataagatgaaagttgagaatgaagtacctgcagatccatgaggtttgttaaaagtcatcgttcgatagatatgatcaaaatcagcattacgacggctaacattttctagatgtgcagcaaaatgattgttcacaaaacatatcctgcgatcatagactctaattcttaaccctacaccaccctgcaagaagaatgagatatcattattcaatgcaaaataggaaaaagaatagagcaatatattgctaactattaaaataattttcctctgaaaactgcagctgcacactttcacctctaaccattgcacgctcacaaattgtttctagttggatgaagtatgtgaagaaaaacatattttgagtatcccatgattatttatcacagcagtataatgttctttgcgtgaacgaaattcccagttggtatagtgcacatatgatacgctcaagaacaaacagttaataaacattttgacaatcatgtaccttgttgccaatagcacgcccaaagccacatggtactgcagcagcatcaacatcaccaacatgtggcttaaggtccttccttgcccttgaaattatcatgatgtacatgccatacatatcgtatgagaaaagtacaaaagtgcaaaaaaaatgataattatataataacagaaaaatgtttcactaagaaatggttttaagataaaccagtaccatgcagcaataagtaatccagccagctgccttgaaccaactcggtggaaggatatcccctcatcaagggtcctgccaatattgtctatccaccactgaccattggcactaccctcaagccctacctaaggccataaagcaagaaatgttgaataaaatgctcaaaactcacatagcaggcatgataccagtacaggaaatagcccagtgcagtctagatatgaaaatcagacagaaacaggaagaagggggagatgatgaccagataggaaattaaattaaattttccttccagttctcagtggtagctttattataccaataaaacaccacagcaaacaaactagcatgaaagcaaatgcattgacttcccaaacatacagctgcaataactgtaaaagacaactcttaacttcagtttcagtgttcatcatttttatactaacagaaatatacacagttctcctgtgccttctcacaaaaaaaaaactgtaaaaaggtaatctgcacctagagctctagaatgaacccttatgcttaggtatatgcagtatttgtttcaagcagctaaattagaatcatatgagctccagatagagataagaaggataaaaattaaaatgtaacatagtacaaccattttatcagaaagacaagcacaccacttgtgtttttcaaaagacagtagcgcagatacagtcatattatcagaaataatacaaattaagctgtaatgcagaaataatcttattgtgctcactagtaacctattttcctatctcaataatagtttctttttccttgattgaaccgagcaagaaaacaatgaaacaacgaaatcaaaggtagggttgagtatttcatatcttacactttctttggctgcagccatggcaagaacaccagcacccatctcgacctcttgtagaccaaccaccaccaagtcaacatcaaaaaatgcacgacccaaccatgacatgagtgattcataagatgctttctcctggccaacattccaagtcccaacaagcattttaatgttcactagccttctatacgacaactccctgtttgacaattcagttcgcagaatatcatccagagggccaggggaagctagaggccatcctctaattccaccatgatgagcaagagtaaagacataagaaccaccaatcgccatctgtatgaccggacagctatgcccagtccattctgccagaaggttaccttccacatccatgacttgaataatgccactggcatagcccacccacaccctttctccaagtgccttcatgcactgaacagaagaacaatgatgctggaattcttgcagtcggttcccatttccatcccacataatgatcaaaccatctgtgcaacctgaccaaaccgttccattcattgcctgaaccactgcttctgttcggcgattatcttcaacaaatgtcccttttgtagcaactctgcgtactgcaccagctgctcccatcagggcattccttgatttctggaaaaaattgaaagagctttgtggtttatccttcttcacgggttttgctttgatttcttcctctataaattgctctggcatcacaggtgcctctaaccgagctgactcaatttggccgtccatgccaaacacttttagcagttccctggtccgagcatccctacaggaaaaatatcagaaaaaatagttcctaacttttcaatgggccgatgaactcaaggataatgcaatttatttatgaaagcataccaaacagcaaatgccatgctagttaaacaccaaacttttgcccgggaatggtcagcaagcatgtgtttcacatcagcagcggggaacgaagatatgttgccagctgctgcattgttcctaaggtcaatatatgacctttcaatccgtaaagcagccacatgtttttcttctggcattagtgagagggacttagcaatgacgtcccagggccatgcctttataacacccccttcggatcctgaccatatttcacctgtttccaagatattgaaatgaaataaatcatttttgcaaaacgttctacctcttttagtggacattgtgaagtttaaatcttgtatggagcagaagagatgccttaatgtcatataactacgaatgaatgattcagccattgacagcgatccaatgcaacaaataaagctgaaaattaagtttcaaaaggaacaacaataaagcatcttccaagtaggcttttcacatagtagacaactaaaacacaagtgaactttaagacttcaattattaacagacagtttcttaatatttcaagaataacaaggatttatttgtattattcgataaagttctctatggtatgagtgttcatttcgtaggctaatcctattgtttgtggatgttttttaggttacttttaccttcccaaacttctccacatttatgcaaagagaaaaacgcgcccaagtgattacatccatgcaaacgcatctaaaaaagataacggaagcctaccatttgagaaaacttctaacactaatactcccatatatggatgtcatgtcatacagaacagaaaaaaaaaaactagttcaactttcagattttccatttgcaagatgtcaatattactggaccccaccccccaaaagtgtttttcctaatttatttgtaatagactaaagttgttgctaaagccctgttattttcagacgcttaaaatcagctaaaatgaaacatttcatcagctaaaatcattcttcgtgctcttttacccaataatgctattgcctcactatgcacggagccaatttttatccatcccttgcgtaatttgctcaatgaaaaatagaattgattgagatgatcaaagtaagtaatcaagcttctcaccataagacgtgatgaccatggagagcactggcgtgcggctgtgtgcctgccacgtcagggccttcctgaacaacggcgcgtcatcgtcgtcgctgccggcggcgaggtccattcgccacgacatgatcctcccatccttgtggcccgtccacaccagcgcgttcgaggcgtccgcctcgacgcagagcacgggcggcacgggcacggactccctgaagggcgcgctctcctcgtcgccgcggcgcgccccgcacccggcggcggcgaacacgtcgtcgagcccccacacgcggaccccggactcggagcccgcccagagctgccggcgccgcggctcgcacgccagcgcccgcaggaaggaccccacctgcgtctcccgcagcgggtggggccgcacctcgagcggcggcgggcggcccgggtgcatcgcggcgcgcagcggcacccggtagatcccctcgccccctccctcaccaacaaactccggcaacgccccgccccccgaaacaacccgctccggctcctccaccaccgccaccgcggcgccaacctcgcggcagcagcgctcgaggcgcgcgtcgcacgaggcggaggcgacggggccgtcgtcggtgctacgcgcgtacggcgacgacgacgacgacgacgcgctcttcctcagcgtctcccgcgcccgcgccgccatggccgcagccgccgcctcgtcgtccgagtccatcctaaatccgagctcgtttggatggaagggaagagggtgacctgtcgcggaggcggcgcgccgtggagggaagggaaggggaggcgagctcgtcgtcgtcgtcgtcgatggcgatggcgagaggcggaggagaggggaggtggggtttaaatgggtggatgcgtcgtggaccgggaccacggaggcagtgtgaaccgcacagctgctgctcctcgcccgccgcgatgtcggaaatggcagctgagctcaggccggctggttttttggttgctgctctgaaagcaacggggtttccctttccaaatggaggccgattttgctgcgatttttgtttttccttctctgaagattctgtgacaggtcaatgtaggccttgtttagttgatgaaaaattttggatttatttatcacataaacacatagtctaataacaaaacaaattacagatttcgccagaaaactgtaaatttattaagcctaattaaactataattagcatatatttactgtagcaccatattgtcaaatcatggcgcaattaggcttaaaagattcgtctcgcaatttacacgtaaaccgtataattgattttttattttgtccacatttaatactccatgcatgtgttcaaacatttgatgtgatgggtgaaaggtttttattttgggaactaaacaagaccgtattttggaaccgagttagtgacaaatggtattatactacatctgcctcattttaggtgtaaccatgggtttccacgctcaactttgatcttagtatttttgttgctatgagttgatacaatatgaatagtactttactcataacttatgtttttaaattttttaaaaaaatttcaaataagatagacgatcaaagttagacgtgaaaaaccatggttatacttgaaatgggacggaaggagtacttgtatactcgagtactcactcggttttttaatatacaacacagttgacttttaaatatatgtttgaacattcatctaattctaaaattttatgtaaatgtataagatataaatcatgcttaaagtaaattgagtgataaaacagaggtattatttggtagtactgatttgatatagggtcttatcgtttgcactatggtttataagccgttgttgaaatttaaattttaaaatttgtgtttgaagttgatcttgatgttcttttaatatagtttttttgcatttgtttttaagtcgctaagcactcatatatatttaagttatatataaattatgttacaactaattatagtacaattacatttgaaagttttttaataatcatgtgacggttttttggagactaccaaataaataagcataagtagttgtctgtatctctcagcaccaacacctgtgatcaagcaagtcaaaccatgatacttaaactcaatttactttaagacaatgacatg

SEQ ID NO: 4399 - DNA, 35734 bp, Oryza sativa
  unsure (1)..(35734): unsure at all n locations
ccgaccccctatggtgttggcgccacgtgtgtgggttaggtgagcacagcggcgctcacctaaccgcacttattgcgggttggacgagcgcgccacgccgcatttaatgcaagcgcagcgcgctcgcttatccggtccgtgaccggtcgcagtatgtgaccggtcacagaccggtcagatcgcgggttaggtggcaacaggcggcctgacactcgtctcgccccgtcccgtcggaatgatgagagcctccaggcactcgtccctagccggagccggcgtggtaactcctggagttggcacgtcagtcccggccagattcatgccaggcttcatcgcaaccattgcaaggaagtcattgtatgaagaaggacagatgtgcggcatgctaaactgacgcgtggtggacaagaatgaccggtctgtgactggtctgacgccggtcacgtcatcggcagacaaaccgtgctcccatgttgtatttgcttccagcgaagtggaggtaggtatgacccatcccatcggagggtcattcggagcagccattgtaaatcctcacccaaaagaaggggaggtagaagtggtgcatgtggtatccccttgagatataaaaggaggaccttacccaccgaagaaagggatccgggatccgggatccgggaggaggagaacttagagaatacctgagctgatagaggagagaaagagaaagaggggttctagagcctgtactctcttgctttccagttctctgtaaccccttcacacacagatccaccagaacacaggagtagggtattacgcttctcagcggcccgaacctgtctacatcgcccgtgtctcgtgcattttctctctcgcgtacattccacagatcgagggtgaagaacctcacttagcgcccccggccgaaccggcaaaggggggcctgcgcggtctcccggtgaggagccccacgctccgtcatctggcgcgccaggtagggggcgcgtgtgtctttctaagccctcgtcctctttcgtgtgccccaagcttctcctgttcagcccaatggccgaacgggcagtggcacacaacctctctccgagcactagcggtgacgacggggagcaaaacccgcgccgtcgagctcgtactccaccgcccccctctcgctgaagtcttgggctggaggaggcgctcgagggggtcgaaagatccgcgacttcgccacctacgggcgatggagaaggacggctagacggggagcgtcgcctcctcgtctacggcgatggcagcacgccccagggcgcgctccaggctgcgggcgcgctcctgcgtcacccgcccgtcgtccccgatccagagactccagcccgacgttggctggatgacgtggccgacttggtcatgacggcgcagcagcgcctagacgccggcgggcggtcctccgccaccaaggcctctggcgctgctaccgccggctccgtgtcgtcgaggcggagggcgcggcgagcggcggccgtcaactgccgtttgtccgccattccctcgtcaacgcctccgacccaagaagatgtgcgtggggggctggatgcccgcctcaatatcgagcgccggcgcaatggtcgtcgtgctgcccatgcaacggagggcgcttcctcgtccggagcgccacttcggcccgggcacgggggccacccccccgtgtccccggttggcggtgtcggctgtcgagcctttgtggcgagtcttcggaacatccgttggcccccaaggttccggcctaccatcaccgaaaaatacgacgggagcgtcaaccccgccatgtttctccaggtctacacgaccgggatcgaggccgccgggggtgacgacagggtcatggcgaatttcttccccatggccctgaaaggtcaggcgcggggttggctaatgaacttgccacccgcgtcggtccactcttgggaggatttgtgccagcagttcactatgaacttccagggcacatatccacgcccgggtgaagaagccgacttgcatgcggtacagcgaagggacgatgagtctcttcgctcgtacattcagcggttctgtcaagtccgcaacaccataccatgcatcctcgcacacacggtgatctacgcgttcagggggggtgtgcggcataaccgcatgctcgagaagattgcctccaaggagccccagaccaccgcggagctttttcagctcgcggaccgtgtggctcgcaaggaggaggcctggacctggaactcctccggttccggtgtggcagctccggccgcccccggatccgccgctcggtcagggcgacgggacaggaggaggaagaagaggtcggcccattccgacgacgagggtcacgtcctcgccgttgagggcgcttcgcgggccacccgaaaggggaggcctgcgagcgacaaaaagaaggaggccggcgctcccagcagggagcgcccgaccggcaagtggtgttccgtgcacaacacctccctccatgacctcgcggattgccgcgcggtcaaaagtttggctgagcggacgaggaagtgggaggaggagaggaggcaggagcgccgtgagggcaaggccccggcggctcccgccggcaaccggcgaggtgaggccaagcagaaggccaccgccgaggacgtcgacgatggtgacgatgacctggggttccaggagcctagggccaccgtcgccaccgtcgatgggggagcgtgcgctcacgcttctcgccggagcctcaaggccttgaagcgagagcttctggccgcggcccccacccatgaggcgacgtggcgggcgcgatggtcggaggtggccctcaccttcgaccagaccgaccacccgccgtgcgttgcccggggaggacagatcgcgatggtggtttcccccaccgtttccaatgtgaagttggggcgtgtcctcatagatgggggtgcagccctcaacatcctttcccctgcagcctttgacgccatcaaggccccggggatggtgctccggccatcccagccgatcatcggtgtgacgccggggcacacttggccgctgggtcatatcgaccttccggtcactttcggtggttccgccaacttctgcacggagcgggtgaacttcgatgtggcggacctcagtctgccctacaacgtggtcctggggaggcccgcgttggtgaagttcatggcggcggtccactacgcctatcttcagatgaagatgccgggccccggtggccccatcaccgtccatggcgacctcaaagtcgcgcttgcttgtatggagcagcgcgcggaccacctcgccgcagcgtccaagcccgcgggtggcgacgagaggctcagcccctccgtcccagccaccccgaggcagcggatgatcacatgcgacgaggtcccggtcaaggaggttgccttaggcgacggcccgtccaagaccacacgaatcagtggtcttctggacgacaaataggaagacgcgctcgtctctttcctgtgggcaaacgcagacgtcttcgcctggagaccggcggacatgcccggggtccccagggaggtgattgagcaccgtctcgccgtgcggccgggcgcaaggccggtccggcagaaagtgcggcggcaggccccggaacgacaagccttcatccgcgaggaggtggcgcgacttctggaggccggattcatccgcgaggtcatccatccggagtggctggcgaacccggtcgtcgtccccaaggcgaacggcaagcttcggatgtgcatcgactacaccgacctcaacaagtcatgtcctaaggacccttaccccctgccacgcatagatcagattgtcgactccaccgcggggtgcgaccttttgtgttttctagatgcatactctggttatcatcagattcgcatggctagggaggatgaggaaaaaactgcattcattacccccataggaacttattgttatacgacaatgcctttcgggttaaagaatgcaggtcctacttttcaacgtactactcgaatttctttgggtagccagttaggacgcaatgttgaggcctatgttgatgacttggttgtgaagacgcacaaccaagagaccttactctcagacctagcggaaactttcgaaagtctccgctccgcccgcataaagttgaaccccgataagtgcgtgttcggtgtgcccgcgggcaagcttctcgggttcttggtctctgcccgaggcatcgaggccaaccccgagaagatacgagctatagagcggatgcgcccccccagtaagcttagggatgtgcagtgcatcaccggctgcatggccgccctaagtcggttcatatcgaggctgggagagaaggcgctacccctatttaagctcctcaaatgctccgggccgtttacctggacggaggaggctgagcgggccctcactcagttgaaggcgtacctcagttctcccccggtcctagtcgccccgaagccagatgagccgttgctactttacctggcggcaaccccgcaggtggtcagcgcggcgttggtcgtggagcgcgacgaggacaaccctcactccgcgcatccccaccctgtgtcgactcgacccgggagagagcagggaggagaggcccccgagccgaacggcggcccgaggcccccgacggccggagctggccctccgcccgcttgtccaacggtaccaggcgcccccgacccccaggaaggccccggggccactgcgggaaggccgcgcctgtcgccctctgaccccgaggtcatcggcacagaagccgagtgcgccccgcgtggcctctcgggcgaagagcgccctcgagatgcggcccctagcgacgaggatcggccccgccgaaaggtgcagcggcccgtctacttcgttagcgaggccctccaggacgccaagacccgataccctcaggcccagaagatgctttacgctattttgatggcttcgaggaagttgcgccattatttccaggcgcatcgggtcacggtggttacgtcttacccctcggccaaatcttgcataaccgagaaggtactggacgagtggtgaaatgagcaatcgaactctctgagttcgatttgcactttgaaccacgccacacgatcaagagccaggccctcgccgactttgtggcagagtggaccccagctcccgagcccgtctccgtccccgaggctagctctggccccgcacagctgcctcacaccacctactgggtgatgcagttcgacggctccctgtctcttcagggcgccggtgcgggggtcacgttgacctcgccgagcggagacgtcctcagatacctggttcgcctcgactttcgggcaaccaataatatggcggagtacgagggactccttgcaggactcagggtggcagctggactggggatccgccgcctcctggtgttaggcgactcccagctggtcgttaaccaggtctgtaaggagtaccggtgctctgacccgcagatggatgcttacgtgcgccaggtgcggcgtatggagcgccatttcgacgggatagagcttcggcacgtgcccagacgggataacgcggtcgccgacgaactctcaaggctcgcttcctcgcgagcccagaccccaccgggcgcctttgaagaaaggcttgcccagccatcggcgcgacccgaccccctaggggagacggacgcgcctgaacggcccccgaggcccgtcggagtccaggcctcgggacccgaggggagcgctcccagctcccttagattgattgcttggatcgctgagatccaggcgtacctcgcagataagactctacccgaggaccgcgaagggagtgaacgcgtccagcgcatctccaagcgctacgtgctggtggaagggaccctctatcggcgcgcggctaacggagtcctcctgaagtgctttcctcggaaacaaggcgtcgagcttctcgccgatatccatgaaggcgagtgcggagcccattccgcctcacgcaccttggttggcaaggcctttcgccagggtttctattggtcgacggctctcaatgatgcggtcgacctggtccggcgatgcagggcgtgccagttccacgccaggcaaacccatcagccggcctaggccctgcagaccatacctctttcgtggccgtttgctgtctgggggctcgatatcctgggtccgtttaggcgggccccgggcgggttcgagtatctgtatgtcgctatcgacaagttcactaagtggcccgaggcttatccggtcatcaagatcgataagcactccgcgctttgtcgcgaccgggaaaattgccttttcccgaacgctagtgtattaatccccgtcccaggaaaagccggggtacaccatacaaacatgatataaaagacacatctttattatatcgataatatttacattattacaaaggcacttaaggcctgacaatcaaaataaacagcagcggactagcgggcctacggctccatcttcacaggcgctcaactggggtataagccaggactccacctaagacatcttctccaaagcttctcttactgaagaggggaaagattgagcaagaatgagtacaaccacagtactcagcaagccacaccggagatgcataattaatgtaagggagtacaaggggataataatataggggttaagttttgcagaaatccgcatttaaaagtcacttagttgcccaaagccattttataaggacgatcctagagctacacaatattattaatcaaggccgtgaaccctcacgaacctgccttaacccaaggcctacgatgattcagaccgaactggcaacccgaccctgggtcccagctcgtcccaagccaacccaggccaaccattcgacattttagttattgagcaaattttaagaattaaaacactaacttgggtacattgctcggcttgcccataaccgagggcgcggctattcgaatagattatactctgatcagaggtgtacatctttacccacaagacacatcttcctcacgtgtaaccacgtgccacataccaccacggtatacggacggaagacgtgacatagtttccaacccatcctagccatagacaagagtaccgacccaaccccacctacggccggaacctccgggacaggtaggcaggattgagcccctagcagcaggacaccagccctgtgccatgacatctcgactaccgggccgcagctcgtgtagccttcatttgtcctagagatgtccatcgacccccgacttcgtccatctccatccgtgtacttttgtttataaccagactgagccacaaactaagccttacccactagacatgtggaagtacggtagtgctttgcaacagaggcccgagcttaatccttatagtacccgaggtacgactagcaaaacccaaccacgcacctcgagcccagcctaaaaccattttgggggttttgaatagagggggaggtgtgtgtccaattccacaataatccaacaattccctactgtccaaatgatatgagatttcccaaagtctaaagttataaaaccacctaatgttgcctaattaaccagcgaagcttctacctaagttcatactagtggaaccataaatagagtacccactagttggggttttattttcctggggtgaacaaggtaataataacaatagcaataataatgtcttaacaatgataaataggcatggctaaataaaacagtgataacgcgggaatttagataaagcggtaatgcattaatttaaatcaaaataattttataaactgggattcaatatgctcaaggatgatgtgacttgccttgctcgctttcccaaacttcggcttcaacttccacgaagagcggatcttccgaagctgcagcgtctacacgaccaacggaaaagaaaaggcttttactctaataaactccatataacaagcagaaacaaagcacaaaaatgggttcttgacttcttaaggaaaaattagagacttgaacggtccaattccgagctcaaatggccaagttatggccatttgaagtttatatgctctttaaatggatatttgcgaatttcttcatttaaattttaatttaaaatcggatttattgcgtcagccgaggggaggggcgcgcggaccgggtccacgggagtggggcccacgcggcagcctctcggtccacggtggaccgggtgcacgcggcttacgccggccggcgccgtgggtcccacgcgtcagccgcacccgagggcgcgggcggctgacggccgggccccacatggcagccgcggggcgcgcccgaaggcggcctcgccggcacagccgacgggaggcgacgcgcccgcgccccgatggtcgccgctggcgaccaccggcgcgacggagcggcgcccgagagaggggagggaagggggaagcgaaatgggcggtccacggctcaccccgggtcaacggcgacgacggaaacggcgaccgaagcggagagaggcggcggcgcggttcgggtcgacgaggacggcggcgttccggcggtcggcgggcgaaacgaaggggtggacgaggtcggcgaggacgcggcgaagccgaaggaggcgatgccgaagcgggaggaggtccgaggcgacgacggcggcggaccgaagctcggcggcgacggcggagagagaggacgacggcgcgagctcgattccgacggggagagagagcggcgagcggcggaaacggaggagggaggcacggggagcgtttatatagtgttgggagggggagagagcgaccggatgagggggaatcggccgcggaagatccggccgccattgatgcgccggcgaagtttgcgggagggtttccgaacgaatccgagggagagagagagggaaaagtggggggaaagggagagggaatcacggggagtgatttccccctctttattgcacgcggggacggcgggatgcggcggaatccgcggcggcggcggcgctagggcacggacgaggcggcgggtgcggcgcgaggacagggatgacaggtgggccccacccatcagcgagggtggcgggcgggcccgcccgtcagcggtgcgcgcgaggggagaggccggatgggccgcgggggagaggagggagagggagagagatgggccgagccggcccaagagggggagggaggggggaaaaagactttttagtgtttttctttttataaaattattttaactttgtttatttcttaataattattatttgtgctctgaaaattccactaaaatttgagggctcctttttgaccaaggagaatttaacaaaaattctccgggccacatttgaatttttcttgcacgtattttaatgtttgccaatttcttttcgaattttaattaattctattattccttttagagaatgatttttatttcgggatgaatttatcaggacgtgacacgcttaaattgatcaggggcatcactgctccgtttggggtgcctaaccgtatcattacggataacggcacccagttcactagtgaactcttcggtgactactgcgaagacatgggcatcaagctctgcttcacctcccccgcccaccccagaagcaatggccaagtggagcgcgccaacgcggaaatcctcaagggcctcaaaaccaagaccttcaacatcctcaagaagcacggcgactcgtggatcgaggagctgccagcggtgctctgggcgaaccgaaccacgccaagccgagcaaccggggaaacgcctttcttcctcgtctacggcgcggaggcggtcctcccatctgagctcaccctaaggtcccctcgggccaccatgtattgcgagactgatcaagatcagcttcgcagagacgacctcgactacttggaggagcgaaggcggcgcgcggccctccgagccgcgcgctaccagcagagcctgcggcgctaccatcagcgccacgtccgggcccgatcactctgcatcgacgacctcgtcctacgccgcgtccaaacgcgtgctggactgagcaagctctcaccaatgtgggagggtccgtatcgagtgatcggcgtcccccggccgggctccgttcggctggccacgggcgacggcacagagctgcctaacccgtggaacatcgaacaccttcgacgcttctacccctagtcggagtcgggtgtcaggtctcgggctcgggccaaccccgcactcccccggacgtgcagggttggccgggggctaccacatgcatatatacttaccttttttctcttccatatttcaataaaagcattttcgatttcctaaggaatgtgtctgtgccattgtttccttttgaagaatcttggcttgaattagcacgctcgtgctcgatcctgccctcggtggcccgggccggctaaaatcgccaaaaggggcccagaaccgagccgtgccccggggcgtggtgaactccgggggggaatcggcaaaggcccacaatcgggtcacccataaccctcggtcaccacgttcccggcctggccagtctcgacacgtggatcttcccaggcactagccccgacccgcgccatttgaggctgggacctgggcacgagcccttgttcaagccaagatgcagaaggaccgcggcacagaccatcctcgtctcatacacgcaacaaatagaattgacacagaaatttcatctttatttgattgcagattaaattagtctatacaagaagggagcccgaaggcctcagaagaaaaaggaaaaagctattaagattggcgggggccctaggggctcacttcgacgcacccgggtcgccagcctcgtcgtcgctgtcatccgcaccaccgtcaccgccctcctcgtcggagtcgagggcgaacgcgagccgaggggccgtaccctcgaagctgtggacgatgtagtcggcggcgtcccggacctgcgcgcgcgcgccgtcctcggttccgggagggaactcgtccagcgctgcccacggggagaagtcggggtccctggcctggtagcttgccagtacgagctccactgccccccgggcgaggtctctcgaggatgacttgatcgtcttctcgagctcctcgaggagccgctggagggtcccagccatctctgagaggcgctgggcgaggcccccctggttggcggcgtacttcgcggtccgctcgccccagaggcccgcctgccccccggcgtggtctaaacgggagacggcgtcccgaagcatgccgggccctacctcgcccgccaagcggagggcctcgacctccccggcggacgagtccagcgcgccctgcagctcggcgatggtgtgttcggcagctgcgaggcgggcggctaagtcgctgtcgcccgcggccgccccaccgctgcgcgctctcgcgtccagctccttagcccgcgcctcgagctcagcggcccgccgagccagtgcggccctctcggcgcgggcgccttccagattgcggcgcgcctgctcctcctgcgctgcctcgcggaagaacaggttgtccgccagccgctgcgccgcggcctcggcctcctcgagagctcgctcccgctcggtgagcgtatcctcgcagaggcagagtgcggactcctcttcggcgcaggcggcctcgtgcgccgccagtgtggcctcccagatggcgagggcggcctcgcggtccgccaggtccctctcctttgcgcgggcacgctcttccagcgccgtggagcgagcttcaagggcctcttcgcgccgccgggacgccgcctcgttctccgccgcccgccgttcccgggcagcggcggcgtcaaggactccccgggcggcgtcgagcttcttctctagctccaccgcccggctcccgtattggagacggaggtcgtcccgcacctcgtcgagcacggcggtggcgatgagggcagtctcccgctcctcctccacctccctggcgatctccgccagctccctccgacgggcctcgagctctgaggcgtgccggcggtgtgccttgcggcccgcctccaccatggcctccaccgagcgtcgcccctcttcgacgcgtgcccacgccgcgtcgagctccacccgctccgcctgcaggacctccatctgggcgcttaacccgtccaacaccgtggtgttcgcggcggctaaggcctgcaggaggggctccgcgctcggtagggcagcagaaggcagaggagagagccgcctcggtgtgggcgccgcgcggctcggcccgccgatcgacgtgccggactcgggggcgtcccccgaagttggctcgttccgaacgtcgtccgaggggtcggacccgagcggtgcgcccgcggcctcgtcgtgggtggcctcggaagtcgccgtcgcctcgggcggagtcgggtcgggggattggcagaccgcctggtgtgcgcgtgccgcctccacctcccggacggactcctcggcccggcggagtctggcctcctcccgagcgacttcctcagcctggcgaaccgggacggcctcctgggcagcttcctcggcttcccggagacggtctgcggcttctcgccggtcagcttcccgcctccgggcctccgcggtcgccgcctcctcggcctcagatcggccggacttggaatggcgaggggggcgcgacgggatctcgctgaagcagaagaaaaaccagaagacaaaaagaaacgggtaagtgaaaactcgccttgggagataggagaatgagtacggccgcggtgggcgcggggacgaacctgcggggaggtcggctaaacgaccaccttgggggtgagatgaggtttccccggcatgtttcggtctcccccatcttgcggagccgcttcttctttcgctccccctcgggccgcggcgtcggcacggcactctccgggcgcctgctgctggcacgcaccgccccgccccctcggggaggagatggggaaggggtaccctcctgcttcctcttcccccgggcgtcggcagggcggctgcccctcgggcccccgtcgcggggcccagaagcacgaccccctcccggggtagattgttcccccctgcggctcccacccgcgccatcgtggcctcgaggagcccgctcctccgacgccccgaccgcctgcatgatggtcaggatgttggcgcgatctggatcgctgcagagggggaggactccttgggggatgagggatgcctccacggagctgagattcaacacccgttggaccaccatcttgaagtcctcaggggcccagtcccatctgcccccctggtgggtcctcatgtaatcctcggacccggtgtactcccaggcgccccgggcacgccgctggagcggcgcgatccggcgacgaaggtagtcgccgtacaccatggcccctctgagcccctgggatcgcagacccgccaggcggtcaagaacgacgtcgtagccgtctcccagatctaccggcgcccgccagctggaggcctgcgccaggggctggctcggaagtcggaggcgcgcttcgtcggcgagggggtgtagaaccagtcgctcttccagtcgtcccacttcttgcggaggacgcagggaatgtagcggctcagcaccggcccccgcggctggaagtagcagccaccgactaccgacggcggcgacaccggctgtgcggtgaagaaccaccggaacagccgaagagatgggcgcaccccgataaacatctcgcacaggtgcgcgaagatggccaacatcattaccacgttgggggtgaggtgcgccatctggagattataaaactccataacatccatgaagaaagaagagaatggcgggaccagccctgccattgcgaaagagagaaagaagacggaccgccccgggtagtgtggcgccgggcgtccctcgcccagctcgaccacctcccggccggtggcagattccggcatgaatcggcgcagcagcccggcctgcctctcgctcacgatgcgagaaggcggcagcatgcttccgtcgagcagtgcggagccccgtgccatgacgccggcggaggaaaaagcttgagagcgagcgagagcggcaagggtagggcacaggaaatgaagagttagagcgcaagcggcgaaagcaaggggaatagtggcgagaggaaggaaacaaatctcttcctcggcgcctttatacccttgccaacgctatgcccggctcctcgtttcccgcgcccactatctcgccccctcgtttctcgcgcccacgcctccactaatcccactcgcccgtttgcggcgcacgaggcggatgtgcggccgtggcagtcgagatgggacagatcgagcacgcgttaactacactcgccgaccgaagcgccatcatcatgtctccaggcgaaacgaatcagcacgattcgcacgctgctcgactaatgtagcggtcgcgaagagaccgctcattattgtcagtcggttttcccttaccgatgcgcacgatttgcgatcgctggctttctgcccgccagtagagaccggccccacctgtcaccaaggagtggcgtcacgcccgagcgcttccctcgaggggggcgatcgccctggcataacgccgggggctactgtcggtgacatgggaccgggagtatcgtgactagaggcttgggcagccgcgctcacccacgtggcctgaccccctcgggggggtcgggcccgagggtgacgtggccacccctccctctgtctccccgaggggtcgggccgctcccgtctcagccccgagggctggggcgccccgaccccctatggtgttggcgccacgtgtgtgggttaggtgagcacagcggcgctcacctaaccgcacttattgcgggttggacgagcgcgccacgccgcatttaatacaagcgcagcgcgctcgcttatccggtccgtgaccggtcgcagtatgtgaccggtcacagaccggtcagatcgcgggttaggtggcaacaggcggcctgacactcgtctcgccccgtcccgtcggaatgatgagagcctccaggcactcgtccctagccggagccggcgtggtaactcctggagttggcacgtcagtcccggccagattcatgccaggcttcatcgcaaccattgcaaggaagtcattgtatgaagaaggacagatgtgcggcatgctaaactgacgcgtggtggacaagaatgaccggtctgtgactggtctgacgccggtcacgtcatcggcagacaaaccgtgctcccatgttgtatttgcttccggcgaagtggaggtaggtatgacccatcccatcggagggtcattcggagcagccattgtaaatcctcacccaaaagaaggggaggtagaagtggtgcatgtggtatccccttgagatataaaaggaggaccttacccaccgaagaaagggatccgggatccgggatccgggaggaggagaacttagagaatacctgagctgatagaggagagaaagagaaagaggggttctagagcctgtactctcttgctttccagttctctgtaaccccttcacacacagatccaccagaacacaggagtagggtattacgcttctcagcggcccgaacctgtctacatcgcccgtgtctcgtgcattttctctctcgcgtacattccacagatcgagggtgaagaacctcacttagcgcccccggccgaaccggcaaaggggggcctgcgcggtctcccggtgaggagccccatgctccgtcaccatgcaagtgtatcgagagagaagaggaatggcttaactcatgcacaattggtacgggctaatttcagtgaaatagacctagctagtgaataatcggaaaatattacagagaacggaaggtaatagtggggcttactatgcattccccgttcaccaaatatggaagatacgatgccaaaaataggagggacgacaagctatctttgacaggtttgaacgaagaacatggttccattttgccttgtaccgatttggtttgctacctgtagtgttgtgtgcttgttggtacaattttaagtgcgatggttcgatttatttcatacaccgatgatgccctaattagtagtgaggcataacaaatttaaactaaaatatacgaccttctggaccgtaaaatcgctcatattgtacacgacatgaacatactgtgccctggcctttgtgccactagcaaaaaaaaaaaagagaaatgaaatgagtcaaatgctaacgaaaaaaaaatcgaaaaagacgtacatgaagtacagaatgctagttcagatttagtgtgttaggcatcatttctgtatactttacataatgagctttttaacatatcatttgatgctgcttaattacaaccgatgcgcgcgctaatgtgggttgatttccgagttagttgatggcgacgctggcgaattcgtcgccgtcgatcgaggagtagaaggagtgctcgtcgttggcgtcctcctccttcccccccttgagctcctcgatgctctccaccgccgtcttgagctcccaccggctgtccacggcggcctcgcagcacgccatcccgatcttgatcagcttcaccatctcccccttgctctcctcgtcctcccacttcctgatcatgtccgcgtccaccaccttctccagccactccccctccggcgtcgacgccaccgctccgacgaggtcgccgttcgccgtcgccgcctccggctgcggcggcgggtcgtaggacggcggccggccggtgaggatctcgaggatgaggatgccgaggcaccagacgtcgctcttcttggaggagcggccgaactgcctccgctccggcgacttgaaggccaccatgagctgcgccgagtgcgactggttcatcaccgggaccagcgagtagtcggtgagcagcggttcgaagcggtcgttgaggaggatgttggacgacttgaggtggccgtgcggcaccgtcagcatcggcagctcgtcgtacaggtattggagcgctcgcgccacccccttcaccagcttcagcctcgccggccagtgcaccagcttcttcaccctccgaccctcacctacaaatccacacccccccccccccaaaagaaaattagcttcaatgatgaaaaattatagaaaagtaaatgaaacaacttaaaacaataatttacgagtcaaaacttttattatacctaagttatcatttgttggggttgaaaaataggtaaatttgatccatgccattacaaatttaccgtattaaaaatattattaatattctgaaacatgttgtgggggcattgaaattttctaaaactcgaatcatcctcatggcagaaaatttgacggcgatgccatggtttgaaaatttagaaaattctggtggcacgcaacaagttccacgaataataatgttatatttctaatacggtaaatttataatggcattgatccaatctaccaaaaaaaactaggataaaaggaatactccaaaacaaactttaaaaatcaagtttgaaacctggaactctgattgtggcttaaaattaaaatttaaacattaaatttgagtgtggattataataagccaacaaggaagctaataaaaagaaagaaatgtggtgtgtgtggattaccgtggaggaggtgagcaaggctcttgttggggacgtagtcgtggatgaggagcttctcctccttgcggtagtagtaggagatgagcgggaggaggttggggtgggagaggcggccgagccgccgcatgtgctcctcgaagtcctccttccccacgcggttcatctccttgaaccgcttcaccaccacggagtggccgccggtgagcgtagcgcggtagcacacgccgaggttggcggcgccgagcacctccgccgacgccttcagcaggtcctgcagctcgaagaacctccccctgtcgtcgtcccgcacgaacgtcagccgcccttgctcccccgccttcccgccgccgcccctcgccgtgctcccgctcacgctgctgcttcgcgcgccgcctcctccggtggtggcggctgcggcggtggcggcggcggcggcgtgcgtgggcttggttgctggtgacgcgggagctgatggcaatgtgggcttggttgaagctgcagggccgaagttctgggtgttgtactctcgccgcctctggagctcgaccaccgcgaagccgatgatggccagcgtgccgaggaacgcggcgaggacgccgaacgacgtcgatcccttggtgggcttcgtcgcgccctgcgtcccctcctcggctggcactgtgcccgttgtggttgtctcggcggcggccgtgggagacggcgaggtcccgatcttgccggatgtcgccgccggcggcgacgtcgttgccgctggggatggcgcctcgcatttcgcgtcgactggcgcgccgcagagcttcttgttgccctcgaacatctgtggatcgattgatttgaggctcgccgggatctccccatccagctcgttgttggagacgtcgaacaccttgagatccttctgggggaagtcggggatcttgcccgtgaacttgttgtcgttgagctggaggtcgaggagcctcggcacggcggcgagcgaggccgggatggcgccggtgaagccgttccgcgacagggacaccttcttgagccagcccatcccggcgaacgcgtcggcggggatctcgccggagaacttgttcccggacaggaagatggcgcggagcccgccgaggcccttcacgtcgggcatggcgccggcgaactcgttgtccatgaagctgagcgtgcggaggccggtgaggctcttgagcggggcgaggtcgagctcgccggacaggccctccttctccagctgcaggccgagcacgctgcccttgctgcacaccacgccggcccacgccgaggtgccgccatcgcaggggctcgtgccggcggcccaggtgtccagcgcgccgccgccgtccacgatgccggccttgagcttgagcagcgcgtcggcttcctccgccggcgccgccgccaggaggcgcgcggcgtcggcgaggaggcagaggcaggaggagacggctagcacgcgcaggaggcacggcgctccggccatgtccagcccgccggcgccagcgcctcgacgacggcggggcggggtggtgggggtggcgcacgtagctttctccggagaggaaaagtaggagagatcgcggggaagagagctgattcaggagagagctctcttccgcgcgcgcgcgcgttggagagagagagagagagagagagagagagagagagagagagagagagagagagagagagagagagagatggggcgtcgagctagctggccgcatggccatggccatggctgtggccgttgctgttgctgcctaactatagcaaattcaaccatctctctctctcagctacgactaacctggacttactacctcaattagcaaattcaacctgtcaatttcagaattgccacattactaatccaaccacatgatctgaatctttttttttacatttatacaccagaagttcagaatgatactccctccgttttagattataagtcgttttgactttggttaaaatcaaactaatttaaatttatagataaatatattaatatttacaacaccaaattagatcaattaaatgataatggaacatattttcataatatatttatcttggattaaaaatattattactttttctatacaaacttgatcaaatttgaaataatttgattttgaccgaagtcaaacgacctataatatgaaacggagggagtagacgattatatgtacatcgtccaattgctgaaacataccacactcataaacatttactgacacattgcataattgcgttcttgcaaactggtgaggaaattttaacaattaacacgagctaataattaattaagagaggactttgcttagaatccatagcacgagagtcatctcgaaggcgaagatggtgtggagcaatcccctgtccagcgtgaacccgaacagtgtgatcccgccgctgttgtggcacaggtacgtcactgcaacgacaaaaaatggcgcgagcgagtgaatttaaatctcagaaaaaaaatggcgcgagtgggggttcatctggtgttaccgagggcgtgtctgcttctgtaggcgcacgccgccgtcgtcgtcgtcccgagctccggttggtgcggcgcgtccacgtcgctggccgacgagctgggcgccgccggcaatggcgccgacttggcgtggtgcgccacggcctccatgctcatgtgccactggctcgcgatggacacgatcctttgcgctctgtgcgtgatcctcgccgcgccgaagaggcacatgaagaagccgctgagctgcaccgacgagccgacctgcgagacggcgagggtataagcatcgtgtcgtgattgctacgcctgcggcggcggcggagtggctgtgtggtgttaccaggaggtcgccggagttggcgaagctcttgccgtccttggaggagagggcgacgacgagggcgccgagctggctgacggtgatggtgacgaggcaggagaggatgaatgccctgtagcggtggctggtggcgagaagctgcgtgcggatgcggcggtgctcggcgaagatctcggcggcggcggcgcgcgcctcgacgtcgaacatgtggtagatcccctcgaagcggaggatctggagctcgcacgtgaggcggaacagcacgcacaccaggaggaacacgcccgtgcggtacacccacgacgccaccgtggccaccagcgccaccgcgcgccacggcacgccgacgccggggagggggagcggcggctcgacgcgtacggtggcgaagaagaatacggcctgtgcgcggcctcgacgcagagcgacggtagaagcagcgcgtcgaggagcggtaacgcncggtccagctcccgcgcgtacccgcgccgcacgaacgcggtgtcgtcgcggagcccgccgtcgaggaacagcagctgccggagcccgccgccgcggcggaagaagcacgcgagcgcggcgaacgagatcgccgccagccccgtcgccggggcctgcgcgacgcggttgaacgtgatcgccgacgcggacacgggggacgccccggcgtcggcgcgcagcgagagcgacacggcggcggggacggcgagcgccagcgcgaggaacgccgcgtacgacgcggcccgcgcggcgcgggaggagtggtccagcgcgcaccactgcaggaacacccggaagctgcgcagctcgtcgtggatcaccgacttgctccgcgcgtacgccgggttcagcagcagcggctgcgacgacgccgccgccgacaacaacgacgacgaccacggcgacatggaagacgtctcctcctcctcggaatccattgccattggaacagttggataattcggtttgattcgtatgcatcgaaatatatagtcgtcgtgatcgagtgagcagtgtggggggtgtgcaagtgttcgacatgaggggaaaggagaggagggaggaggagatctcgtgatcgttcacaagggcggcgacgactgatgaatgcagaaaaaggcaaggggaagaaggcgactagctacgcgtgcatatgcacgaactgttcgatgatcttgatcgccatgcatgcattgtccatgatgttcttccttttctttttcgttgtcaaaggttgtcacctgttcagctcgatgcacactcttggctgagctatactgaactgaataacttgttttgttttttcttaaaaaaaaagctcgttccggtcataaatatttaactcctggaatgagattgtgatcaaaatttcaaaattcagaccatcgaaatttctttaaatgactaatttaaaagcacaaaaaagtggcaacaatagatttaccttgaaaagtactgtcataatatcataaacttatacacatatacagattggcagaattttaaacgattgataaatcttcttctaagcttcaaatatttataatcagagggggtaacttttctttttttgtgagtaaaaaaataaaatgaataagtattattaatgaactttggaaatcctagatcaaattccaaaagaataagtccacttctgagggactcaaagtagacttatacgaattccaaacaggcttagtaagcccatggtgagtttacagatgggccataacccggaagagattgccagctctgctaggtgaggtggagggcccacctagtgggcccaattgttttcgcgggggcatatacagcggaggacgcgtcgtcgtggagaagtggaaatcagtttccactttcttccaaagccgaaaaatcgagagagaaagagcaaaaccctaaccgcggcgctccgcccccttccgccgccggattcctcctcctccttcgtccgccttcgccggcgccgccctgctccgaaggagcccaggccttgtcgccgcgtcgcttgccccgccgccggtttcagcagcagccacccccaccaccatgtcttctcaggtacacgggtctctttcctcgccttgctctatttgtcgccgcggattggtcggggggctccgattgctgccgcgggaatccacccccgtcgccccgggatggtgcgtgcgggagtgggtgggcgtagaattaggttaggttggatttggacctgttgcttgtcgatcagccatgggatctcgccgcaaaagctcacgcttgcggtgtttgtttgtttacaggtcgacaaccgtagccaatctgctgaaagcgtgccgcaccacgtagggggggttttttcccgggggtttttttttttttttccccgggggcccccccccggngccgggggggggggcccccgaaaaattttttaaaaaaaacccactttttgggcgcggggggggccccttttttcccccctttttttaacctttggttttttaaaagggcctagaacaatgcttggaagggggggaaaatttcatttttggtatggatgacgactcacaggtgggcggcgtgaggacgactgggtttgccccagctgccagaacgtcaacttcgccttccgcaccacctgcaacatgcgcaattgcaaccaatccaggcccaccgactatacggtacatgtgattgccaccgatgcgcgctcatgtggttgattagttccgctcatcgtgatttttgcatttacctagtcgtgctgttgcctcctctccagaaggatatgcagaaacctatgcagacaccgccgccccatttccccatgtcagggggatacatgagcccagggacgccgccatccatgtacctcgggggtggtgctcccccttatggcacctccctctatggcggacctgctttaccacgttatggtattgctcagttccctgggggttctggatatccatatggctatggtggccgcctgccaatggggagcccctatgggccgccgatgcatatggcagggcctccatattctgctggatccatgatgggaccaggtaggggtgctacaacaatatagactctactaactgctgagtacttgatttactagatacaatgggcaaaatttttgagaccatttatgtccttttatgcaaaccttagtgtggccagaatgagattttacaggaaatatccttttgcctgacatttattttctatagctacaggatagaaatgctagtatgcgaagtatgtttctttgggaactaatttactcttctacgctctagcatgtaaacttttataggcaaattagttattaccatatattttttttgggtggttgttgcagtttatgaattaaatgcatacgagataaaaattaaaaagttaccaactctttgtgaatatgtgtcctgactcgtgtgagactattcctcacattttttctcttatccattttcctgtcctcaaaataggtggaatgtatgggatgcccatggacagatatagcttgggcttacctgctggtcctggtccaatggtaaacttttctggattattagtatttgctcatgcatattagcatgattcaattgtttttcccttgcataacaaactattgtgggatgttgtcagtggtcactctgtgctctgtgggtctaactgtcgaagggcttcctttaagtgtcctttgatattatagtgtgataaatcacgataggaaatgtttcaactctcatttatacaattctttgatgaagggcgcgagggctggttcatattccgaggaaggatcccagaagaagcctgcaggtatatattttcaaatgaattttgactgttcattgattttgttgtccattggtttatttttcttatgaactttattttaggagctgggcgtgataatgattggaaatgccctaattgcaacaacattaactttgcattccggacagtctgtaacatgagaaagtgcaatacaccaagacctgaaaaccaggtacaattctccacttcttgtacttgtgcaagttcccacctattgtattactactactaaattatgaaatatctttctttctataaatctaaaattggtcaaagtttatgtgcaaattctgataatgaataaatatttttgatttgcttactaaaaggtgtactgcaatatactaacatcgtaatcatgcttaaagttgaccttgttgccacaagattagcaatgtgacagccgtttatattcgatgctatagtaactggtctgaactgttcattaaaacctcatgccatgcaattcaacacaatttgcttgtgccatgtattaagttgcccattgtttgggcaccaggacctaaggtattaagttgcccatttcgtgtgaactgtcattgttttctcctcaaaacaagatgtactaaatttctctccatttggcaaatctggaacctatacttagcaatacatcgtccactcagccttagccattaatcaagtcacagctgacatgcagtaacaaaccggcgattttcagtactgctatattaactgtgttctgggaagtctgtagcgtgtcaaagtattctaaaatagtttgagctgttctcttcgtaatttcactttcatctatcttctgaaattgttcctcatgctttgacttctcttgtttttcctagagttaaaccatcatgcttactttgctgatagcttgtgtgtcaactcttatgcaggggtccaaacctgatggtgcaagaggtccaagtaagtttaacactaactatgcatacatgcggtgccttgtttgtaaaattttttagtgtacctttagtacctcgaaaccagtaaaattctgagatcaatgccatcttatttccacattgcataagttatgcgtgtcacttagcactagttcttgtaatggctttgtcctttttaattctatataatctttacatctaatatttcatggcagaaccaaagatgccagaaggtagttggaagtgcgagaagtgcaataacataaactatccattccgcacaaaatgtaaccgtccaagttgcgaggctgaaaagccatttcagacaaacaatgctaatgagtcatctgctgatcaggacaatcaggtgcataattagaacctccagtatgatcatcattatatgccatgcctttctttagaacaattcaatataaattgcatatcttatgttttctatcaacagtttcgtttatttgcttgtcttcatcatctcttgtgcatggcttgatatatcatgtccttactgttacagtgagtcctagaacagttatgagggtcaagaaggtccagcgtcgtcgtcaaggttcagtctgaatgtctggggtctatctgtgtcagtagtcgctgctgtatccccttgagaccttagttgagtcgtcgtcctaatggtaaacgttttggagtggcaactggagtcatggatttctttattgctacagattttggttaagaacatcccttgtgaatttgtcatatacttctgaagcttggttgctttgtcttggttactggtactctgggaaaatggcaatttatgatataaatttcaattagctatctgtgtcttagattgctacctgtgtgctatgaagtactattagactgttcattgcggtctcagttttgtcaattgtgtttgtggtctttgtttcaacgtaagggtttggtatctcagataagttggttcttgctgatgcctatatcttttttacccgttttaaaaattttcgagaggatcttggaaggtagattctcagtttctcactatatgtttgcgtggcatcctcttcacaagtttctctccacattttctttttgtactgaaaattgatttggagagcctctctggtgctattgtttgaagtagcaattgggtctaagaaacaagttagctcggtaccatggaattgatacctctgtgtcagtatatcactatttcatcaacggtatcagcctttggaataaataaaaaatgaacttgatctaggtttctgccacaaaatttttatatgtttgtaaaaagaggataacacccttctgtcctcccacaatgttggtatattggttaggagacctataaaaccattgtctgaggttaatcaggttcatttgaaccatggaccttagcttagtttccatcgttgtcaatggattgactcctacagccaatgtagaaattaattgaaaaactatgattatcccagtgctcagaagttctataagtccctattgtttgcttttacatgtgtacggcaaataggcatgcatgttactttctgccagactcgtagagctcatggaatcctgttatatgttatcatgttatctgtagcttagcattttcaagttaccccattctgatgtgcttgattcaaagagagggcccttgatgaaacaatgaatccatgtgcatcatcacattgtggagtggtagactgggtaccattgcatgcttggttcgactctgactactcgactgactggatgtcattaaaattagttgttgtcatgtaatattgtgaagcttttatcaaagctgcaactttcacatgactttcaagacaataatgagcaaacaaaggtggatcctcccggtggccctgctggagtaccgacaagttcgcacgccctgcgaatggcagctctcagtgagttgcagaacagtgttaagagctgatacccttttcattttccaaacaaggtgagaactttgatccatgtggatgtgcttctatcaggagcagctgacagtattgcatgcagtgatcttgctaaggaagttggagatgggaaacatcgtgtgatggccagccttgatgtaagaatgcaaatcagtcttactccgtaccatatctgtgtggagtgtgcacaccggaagcatagtcattttttgaatggtcgattgcttcttccacagtaaagtctataataccagtgtgcaggtgtttttttccctttctttcagtgtgaaggtgttttttaccccctttctttcgttcattcattctttttctttttccttgttgagacggtatcctggagcactttgtaatactctaatgtgcttcggaaagtagaatataagttgtgcttatgggcgggccaaaatgctttggccgttagttgcatgacagcctttccaacatgctgctgcctagccgtagttctcccaaaaatgaaaccatcttgagatccgtttgcggttgaactgaaattagacggtatctctggtttcaacatcatcctttaaaccctggatgaaagatttgcaatattcctgcggaaatctcaacgttcttgcctatttgtttgcggtttcgagtttcgagtatacgtagaaacggaagccggaacatgcaccacgctactcttcaactctatcaagttcatctgaaagtttacgcggcatgccgccatgttcttcgtgacgaggactcagcggccaacgcaaatcagtattcaggtgcttaggtaaagcttttttatctttgggtgcttcttgcaccgatcgatgagatgtgctaagaaccacatatatttgatggcattttgcggtactatgtttagtatgaacatccatctttcaccaaccgattgatttataaggagtaatagtttgcaaccaacaacatcagtagtagggaggccaaaggtgttgtcatgcaggaaagggaggcggtggagcggcgctcaacaatacacatggtgcagcaatgcgtcatgttgcactcgtgcaatggacacgcactaaaaatgtttcttatggctagtcaaaattctccaggaaaatacatttcaaccataatagaaaggtcctaaatgccacaaccaaaacaaggagtcaatgcatgtagattcaaaagaaaaggacgataaatttcatggccaaagtaggaatacttgttataacattaacaatatatttcaattagctacgatgacagtggattaaattataaaaaataaatctacaatttcgttagaaccctcttattactgacacacgaggcccacgagtcatacataacctacttgcaatgtgacacttctcatcatttcgcttccatctagtagagtttgtatggcatataagccaggtgtttaagtgacaagagggtctggagagttacagttttatgataattttattttgtattatcgtagctatctaaaatatgtcatttatattgcagcaagttgatagtttaatcattaaatatgtagtaatctgaaattttcccaataaataaataaataaaggggccctgtacctaacattgcacatgtggagatataacataggcaaacccataaaattgcataatagatggatgctcattaaataccctaagaaaaaagaataggtaataactaataatatcctcaagatgatatacatgtccagaagatacattgatagagtatgaagtaaccaatcttcaagatatttagtattgtgatggaagcgatacccttcctccaggtacgcctgcatgttatataggctaggaataacccctagcgtggtacatacaaaggatgagagatcttatcctatctctctgttagttacaacaaactgaagataagaaccaatctatctagctaactattcttatcatctaacactccccctcaatctcaactctccaagattgagattgttacagaacaattgtaattgtctcacaggaagaggctttgtaaatccatcagcaatttgatcttgtgacggaacaaaccgaatttccaacattttctgcgccacctgttctctgacaaaatggtaatccacttctatgtgttttgttctagcatgaaacacaggatttgctgacaaataggtagctccaatattatcacaccataattgagaaggtcctggatgcaacaaaccaatctcttctagcaatttacgaacccacattacctcagcagttgcattagccaaggctttatattcggcttcagtactagagcgtgatacagaagcttgcttcctggcactccaggatatcaaatttgatcccagaaatactgcaaaacctccagtagatctcctgtcatctagacatcctgcccagtctgcatcagagaaagcactaacaatataagaaaaggatttgtcaatctttaatcctagaccaagagtaccttgcagatatctaagtattctctttactgctgcccaatgtacaatagtaggattctgtaagaactgacacactttattaactgagaaagatatgtctggtcttgtaagagttaagtactgtagagccccaacgatactcctgtactgactggcatcatttgcacccaaaaattcaccatcatttaaccacagtttttcagacacacagagaggagtactcacaggcttacaattactcattccagttctcttaataatatcacctgcatacctttcctgtgtcaacagcagacctttctcagttttctttacttcaattcccagaaagtagtgcagatccccaagatctttcagagcaaaatctttctcaagttccttgagtaaaactgtaactgcttgaccagaagagctagcaactataatatcatcaacatatacaagcagaaacataacaagtcccttcttattatagaagaacaaagatgtatcagccttagatgaaacaaaaccaagttcttgtagccttttactcaacctggagtaccaagctctaggtgcctgttttaagccatacagagccttatccaacttacagagatagtgtggcatctttttctcctcgtatcttggtggctgcctcatgtacacatcttcttcaagatagccatgcaagaaggcattctgtacatcaagctgtcgaagactccatccctgtgacacagccagtgacagaacaagtctaatagtagcagccttaactacaggactgaaggtatcctcataagcaataccataacgttgtttaaaaccctttgctactaacctagctttatatctatctatagttccatctgcctttcttttaatcttatagacccacttacaatctattacattcaccccctgctttggtggaactaggtgccaggttttatttctcactaaagcagcaaactcgctatccatagctgacttccaattagtattacttaaagcctcttggagattacctggttctcctgtatgtgtgagtcctgcataccttactgtgccatctgtgtacttctttggtttgtggataccacgctgtgctctggtcactggtcgagtcggctgagcggcaaactgagcactatcatcatcatgcgatgtggaagaagcaggagctgatgcagacgtgtcttgatcctcctgcgacgtgtcttgatcctcctgcgatggcccacgtgaacccggtcccacaatgtctcccgacagagacgaggctgccgcgtgtgacgacgcgattggcgcggttgccgcgtgtggcgcggccgagggactcgctgcgtgtcgcggcgtgaccggttctgcagatcgagatgacgccgagttctcctggtccgcctggttctccgtgccatgcatggtactgtgcgtcagagagtcatgatggccgccggtaggttgcccgccggaactctgcatgaaatcatgcccgtgctgcgcccctgattttgctccattgcctgcactgctgcctgcactattctcaataattggattagcaggattagaatcatcaatcagcggttgatcatgcatctgtacacccccgtgatcaagcagcggaagaagatgcgccgggaggagattgatctcagcccggaggcgagcaccggcgttgggatgaagtttttcaaagggatagatttgctcgtcaaagacaacatcacgggaaatatacacacgccctgtagagatgtctaggcacttaaaacctttgtgaagcgtgctataacccagaaaagcacactgtttagaacggaaagctaatttgcgggcgttgtagggacgcagattcggccagcaggcacagccgaaggtgcgaagcagagaataatctgggggcaggttaaacagacgttgtagaggggtctcaaagtttatcactttggttggggtcctgtttatgaggtaagcagcggtggtgaaggcctcatcccagaatttgagaggcatggaggcatgagctaacaacgagagcccgacctcaacgatgtgacggtgtttgcgctcggcagaaccgttctgctgatgcgcatagggacaggcaacgtagtgttcaatcccaatgcgctgaaagaaggaattaagacgttggtattccccgccccaatccgtctgcacagctttgatttttctattcgtcaagcgttcaacaaggttttgaaaatcctgaaacttggcaaaaacctcagatttgtgtttaaggagatagatccaagtgaatttgctaaagtcatcgatgaaactaacataataaactttattgccaacagagtttatagcaggaccccatacatcggaaaacacaagttgcaaaggttcaatagaaacactactggacttagggtagggtagctgatggctcttgcctttctggcaagcatcacacacaaactcttgactagaatccctaacaactgggagattattttggctaatgacgcgattgacaacagaaaaagaagggtgccctaatctactgtgccaccggaaaagagagggcttgacaacaccaaaagcctgcttgttggagatggtttggagcttgtctgttggcagaggatagaggccggatctacacctgcctcgaaggagtggcatcctcgttacctgatccttaaccaaaaagaagaaaggatgaagttcaacaaatgttttattgtcacgagtaaagcgatgggcagaaacaaggcttttgcatgcatcaggaacatggaggacgtttttcaacgttagatcacgagtaggggtacgaattgcagtatgaccaacatgatcgatattcatacctgcgccactagcattgtggacttgatcattgccggtgtatttgtccttcaccatgagcttctccatctctccagtgatgtggtcggtggcgccgctgtcgatgtaccagttcgtgtcgatgccgtaggagttcactgcagcagtgttggcgttcttctcttcaccggtgaaagagggatcaaacctcttccagcacttggcgacgatgtggccgatcttgccgcagagttggcacgtcggcttgggcttgccgtcattacgaccgcgcccgaagctgccgccacgtccagggttgccgccgccgcgccctctgccatcacgaccgcctccgcctcgtcctcctcgcgacgcggtgttggcagaaggattggccgcgttctggagaagttccagccgcgactcaaagccaaccaggagcgcatagacatcgctcacagagattggaccggtgcgtcccgtgactgacgagaccaccgagttgtagtcgaaatccagcccggcaagaatgtaggagatgagctcctcatcatcaactggttttcctgcagaagccatgtcatccgcaagagatttcatcttaccgacatactccgccatgctccggtttcctttcacggtggtggagagcgccatgcgagtgttgaggatgcgggcgcgagattgagatgcgaagaggctctcaattgcctccatctgccgccgttgtgagtgttgccacctgagtgagcacctcacgcgacagagacgacagcaggtagctgagaacctgctgttcctgcgccttccattgcaccagcgccggatttgccaccttctcggtggtcttgccatcgtccttggtgatgatgatcgttgcagccggtgcctgattgctcccgtcgaggaagccggccatctgtgcgccgcgcagcgcggcaagaacttgcgccttccacagcacgaagttgctcttggtgagcttctcagaaactgtctgcccattgagagcagatgggttggaggaagaagacgccatttgcgtcgggagttgggagattagattgaaagattgattggtggagggtggaaggctctgataccatgtgatggaagcgatacccttcctccaggtacgcctgcatgttatataggctaggaataacccctagcgtggtacatacaaaggatgagagatcttatcctatctctctgttagttacaacaaactgaagataagaaccaatctatctagctaactattcttatcatctaacaagtatgatgataaaccaacgataataatggaaatcgatatacatactctggtacaagagtcaaactgcgccgatcgatgggagtgacgcggtagtaggcgtcaatacggagcgttggggttatacgtacgtgtatactacatatctgcaagcacataattaatcctcatatcttcaaacgcgagcaaagacagtactactcccttcatccgattcgatattcttaattttttggagaacgacataatttttgaagtatatctttaactatattgtctattatgacatatacaataaataaatacaaataagtatttactctaatagtaaagactaagagggactatatatatgttattctagtgctttcagtcgaaattttaaaagtttgaatacaaccttattcaaaacattaagagcaatggaaccggagagagtaatataattagagattatagtgtgtcgtatttgtgggttttacttaattaattaagccggcctgatcagtgtctacctacacactggcatggactcttgcaaagtcagatggatgctaatttgtacttttgtgcaggtatagagcggtcgcggcccagcctcgatcgctcacgtccgcaccgtcgccgcgcgcgcgtgtgacacacgcacgcacgtacgtacgctccgtgcatccgtccctcgccgccctcggtgctatactcccctcgcgttaagggggtgtatatccagggtttaaaattttaacgtgtcacatcagatattatatagaatatcgtatagggtgggcactaataaaaaactaattatagaattggttagtaaaccgtgaaacgaatttattaagcctaattaatctgtcattagcaaatgtttactgtagcaccacattgttaaatcatggagcaattaggcttaaaagattcgtctggccgcaagctgtataattagttatttttttaacctatatttaatacttcggatgtgtttagatctaaagtttggatccaaacttcagtccttttccatcatatcaacctgtcatatacacataacttttcagtcacatcatctccaatttcaaccaaaatccaaactttgcgctgaactaaacacagccttcatgcaagtgttcaaacgttcgagtgacagggtaaaaaattttgaagtgggatctagacaagaccttatttatacaacataaaaacactatatctatacttctttaaaataaaaacatcgatggtacaatctgacaagataggaccaccatccttcatccttcatccagtttcagacccagagatcaattgccacatctagcaacaatatgaatacccaatggataaagcgcgaggagagagttgcagacccagagcagattgcagccggactgacatggatagagattagtagatggtgtggcactttcgtttggtggtaaagtaagccatactgttagttactcctctaaattttttgcagtgtagcaagctaaaagatggagtgaacccataaataaattcaacctatagttatatggctagaaacataaatgtagctactttctctgtgcacgagacactagagatagaactacgtatgcacggaccggctcatcactagaggagtaggtgtcaaccggtttcaagataaatatccctatataataataaacaaataaataaaatgaaagaaaattaaaaaaaaacacttgcaattttgcaaacagatgcgccaggttgcatggacacgtggcatttctcccacgttactcctgcatgcgtgcatgccgccacgtgtccacccctccccgcctttaaaacccgcctccgatcccctctcccccaacaccatctcctcctcgtcatcgtcatcgtcttcctcctcgcgtcgccgatcacctcgccatggtgccgccggcggcgcacgcgccgaagaacctggggctgaggggggtgcgccgccggctg

SEQ ID NO: 4400 - DNA, 51417 bp, Oryza sativa
cgcgagcgcggcgaacgagatcgccgccagccccgtcgccggggcctgcgcgacgcggttgaacgtgatcgccgacgcggacacgggggacgccccggcgtcggcgcgcagcgagagcgacacggcggcggggacggcgagcgccagcgcgaggaacgccgcgtacgacgcggcccgcgcggcgcgggaggagtggtccagcgcgcaccactgcaggaacacccggaagctgcgcagctcgtcgtggatcaccgacttgctccgcgcgtacgccgggttcagcagcagcggctgcgacgacgccgccgccgacaacaacgacgacgaccacggcgacatggaagacgtctcctcctcctccgaatccattgccattggaacagttggataattcggtttgattcgtatgcatcgaaatatatagtcgtcgtgatcgagtgagcagtgtggggggtgtgcaagtgttcgacatgaggggaaaggagaggagggaggaggagatctcgtgatcgttcacaagggcggcgacgactgatgaatgcagaaaaaggcaaggggaagaaggcgactagctacgcgtgcatatgcacgaactgttcgatgatcttgatcgccatgcatgcattgtccatgatgttcttccttttctttttcgttgtcaaaggttgtcacctgttcagctcgatgcacactcttggctgagctatactgaactgaataacttgttttgttttttcttaaaaaaaaagctcgttccggtcataaatatttaactcctggaatgagattgtgatcaaaatttcaaaattcagaccatcgaaatttctttaaatgactaatttaaaagcacaaaaaagtggcaacaatagatttaccttgaaaagtactgtcataatatcataaacttatacacatatacagattggcagaattttaaacgattgataaatcttcttctaagcttcaaatatttataatcagagggggtaacttttctttttttgtgagtaaaaaaataaaatgaataagtattattaatgaactttggaaatcctagatcaaattccaaaagaataagtccacttctgagggactcaaagtagacttatacgaattccaaacaggcttagtaagcccatggtgagtttacagatgggccataacccggaagagattgccagctctgctaggtgaggtggagggcccacctagtgggcccaattgttttcgcgggggcatatacagcggaggacgcgtcgtcgtggagaagtggaaatcagtttccactttcttccaaagccgaaaaatcgagagagaaagagcaaaaccctaaccgcggcgctccgcccccttccgccgccggattcctcctcctccttcgtccgccttcgccggcgccgccctgctccgaaggagcccaggccttgtcgccgcgtcgcttgccccgccgccggtttcagcagcagccacccccaccaccatgtcttctcaggtacacgggtctctttcctcgccttgctctatttgtcgccgcggattggtcggggggctccgattgctgccgcgggaatccacccccgtcgccgcgggatggtgcgtgcgggagtgggtgggcgtagaattaggttaggttggatttggacctgttgcttgtcgatcagccatgggatctcgccgcaaaagctcacgcttgcggtgtttgtttgtttacaggtcgacaaccgtagccaatctgctggaaagcgtgcccgcaccgacggtaggtcgcttcgccgcggcgattaacctgcggctttcctttactgtttaagctgcatctgaggggaatttcatttttggtatggatgacgactcacaggtgggcggcgtgaggacgactgggtttgccccagctgccagaacgtcaacttcgccttccgcaccacctgcaacatgcgcaattgcaaccaatccaggcccaccgactatacggtacatgtgattgccaccgatgcgcgctcatgtggttgattagttccgctcatcgtgatttttgcatttacctagtcgtgctgttgcctcctctccagaaggatatgcagaaacctatgcagacaccgccgccccatttccccatgtcagggggatacatgagcccagggacgccgccatccatgtacctcgggggtggtgctcccccttatggcacctccctctatggcggacctgctttaccacgttatggtattgctcagttccctgggggttctggatatccatatggctatggtggccgcctggggatcctctagagtcgacctgccaatggggagcccctatgggccgccgatgcatatggcagggcctccatattctgctggatccatgatgggaccaggtaggggtgctacaacaatatagactctactaactgctgagtacttgatttactagatacaatgggcaaaatttttgagaccatttatgtccttttatgcaaaccttagtgtggccagaatgagattttacaggaaatatccttttgcctgacatttattttctatagctacaggatagaaatgctagtatgcgaagtatgtttctttgggaactaatttactcttctacgctctagcatgtaaacttttataggcaaattagttattaccatatattttttttgggtggttgttgcagtttatgaattaaatgcatacgagataaaaattaaaaagttaccaactctttgtgaatatgtgtcctgactcgtgtgagactattcctcacattttttctcttatccattttcctgtcctcaaaataggtggaatgtatgggatgcccatggacagatatagcttgggcttacctgctggtcctggtccaatggtaaacttttctggattattagtatttgctcatgcatattagcatgattcaattgtttttcccttgcataacaaactattgtgggatgttgtcagtggtcactctgtgctctgtgggtctaactgtcgaagggcttcctttaagtgtcctttgatattatagtgtgataaatcacgataggaaatgtttcaactctcatttatacaattctttgatgaagggcgcgagggctggttcatattccgaggaaggatcccagaagaagcctgcaggtatatattttcaaatgaattttgactgttcattgattttgttgtccattggtttatttttcttatgaactttattttaggagctgggcgtgataatgattggaaatgccctaattgcaacaacattaactttgcattccggacagtctgtaacatgagaaagtgcaatacaccaagacctgaaaaccaggtacaattctccacttcttgtacttgtgcaagttcccacctattgtattactactactaaattatgaaatatctttctttctataaatctaaaattggtcaaagtttatgtgcaaattctgataatgaataaatatttttgatttgcttactaaaaggtgtactgcaatatactaacatcgtaatcatgcttaaagttgaccttgttgccacaagattagcaatgtgacagccgtttatattcgatgctatagtaactggtctgaactgttcattaaaacctcatgccatgcaattcaacacaatttgcttgtgccatgtattaagttgcccattgtttgggcaccaggacctaaggtattaagttgcccatttcgtgtgaactgtcattgttttctcctcaaaacaagatgtactaaatttctctccatttggcaaatctggaacctatacttagcaatacatcgtccactcagccttagccattaatcaagtcacagctgacatgcagtaacaaaccggcgattttcagtactgctatattaactgtgttctgggaagtctgtagcgtgtcaaagtattctaaaatagtttgagctgttctcttcgtaatttcactttcatctatcttctgaaattgttcctcatgctttgacttctcttgtttttcctagagttaaaccatcatgcttactttgctgatagcttgtgtgtcaactcttatgcaggggtccaaacctgatggtgcaagaggtccaagtaagtttaacactaactatgcatacatgcggtgccttgtttgtaaaattttttagtgtacctttagtacctcgaaaccagtaaaattctgagatcaatgccatcttatttccacattgcataagttatgcgtgtcacttagcactagttcttgtaatggctttgtcctttttaattctatataatctttacatctaatatttcatggcagaaccaaagatgccagaaggtagttggaagtgcgagaagtgcaataacataaactatccattccgcacaaaatgtaaccgtccaagttgcgaggctgaaaagccatttcagacaaacaatgctaatgagtcatctgctgatcaggacaatcaggtgcataattagaacctccagtatgatcatcattatatgccatgcctttctttagaacaattcaatataaattgcatatcttatgttttctatcaacagtttcgtttatttgcttgtcttcatcatctcttgtgcatggcttgatatatcatgtccttactgttacagtgagtcctagaacagttatgagggtcaagaaggtccagcgtcgtcgtcaaggttcagtctgaatgtctggggtctatctgtgtcagtagtcgctgctgtatccccttgagaccttagttgagtcgtcgtcctaatggtaaacgttttggagtggcaactggagtcatggatttctttattgctacagattttggttaagaacatcccttgtgaatttgtcatatacttctgaagcttggttgctttgtcttggttactggtactctgggaaaatggcaatttatgatataaatttcaattagctatctgtgtcttagattgctacctgtgtgctatgaagtactattagactgttcattgcggtctcagttttgtcaattgtgtttgtggtctttgtttcaacgtaagggtttggtatctcagataagttggttcttgctgatgcctatatcttttttacccgttttaaaaattttcgagaggatcttggaaggtagattctcagtttctcactatatgtttgcgtggcatcctcttcacaagtttctctccacattttctttttgtactgaaaattgatttggagagcctctctggtgctattgtttgaagtagcaattgggtctaagaaacaagttagctcggtaccatggaattgatacctctgtgtcagtatatcactatttcatcaacggtatcagcctttggaataaataaaaaatgaacttgatctaggtttctgccacaaaatttttatatgtttgtaaaaagaggataacacccttctgtcctcccacaatgttggtatattggttaggagacctataaaaccattgtctgaggttaatcaggttcatttgaaccatggaccttagcttagtttccatcgttgtcaatggattgactcctacagccaatgtagaaattaattgaaaaactatgattatcccagtgctcagaagttctataagtccctattgtttgcttttacatgtgtacggcaaataggcatgcatgttactttctgccagactcgtagagctcatggaatcctgttatatgttatcatgttatctgtagcttagcattttcaagttaccccattctgatgtgcttgattcaaagagagggcccttgatgaaacaatgaatccatgtgcatcatcacattgtggagtggtagactgggtaccattgcatgcttggttcgactctgactactcgactgactggatgtcattaaaattagttgttgtcatgtaatattgtgaagcttttatcaaagctgcaactttcacatgactttcaagacaataatgagcaaacaaaggtggatcctcccggtggccctgctggagtaccgacaagttcgcacgccctgcgaatggcagctctcagtgagttgcagaacagtgttaagagctgatacccttttcattttccaaacaaggtgagaactttgatccatgtggatgtgcttctatcaggagcagctgacagtattgcatgcagtgatcttgctaaggaagttggagatgggaaacatcgtgtgatggccagccttgatgtaagaatgcaaatcagtcttactccgtaccatatctgtgtggagtgtgcacaccggaagcatagtcattttttgaatggtcgattgcttcttccacagtaaagtctataataccagtgtgcaggtgtttttttccctttctttcagtgtgaaggtgtttttttacccctttctttcgttcattcattctttttctttttccttgttgagacggtatcctggagcactttgtaatactctaatgtgcttcggaaagtagaatataagttgtgcttatgggcgggccaaaatgctttggccgttagttgcatgacagcctttccaacatgctgctgcctagccgtagttctcccaaaaatgaaaccatcttgagatccgtttgcggttgaactgaaattagacggtatctctggtttcaacatcatcctttaaaccctggatgaaagatttgcaatattcctgcggaaatctcaacgttcttgcctatttgtttgcggtttcgagtttcgagtatacgtagaaacggaagccggaacatgcaccacgctactcttcaactctatcaagttcatctgaaagtttacgcggcatgccgccatgttcttcgtgacgaggactcagcggccaacgcaaatcagtattcaggtgcttaggtaaagcttttttatctttgggtgcttcttgcaccgatcgatgagatgtgctaagaaccacatatatttgatggcattttgcggtactatgtttagtatgaacatccatctttcaccaaccgattgatttataaggagtaatagtttgcaaccaacaacatcagtagtagggaggccaaaggtgttgtcatgcaggaaagggaggcggtggagcggcgctcaacaatacacatggtgcagcaatgcgtcatgttgcactcgtgcaatggacacgcactaaaaatgtttcttatggctagtcaaaattctccaggaaaatacatttcaaccataatagaaaggtcctaaatgccacaaccaaaacaaggagtcaatgcatgtagattcaaaagaaaaggacgataaatttcatggccaaagtaggaatacttgttataacattaacaatatatttcaattagctacgatgacagtggattaaattataaaaaataaatctacaatttcgttagaaccctcttattactgacacacgaggcccacgagtcatacataacctacttgcaatgtgacacttctcatcatttcgcttccatctagtagagtttgtatggcatataagccaggtgtttaagtgacaagagggtctggagagttacagttttatgataattttattttgtattatcgtagctatctaaaatatgtcatttatattgcagcaagttgatagtttaatcattaaatatgtagtaatctgaaattttcccaataaataaataaataaaggggccctgtacctaacattgcacatgtggagatataacataggcaaacccataaaattgcataatagatggatgctcattaaataccctaagaaaaaagaataggtaataactaataatatcctcaagatgatatacatgtccagaagatacattgatagagtatgaagtaaccaatcttcaagatatttagtattgtgatggaagcgatacccttcctccaggtacgcctgcatgttatataggctaggaataacccctagcgtggtacatacaaaggatgagagatcttatcctatctctctgttagttacaacaaactgaagataagaaccaatctatctagctaactattcttatcatctaacactccccctcaatctcaactctccaagattgagattgttacagaacaattgtaattgtctcacaggaagaggctttgtaaatccatcagcaatttgatcttgtgacggaacaaaccgaatttccaacattttctgcgccacctgttctctgacaaaatggtaatccacttctatgtgttttgttctagcatgaaacacaggatttgctgacaaataggtagctccaatattatcacaccataattgagaaggtcctggatgcaacaaaccaatctcttctagcaatttacgaacccacattacctcagcagttgcattagccaaggctttatattcggcttcagtactagagcgtgatacagaagcttgcttcctggcactccaggatatcaaatttgatcccagaaatactgcaaaacctccagtagatctcctgtcatctagacatcctgcccagtctgcatcagagaaagcactaacaatataagaaaaggatttgtcaatctttaatcctagaccaagagtaccttgcagatatctaagtattctctttactgctgcccaatgtacaatagtaggattctgtaagaactgacacactttattaactgagaaagatatgtctggtcttgtaagagttaagtactgtagagccccaacgatactcctgtactgactggcatcatttgcacccaaaaattcaccatcatttaaccacagtttttcagacacacagagaggagtactcacaggcttacaattactcattccagttctcttaataatatcacctgcatacctttcctgtgtcaacagcagacctttctcagttttctttacttcaattcccagaaagtagtgcagatccccaagatctttcagagcaaaatctttctcaagttccttgagtaaaactgtaactgcttgaccagaagagctagcaactataatatcatcaacatatacaagcagaaacataacaagtcccttcttattatagaagaacaaagatgtatcagccttagatgaaacaaaaccaagttcttgtagccttttactcaacctggagtaccaagctctaggtgcctgttttaagccatacagagccttatccaacttacagagatagtgtggcatctttttctcctcgtatcttggtggctgcctcatgtacacatcttcttcaagatagccatgcaagaaggcattctgtacatcaagctgtcgaagactccatccctgtgacacagccagtgacagaacaagtctaatagtagcagccttaactacaggactgaaggtatcctcataagcaataccataacgttgtttaaaaccctttgctactaacctagctttatatctatctatagttccatctgcctttcttttaatcttatagacccacttacaatctattacattcaccccctgctttggtggaactaggtgccaggttttatttctcactaaagcagcaaactcgctatccatagctgacttccaattagtattacttaaagcctcttggagattacctggttctcctgtatgtgtgagtcctgcataccttactgtgccatctgtgtacttctttggtttgtggataccacgctgtgctctggtcactggtcgagtcggctgagcggcaaactgagcactatcatcatcatgcgatgtggaagaagcaggagctgatgcagacgtgtcttgatcctcctgcgacgtgtcttgatcctcctgcgatggcccacgtgaacccggtcccacaatgtctcccgacagagacgaggctgccgcgtgtgacgacgcgattggcgcggttgccgcgtgtggcgcggccgagggactcgctgcgtgtcgcggcgtgaccggttctgcagatcgagatgacgccgagttctcctggtccgcctggttctccgtgccatgcatggtactgtgcgtcagagagtcatgatggccgccggtaggttgcccgccggaactctgcatgaaatcatgcccgtgctgcgcccctgattttgctccattgcctgcactgctgcctgcactattctcaataattggattagcaggattagaatcatcaatcagcggttgatcatgcatctgtacacccccgtgatcaagcagcggaagaagatgcgccgggaggagattgatctcagcccggaggcgagcaccggcgttgggatgaagtttttcaaagggatagatttgctcgtcaaagacaacatcacgggaaatatacacacgccctgtagagatgtctaggcacttaaaacctttgtgaagcgtgctataacccagaaaagcacactgtttagaacggaaagctaatttgcgggcgttgtagggacgcagattcggccagcaggcacagccgaaggtgcgaagcagagaataatctgggggcaggttaaacagacgttgtagaggggtctcaaagtttatcactttggttggggtcctgtttatgaggtaagcagcggtggtgaaggcctcatcccagaatttgagaggcatggaggcatgagctaacaacgagagcccgacctcaacgatgtgacggtgtttgcgctcggcagaaccgttctgctgatgcgcatagggacaggcaacgtagtgttcaatcccaatgcgctgaaagaaggaattaagacgttggtattccccgccccaatccgtctgcacagctttgatttttctattcgtcaagcgttcaacaaggttttgaaaatcctgaaacttggcaaaaacctcagatttgtgtttaaggagatagatccaagtgaatttgctaaagtcatcgatgaaactaacataataaactttattgccaacagagtttatagcaggaccccatacatcggaaaacacaagttgcaaaggttcaatagaaacactactggacttagggtagggtagctgatggctcttgcctttctggcaagcatcacacacaaactcttgactagaatccctaacaactgggagattattttggctaatgacgcgattgacaacagaaaaagaagggtgccctaatctactgtgccaccggaaaagagagggcttgacaacaccaaaagcctgcttgttggagatggtttggagcttgtctgttggcagaggatagaggccggatctacacctgcctcgaaggagtggcatcctcgttacctgatccttaaccaaaaagaagaaaggatgaagttcaacaaatgttttattgtcacgagtaaagcgatgggcagaaacaaggcttttgcatgcatcaggaacatggaggacgtttttcaacgttagatcacgagtaggggtacgaattgcagtatgaccaacatgatcgatattcatacctgcgccactagcattgtggacttgatcattgccggtgtatttgtccttcaccatgagcttctccatctctccagtgatgtggtcggtggcgccgctgtcgatgtaccagttcgtgtcgatgccgtaggagttcactgcagcagtgttggcgttcttctcttcaccggtgaaagagggatcaaacctcttccagcacttggcgacgatgtggccgatcttgccgcagagttggcacgtcggcttgggcttgccgtcattacgaccgcgcccgaagctgccgccacgtccagggttgccgccgccgcgccctctgccatcacgaccgcctccgcctcgtcctcctcgcgacgcggtgttggcagaaggattggccgcgttctggagaagttccagccgcgactcaaagccaaccaggagcgcatagacatcgctcacagagattggaccggtgcgtcccgtgactgacgagaccaccgagttgtagtcgaaatccagcccggcaagaatgtaggagatgagctcctcatcatcaactggttttcctgcagaagccatgtcatccgcaagagatttcatcttaccgacatactccgccatgctccggtttcctttcacggtggtggagagcgccatgcgagtgttgaggatgcgggcgcgagattgagatgcgaagaggctctcaattgcctccatctgccgccgttgtgagtgttgccacctgagtgagcacctcacgcgacagagacgacagcaggtagctgagaacctgctgttcctgcgccttccattgcaccagcgccggatttgccaccttctcggtggtcttgccatcgtccttggtgatgatgatcgttgcagccggtgcctgattgctcccgtcgaggaagccggccatctgtgcgccgcgcagcgcggcaagaacttgcgccttccacagcacgaagttgctcttggtgagcttctcagaaactgtctgcccattgagagcagatgggttggaggaagaagacgccatttgcgtcgggagttgggagattagattgaaagattgattggtggagggtggaaggctctgataccatgtgatggaagcgatacccttcctccaggtacgcctgcatgttatataggctaggaataacccctagcgtggtacatacaaaggatgagagatcttatcctatctctctgttagttacaacaaactgaagataagaaccaatctatctagctaactattcttatcatctaacaagtatgatgataaaccaacgataataatggaaatcgatatacatactctggtacaagagtcaaactgcgccgatcgatgggagtgacgcggtagtaggcgtcaatacggagcgttggggttatacgtacgtgtatactacatatctgcaagcacataattaatcctcatatcttcaaacgcgagcaaagacagtactactcccttcatccgattcgatattcttaattttttggagaacgacataatttttgaagtatatctttaactatattgtctattatgacatatacaataaataaatacaaataagtatttactctaatagtaaagactaagagggactatatatatgttattctagtgctttcagtcgaaattttaaaagtttgaatacaaccttattcaaaacattaagagcaatggaaccggagagagtaatataattagagattatagtgtgtcgtatttgtgggttttacttaattaattaagccggcctgatcagtgtctacctacacactggcatggactcttgcaaagtcagatggatgctaatttgtacttttgtgcaggtatagagcggtcgcggcccagcctcgatcgctcacgtccgcaccgtcgccgcgcgcgcgtgtgacacacgcacgcacgtacgtacgctccgtgcatccgtccctcgccgccctcggtgctatactcccctcgcgttaagggggtgtatatccagggtttaaaattttaacgtgtcacatcagatattatatagaatatcgtatagggtgggcactaataaaaaactaattatagaattggttagtaaaccgtgaaacgaatttattaagcctaattaatctgtcattagcaaatgtttactgtagcaccacattgttaaatcatggagcaattaggcttaaaagattcgtctggccgcaagctgtataattagttatttttttaacctatatttaatacttcggatgtgtttagatctaaagtttggatccaaacttcagtccttttccatcatatcaacctgtcatatacacataacttttcagtcacatcatctccaatttcaaccaaaatccaaactttgcgctgaactaaacacagccttcatgcaagtgttcaaacgttcgagtgacagggtaaaaaattttgaagtgggatctagacaagaccttatttatacaacataaaaacactatatctatacttctttaaaataaaaacatcgatggtacaatctgacaagataggaccaccatccttcatccttcatccagtttcagacccagagatcaattgccacatctagcaacaatatgaatacccaatggataaagcgcgaggagagagttgcagacccagagcagattgcagccggactgacatggatagagattagtagatggtgtggcactttcgtttggtggtaaagtaagccatactgttagttactcctctaaattttttgcagtgtagcaagctaaaagatggagtgaacccataaataaattcaacctatagttatatggctagaaacataaatgtagctactttctctgtgcacgagacactagagatagaactacgtatgcacggaccggctcatcactagaggagtaggtgtcaaccggtttcaagataaatatccctatataataataaacaaataaataaaatgaaagaaaattaaaaaaaaacacttgcaattttgcaaacagatgcgccaggttgcatggacacgtggcatttctcccacgttactcctgcatgcgtgcatgccgccacgtgtccacccctccccgcctttaaaacccgcctccgatcccctctcccccaacaccatctcctcctcgtcatcgtcatcgtcttcctcctcgcgtcgccgatcacctcgccatggtgccgccggcggcgcacgcgccgaagaacctggggctgaggggggtgcggcgccggctgtggggcaggtgggcggcggagatccgcgtgccgcggggccaccgcgcggccgcgaggctgtggatcggcacgttcccgtccccggcggcggcggcgctcgcctacgacgccgcgctctactgcttccacggcggcgcgccgccggggaaccgcgccttcaacttcccgcacgcgccgcgcctccgcatcgacgaccgccgccgccacgcgctcacgccgggccacgtcagggccatcgccgagaggtacgcccacgacgtcggctccgtcctgttccgcccgctccctccgccgccgccgcccgtcgccgccgccgccgtccccgtgttcgccgcacctgcaccgcccatggcgccggcgccggccaaccatgctgccgatccttactactgcaacgagcctgacaccaccacagacgaggacgtcatggctgcggctgaccgcctcctctccatggacatcgaagaggtcgccgctttgatcgccattgttcagcaaggagagtgaccatatctacaacttcttagctagctagttacaccttctatgtagcatgtgtactatgcacttttgtggttgtgttgtgctgtcctaatggtgtaactagccatatcaaggaagacatgcatgatctagagtctagagtactctagccatggaataaattaacttagtctgtacttggtcatgcaccttgtgtatgatccttgtgtaagagaagtgtaataatcggttcttgaaaaggaactgttgttatatatgagatggatgttgtcatgaaatggaaatttgcagttgtttctctttgcaatccggtgtgattttgtagtggaaattaacagaggaagaaaggagaaaaagaggcgcgaaatcgacccatggcgcgaaagtttgaatttgaaaatttttgagtggaatgtttaattttgcggtataactttcttacaattcattctgggggatgacagaagcattctatatgaagatactagctatcatgaacatatgtgaactttggcagggtcgaatgtgaattaatcaattacccttttcatatgctagcttggagtatatatatggggtcaaaatctcatgcatgtaaataagtccaaggattatgaagcacatatataaatgcatgaactgaacatatatgaaaacaaatctagccataatgagttgtaccatcaaagtctatagaatcaagaacttgtgttaaagagcagaagggctttcatgttaaagagcagaagggctttcattagaatgactgatgtcttttttcttcctattttccactctatccggaggaagatagtacaagagatttaggcaagggctgcaagagatttttttaaaacttttttttgaagagattttttaaaactagctagatagaaagtgaaagaaccaaattaataatggaattcccgtttcatcataaacaaaagtaatggactcctctcaccgagcgctcacgtgaacattatagtcataattttgagccgaaaaaccccttcaaaatatgctacgtatagtacaaaaccatatatattgttcagtccgatatttgccatgttttttccttctttttaagcttgtgttaagggaggggactcactcgcgtggtgtacgtgtgtctttgatgtctctgtgtaatcatacttgtaagttcatgtatttcacattttgtttgaaaaacatatatagtgttaacaagtttcaagcagagttgcaattaaagttaccgtttcttttttactagttgagacatgtccaagattgatgcaactacagatgtgggtgaggtcaggaaatgatggcatctacctatcctgaagatgtcatgcacaaataaataagtactctactgatgagtctactcatcaattgcaagcagttttggtttatgctaattttcaaacacatcaatcattcagctatatctctcttttgtactcgtgtgcacgtcattctagctttggggccttggacaccacaccgtgcatgctggtagcgggtagcctcgaatcgaacggcaataatatccctctgtatcattttgtaataataatatttatataatttgtatatgtacttccatcagcaatccgttgtagtctagctggttaggatactcggctctcacccgagagacccgggttcgagtcccggcaacggaatttctttttggtttcataattgttgaaagattatttgttaacttttttgtggttttttttatctccgatgtatgatcaatgaatccaaaattcttgaaagattattggttttcagattcagatgtttgttacttcaccttttcatctcttctccgatgtatgatcatgtagtgcgatcaaaaaattgttgaaagattattcgttttcagatgcttgttacttcaccttttcatttctctctctgtgatatatgatcacgcaagctgaaattcctaaaagattattcattttcagatctttgttacttcaccaaaagttctcagtgcaatgtcccttttcctaattcttgagttcgtctttttttacgagaactagtgctgaagaaaacagagattgtaagctgtgcagtttgatgcctgagtttcactgaagcagtcataatggaactatattacaaactgcaatttttagttacatcggcaaccaatttttctccaaaccatccaacatattttctcagaattctttcgtctcgctaaaaatctctgaattcgatgaagccatccgactatgaagcatcgatttcagcagtttctaatgaggaaatttcaggctgctgctgctgaagctgaacccacgaatggtagtctctcagcagctgctcccccagcaagggcacgagcctgtccaggaggccttgcatcagcctgccaaatgttcagttctaatgttaaaccaaaatgaaactggtaatactgaacagtgattcagtttcagtgtaaaagatgtgcttaaacatcttgatggggtgattggattggaatttagttctcatcagcatctggtgagcacttgtgtgtaatttctttgagatattttgccttttttttttactactgaactttcagaaacttcagtgattaatgtagggccttacaggttgcctggtgtctccactgctgacaatggaagcatgctgaatggcttcgtgtaaacctgtaatccacatatgaagaacttcagtgtacgttaaaaaaaaatcagatcatctcttagttccgtagaatcagtaattcagtgagcaaaacggttgaggtgctctgttcatccagatgctgtatcttctcatgtaatatacctccagagtgacctccaaattgacatcaatgtccaagcatggttcctcaccatcgtctttccaagttatatggttgctcataaaagctgcaaacatcaaacctctaaatcagacacacattttattttgttgccccggaaaggaagttcagagttcagagttcagactaagcagtaatgattcgcatggttacaatggttagcaaaacagatgattgacaacgatgaattgatgaccaatctactaattgcacagataaatcagatgtctccactcaaaactgcaaagaattttcaagaactgcgagccaatcagctaaccgaagaacctgaatttttttacctgaaaagagctcattctgctgctcaactgagcctgaaccctcaaactgccaccaacaaaacgatcaaatcaaaccaagattaaccgtagaatcgatcaattgagcaagtgattgagacatcatgcagagcaattcgcttaattcagtagtaccctgcaggagagcatctcgacggtgcagtcgtggcatgtcggggcgacgcggaggtcgaggacgggggcgacctggaacccgaggaagccgatgctctgcagcgtgcaccggaacgtgttcgcccccggcgcctagtccaccgacgcgaagctctgcagcgccctcgtgttcagcagcgactccacgccggcgggctgacgcaggaactcgccgatgcccccaacgccgccgccctccaccaccacgatcctctcccgccgcctcgccgacagccgcgcccgcctgcccctcgccctcgccgacagcgattggccgtcctcatcgccttcggcttcggcgtgcgcattgccgctcgccgccgcggctcgccatggccggcggcgaccggctgcaacggcggcgacgcttgagattcggaagaggcagcaaggtttggcagccacgagcctcattccatcgtccactcagctgagctcgagctcgcgcatggagtgatgcgaggttggagttggagaggagcagcggcgacggcgagccactgatcagatggcttatcgtgttcgcggtttggccatctctctctgtgcacaagtggagctcgatttgtggtcggctgcgtcgcgttcttgctgtcgcggtcatcgtcttcaacctgttcaccagttcaatctttagttttcgacatttttttcggagggtgcaatatatatcgaatctttagtcttcaacctgttcaccagttcaatctttagttttcgaattttggaaattttgataaattttgttaaatttgaacaaattattaccaaattttaaaaatatttttttggccgaaataatattgtatcgcggatccaatagaaccgaaattttagaaatttcgttccgaaaatttgaaccctgcttaccaccacggattcaccacttccaacctaccaacgccactaccccaactcacacataaaaccacttgtgttttcttatctaaggatgaaaaaggtccgaaaatatggaaaccactttcatagttatatttctttcggaacggaatcgaaaacagtaaagaataaaatgaaaacggtatcgaaaaatattggaaaaaccggaaacgacgtgttggaaaacgataataaatatcaaaaacattgaacggcgaaatcacacatttaactttacatagctatataaaatataataaattcaagattatacaatgtaaattataattgtctctttttttagccatgcacttgatttgggtatggagttgatgggtatcagtcaaataaaaaaaaatgggtcatagatgttgacgtatttacaaatatagggtaatagatggtaattttcatacaattatggtataaaaattcggaaacactcgatataacaataaaatagttttcatttgcatttctatatttttctactatttctatttttaattttgttggcaacaattttcacatagctcagccagtcaaaatcgagaacaagtgtcggtcagtcaggaatttctacgattattttcacccctagtcttatcttctctctcctttcctctttaccatcaaactattctaaattttaattggaacttttaaccatactaattggagtaaaatgctatcctaccaaaatttcaaaagttttctcaatactatcaaaatttaaaaaggcatcaaactaaacacatagtaaaaaactatcaaaattcggtaacactgaatcttgccaaaatttggcaatgttcttgaactgagagcgtattacatcaggccatcaatattcgattctagccacaatcctagccgccggtttccagcccagaattaatttcatttaatttgggcaaaaccctggcttaattctagacacaaacaggctctggtctcttggacccaaattcaacttggataattccgacacaaactctatcgatcgaacgtactcacgtgtacatattccgaggcgatcgatcgatctccacgcgcgacacgacgcgacttgcatacgcagttacgcacgcatgcaggcgagccacctcgccggagattcagcccgttcgacaaccctaccgccggcgagcggcggcgtacgtgcgccggccatgtcgatgtcgaacttcgcgaagatggggtacagcatctgcgggagcttcgcggccggcatctacgtcggcgttaaactgcgcgtgaggcagcaagcggtggagcgctcggaggggaagaagtacatcagcaacatcgagcaaaatctccagagcctcaagaatctgtatgagcgcgtcgagtagccgccgccaccgttcgtcgtcgagacaactgatccggccgccgccgcagctgaggagactcgccggagcaggagagatgccggcgagcattagacgtcatgagaagttcagacatgcatgcaccccgagatgatatatgctataataatattagcaacagatttacacggctgattttcagtctatttaatgattaatcatatatatttgtcccaatttcaatcggcttaattcattcatgatgtgtttttaaatggatgttttttttatgtgttcgattgattgtgttgtttgttacacaccgtacatgcatgatcacattaaagtatgagaatttttactgtacatgcaatttaagccattgatttcgtttgatccaacgggtgagaaagagttgtacctagtagtactgtccacgtgattttacatagcatagagaggtgctaaagaagtaagggtagttaagtaatttcacgtgtatcttcttcatcttcctcctgtcttttctctctccaaaagatgctgcatgcctgcatcgatcgatggctctcaccagggatggataggctagccggagtggaggtggagggggccgacgagcctccgtgcatcacttcccccaagctcgctggtgacatacgcctaccgcggcccttcccctaatctcgctgccggattcgagcacataggcgaccgacgtaggtcctcgtcgcctccgccgccgcgtagcagcctccgatgcaggcgccgccgttcaacaccaccggcgccgaccacccctcctgctcctcgttacctcgccaccatgcagacaccgccggcacccaacgcgccgccgtccaacaccccgccgccgacgcccccggcaccaccggcgccgaccacccctcgtcccgctcccaccacgcccttgctcttggtttggacttgctcagttgctcttggagtcttcgttcacacagtcactcagtcaaagagaaggagcatcacgagctgcttagcgtgagattttcaatcttaccctccgtgaatgaatggccggatttaaattggtacctcaaggtaccggtacctcgaggtacaatatgctggactggagcaatgctcttaaagtatacatgcaagcatggatggaagggcgaagacccaaagacctcctcgtacccctagtctacgcaatttctaagaagaggagagagtccctacaccaaggaaaggagaataatgtctgggtcggagatttagccttggagacaaacccacatatcacagtggccctcgtggagcagcttgtggcctttatggaccgcagtccgtggtgtgtagctagacgaggaagagtctgaccaaatctcatggaagttcacaccccatgactagtacttggcttcgtcggcctataaacacaatgcgttggcgtgctcgacacaacctttgattcattgatctggagggtctgggcgccaggaaaatgcaaactacacgcctggttcatcatcctgaataaagtctggacctctgaccgacttgcgaccaggggatgatagaacaacggacggtgcccactttgtcggggagaggacgaaacggccttgcacctcgtcactaggtgcagatacactaaaaggacggattgggtggccaatcatcagcttgagccttgacactgggagactactcagtcggtcaatgaatggtgggaagtgccagccactttggctggcattcccaagaagggatcccgtaccatgatcctcctcatcgtttgggaaatatgaaaggaatgaaaccagcggatctatgagtacaaggaggccacaacttcgtatcttctcgcgagaataaaggaagaagtcgacatgtggggtttggcgggcgctaagtgccttagtgagcttgttccgcaccttgtatagtgtacagtttttcttggcttttgccttttctttgctcttaggggttgcatttttctcccactttatttaatgaaaaaagcacactctcgtgctggatcgattaaaaataatggagtcgtctttatctgtaactagttgaaaccccgcgcgttgtggcgggcacattagaaaggatgaatatgcatgtaagtatgaataaacatgaataagtgagatataagtgagtagttctgctacctaaccaaacaggaatatagtttagtatagtatacaatttcaaaagtaagcagttctgctatctgatcaattaaagatgatatttgcatcatcaattgctaaaagtgccaagcacaaaaaactcatttcgagtccagggagttggaaatttatagtcacaatgacaacaccattcagatttactggaaacattgcaagcagaatattgttaggaacaccaagatcttcaccagaggataaatataagttgagtgaaacacatgcaaatataaaattaagttttgtttatttgattacagcaaactgtaggtaggtagtaatactatgagctggaaacagtaggaaactgtaaggtctaaatctcattgtttgtgacattttctccatcgagaatgatatgcatgtgaggaagtttatttttcatgtaattcacaacatgagcttgagttggctgcagcttggagaggtcgtcggtggatgatttcccttggagagtgatataaatagctattgatttggatgcagtaatcttggaaactgcttgcaggtagttggtgtggatgagttgcgcctcatggttcctgaagaagagtaatgcgtttgatgatgtatagataggcatatacaatgtacagagcactgaaatgcatgaagcatgttaaatataaaatataagcttgaaaactatgtaattaggaagctatagctgaacctggatagtgagagctaacctatttttttctggttgttggtccatctgtgttggcaatggacgttgtgtttgcagaagaaattttgtgaaggaaggactgtggtatgagaaattgagcagtgcacatgttgttgtggtgttgtgggtgattcttatagtatttcagtggtgataataaggatactaattttgttttctcatttattgcagaatcagatatgattaagaatcatatcttgagtcttttattattgaggataaaatatggaatagatataaatgccatatttcagatttggttggttttgccagtaaacttgcaagtaatggttgcaaagataagttagcaatgatggtgatagatttggtgcaggtttaaatttcttaaggaaatcgttagcagtgatggtgacagatttggtgcaggtctaatttttttaagaaaatctatatatgttgctgataaaaggccatgttgtaggagaattgtgaaggatttgaagagttgtacctgttccttgtgacccgatggctgttgatcagctatctttggctgctgcagctggttttcctctccattggtggaggtttccgttctgaatttagcagtcaaattagtagcaaaacatacatacatacatacatatatatatgcacgcgcgcgacacacacatatatatgtttataggctgaaacttaaggtgtgcacgtacacttttttatggcacttagaattttgtcctggagaaaattctgttgacggttgtttttccttgctgagatctacttgttggggatgataaagttgatttgttgcaacctgaatagtgtttgcaattgctgggctgatgcatatatgaaaggaatttagttgaagaatagtttgtatattctggaaaaagaacttgtatcagtgcagtaccttggttgatcaatgtgtaactccttttcaaattgaagagctctctttgctgaaggtataatttggtttactgtattgttgtctagagttgtttctggaggttgtagggatggtggcgtagtgggatgttggtcttctttgctgctattagttgtagtcataaatatagaaatgttaagcagaatataataagtaaaaaaggcatatgttggttaacctgcaatgttccatggtggttagcccttcatctgttgcaagttgtttggtggctgattcctgaaaaaagttatttttagattatagatggttggtagaagatatggtaaggacaaacatttgtatacctttgctacctttgtattttccagagtaggtagtatcaaacttgtattttcattttcaacgggataactcttcttgaggacataattgatagtgaagtgtgaagagtactttgtattcatggcaatgtgaaacaatcttgttttcccaatggctatatcaagagctatggcatgttctgttgcatcaattttcaagttctgggtagcttgagtagcatttacctcaaccaaatcctcagccacattgtagaatgctactgcgtccaaagttcctgattcatctttaattgttaaaggaagtttgtacctgaaagtttgtttgagtatattagatttgtttatagaaatgtaagacgaattaattaataagaaaaattagtattatagatatgtcacatacattggttttggcatggaatgctgacattgacatcttggagtgtcggagttgctattgtatgatgcagtacatgatttgcatattttgtagtaccaatttgtatatggtactatcgctgatacctttgcaatgcaactgtatgaattccctccctagtgtgtaagaaatattgaaatgattatttaattagattagcaacttatttagtgatgtagtgtgaatgaggtacctcgaaagcagaaatgggcagtcttgatatttcttcaagtttgtatagcttaccagccgcttgaagtggagttaaatgttcaactcgtggcatttgttgttggagagttggaatatcccattggtagcttgaaggaagattgatgcatttttgaagcaaatataaattaaaatcagtatgacaataagctatataagttacctgctttgatattcagcaatctctgttatatcggagtcaaaatatatttgtgttgctgaacttgatgtagcctctgttttgccttttaaaattgtagcacataagtgagtagtgttgtttatgagagggggtattaaaaagttatttgagggactgacctaaataagtccctgctgtaagtccagcaagtatagctactactattttgtggtctgtagatttctgtagaacaaaagcttcatcaaatgaccctccatattcaccccagaggactatttcttgttcttgttcactacaaattggtgaaacaaaaggtataaactactgtgtcatatacatttggaacataaaaatataatgcatatgtgatacatactctttgctacggattttgagctttctgtttttcttggatgatgttttgccagcataatcatatggcccaacatggctgataactcctatcagatctagaggcaaaatgttcgagattagttgtataataattaaataaaagaagatagaaaatgcaagtattacctatcaatggttttgatattccgcttttagatggtatctgatcaaatgggcagaattcaaaaccatagtttgggatggatgaacctcttgattctaggtgatgaacctttgtgctggacttaaactgcaacatgtatttttggtggtggtaaatatattttttgtttttaatgtcaacagtattgacatcaacaaacatgtagacacaacctagagttagtgatggacgaaattcattttcaagtttctttggaatagtaaactgcaccatagtgccctgcaagattagaactggtataagtctaaaactgcatcgttttatcagtaatatttagattggaagttaagcataggataaatcattttttggtgtaggatagtatacctcttcatcaagaattaccccatcgatgttgaatattgttggtgtactggctgaggccatgtttttagcatcccatagtctaataagtcgtccgaaaactttgaggttttgctgtcccaaatttatctgtttgagttttgttgctgatcccatctatggaaatgttcctgaaataagaggtctaaggttagctagtagacaatatcagaaaacatacattgcatataagagataatttgtttacaaaataccttggtaactaattcatatcattgttgaaacggtgaaaaatctcatgatatactacattttgcgtgcaatgttcatttgatgaactattgctgtttataagtatccgcaagccttttggagatgttactcgtgataacgcaacatataattgtccatgagaaaaaactggagatggcaagtatgcaccaactttttgaagtgtttgaccttggcttttgttaattgtcatcgcatatgacaaacgtattggaaattgacgtctttttagcttgaatggccacttagattgggctgatgtcgttataatacgcggtatgtatgcttttgaacctttggcttttccagtcattatttccccttcaatgatgcgggttgtgagctgtgtaacaataagtctagtcccattacagagacctctagaaggatcaaggttacgcaaaagcattatagaaacaccaattttgagatgcaaaacatggtctggaagtccattcaaagatattgtgttgcggaattctgttgggtatagagcctctagagttgaatggtttgcacagctatcatcaatagtatctgagctataatatgaaatttcagcagctgttacttgagcaatgattttgttgtttatttctgaaacaaccttatttgttggtgataaaattgcacgatcacaaaaatatgttgtaatattgcttggttcatatcctaagtcatacacaaaggaaatcaagctatcaagatttctggaatctgagggcaacaaaagagattggggtatctctatgaaagtaccattggtttcattttctattgaaatatgaggctctgtaccatttcctactcttaaaacccaatctgcaaatacccgtagttcttctttatcggatggtgaaaggttttgtgagctaagtctcatattttcagtcagttgaagaactacacattgatgccataagtatgaattaacaatagaagctcgcagaatttggtgccttgttgcattctgaataacaggaagtgtttgccgaaaatctccaccaaatgcaacagttattccaccaaattgcctatgctgtgcattaggtcgaatgtccgataatatatatctaagtgtgtgatctaatgcttcaaaacaatacttgtgattcacaggtgcttcatcccaaacaataagagatgtttgttgaataagttctgctaagtgtgtgttcttctttatactgcacatagaattctcacgtatgtccaaagggattttgaagcgggaatgaggtgttctacctcctggaagtaggagggctgcaattcctgattatgcaacagctaatgcaattttcccttgagttctcacaaagtttaataaagttgtccataagaaagtttttccagttcctccatgtccatacacaaagaatgttcttccctcattatttatgactgagttagaaatagaattgaatatttccttctggtttgtattcagactattgatgtcattagcagatgtagatgcaatgctggtaatatcatagctgagttcatctagtaataatctattatctgcagatgcactaccaatatcatctggaagtggcaaattaaagtgtgataaagaatatccagcatttctcaataatttatccaattcaaataatagggcattgccaacaaaagagtctgcaaatgaactattactttgtgatagattttgatttgttctgtatctaaaatcttcactcatatgctgggcatgttctgtaaaaagcctttgtggatttgtcacctcacaaaacagtaagattgttacaaataactgacgtaactgataaggtaaggcccagtgcactgcatcattgagagcatgggaccactcttggtcatcaccaaggagacctagagcttcacatgcagctcgaaatgttggatgttgctgtccagatatatttctgatttcagagaaggtctttggtcctttaactatatggagtaacatcctcaaataatacttctcccctttggttggatcaacatgagctatacgtccaatcttattgtaacaaccacgacgtatatcccaatatttttcacttgcatgccatgtaaagtattcagggaattcaatatatgtatgctctctagcttgaggaaattgactattagcttctaaccatgcagtaagtttggatttctgatttcctgggttttcaatgacttcttctaggtcatcatcctctgtgtacacaacattattctctaaagggaggtggaccggaaggcgttcaactgatgggtctgtatggtgtatatcaaactgaagtaaacgccaagcaacatcatttggggttacacatcgacattcaagatagttgtctatttcatttatagtttcatttgctgaattacgacgaataccagctctagaacaatcatagacttttgtaacgtacttaaaaagatacttatgcataccatcatgattaacactttccaaatttatgtgatcttggtacttaaccaccaaatcaacattatgaggaacaatgactctgttgtcaatgtcaaccccattttttgtaactatttgattgtttggtcgtgcgtattgggtaaaaccattttgcaatatataagtgtgttcacagaattcctttggataaaatttggagcaccttccttcagacatgcatggtgaataggaaattccaggaccgcaaggcccatggatcataaaagaagtaacagcttcaaatcctattggatcaagtgtaggatttggtagttgagctgaaatacgtaggtcaaccttttcagcatctagaggttcttcttttgaaagccaaatgattatatggacatgtggtagtccacgcttttgaaattctacagtgtagacaactgtacaaaagggttaactattatatggatttgatgaacaatatatgtatctaagaattttgattgaaagttgttttggaaattacctgcatgtatgggaccaaaaaaaatatttttttaatgtcatccattaacatattcagcttcattttgaacacacggtcaacgatatctggacgatctgaaggttgttgtccaggtgctagagcttgtagaatttttggccaagatgcatttgatgtgaatgtgacaaaaagatctgggcaaccatacttcctacaaatagcaatgcagtcttgatagttttgatatagataccgagggcttccagtatgagaggctggtaagataacccgttggccagccgaagaaccagttgtaatgcctctagacacagagctggctaaagaattgaatggtgccaatctatatttgtgttgaaaactgggcaacctatagtgttgtatgcgctcaccttcaacacaacaatagccatcaaccaaataagattgggttaacctcccacaacgtaatggagtgttgaattggcccgctctatcatgcattatataagcaaagaattcaaccattgttgctttgttacgccgcaaggcagatgaacttgctgtttggttatacatgttggattcatggaaaccatcttcaccatatgggaataaaataggatattgcatggccataaattttcggtgtttttcatctatacgctgcaattgtgatgaatggtgttgtattattatatcccgaccaatatcagtcaccccaatatcccaacaactaatcctacaacctctgctgcaactggtgcactgtatatatctccatgtgcatctgtcgagccaaatagtcggatcttgtaatgatcagattcattttcacttaatctttctcttgctgttcggaataacttcacaatgggattgtgtgtatcgaacatttctattagagagcgaacaatttcttcattggcatggaaggagtcgcgagaagaagaagcaatgttgattatgttagagatttcattttctgtatcgaagatgtatagctgagcatattctggccgacgaccttgtgaaggtattaaagagcctactctgtggcagatctatccactaattttgaagacatatggtccatggccgtcgttgatggattcaatgattttagcccccattgaagtcatagcaaacatggaattgtatcgatgaatatgctgcaagaaatgatttgaaagggagctcgcagaagttaacaaattcaatatgggttctggaggtggattacaaattcaatatggctgccaagattaagtggagcatagattgttcctaacaaagtatatgaatggaagatggcagatactgttatatataagatgtaaggttggcgtatgtcaaattttacgtataaaggatatgataacatacggtgatggcgaaatacttggtttgatgtagacacagatgaagaattattactctcagctgactgtgaatgagaggatattccaataattcgttgttcattagccaatggaggagtagatgcagatgaagagcctatttcagttatgttcaactctcgatgcaaagaccgttgttctgaagataatgctatatgttgtgaagggaatgtgggtacataattagataggctataaccgggtaactaaggtaggtaggcaacgataaactttacattactaaaaaaaaattgaaggtgtaaattggggaaccaacctctacctctatgggcatccaatatgagtttacgttttcgtcgtgattcagcagcagtagcatgatcagggtgaggtaccaaaatatgtgccagtggacgtcttgaccggcgacgtcctactggaaaacgtgaagtactttgcccagcatccatgggttgaaccctttgttttttagttttaatcaacaaagcatctgatcatatatttacaaatatcggatgtaagtttattatatttgaaaatgtaggagtatacgcataagatgtaactggaatatgaaatcagaaaagagatgtacaaaaaaatatgaaaaatataggatgagttgaacaacacacataccgagcaaggttatctgcttttatgacaattgtcaggcttctcctcaagtgatgaaacaaatgttcttgtatctattaataaaggataggtgaaagaagtataagctgcaagcaccatttttttaaagaaactaaaacagtactcaatgcataggtctccaacatgtgcaaaaaccacaatgtatgctcgaatataatataacctggcaaaattcatgtgaaattcacacatactgaactgaatcaccaaaccaaccaaaagctttcattttatcacactttttgcgacaaaaatgcatcataacatgaactatggatttgcatagtttgaaaaacagtataagctgcaggttctatttttttaagaaactaaaacagtacccagtgcataggtctcctgcatgtgcaaaatccacaatgtatgctcaaatattgttctgagaaaaatcatgtgaaatttacacatactgaactgactcactaaagcatccaaaagctttcattttaacaccttttttgtgacaaaaacgcatcataacatgaactatggatgtgcatagtttcaaaaattttgataacatttaacgtatgttttttaaatgattttttttcacattttaacaggaaacatgaatagcatggggtgagctcaacagaagacataccgagcaggttagtagcttctcgctatgtcaggacatctatgtagcaatcctctggctcctcaccaactgctcaaatacattaaagttataggacatataagtatccactgcaaatatcagtttattttttcttaaaaaactggaacaacaatcagtgttgaaatcataatgtttgctcaaatagaatatggagaaaattgatgtcaaattcaggcttatcaaatagaataaattctcacacttttttttcagaaactaaaatcacataggacatataagtatccactgcaaatatcagtttatttttcttaaataactggaacaacaatcagtgcataggatagggattatttctttaggtgtagagaatccaatttacaaagctttcatagtgatcttgcctggttgaaatcataatgtttgctcaaatagaatatggacaaaattgatgtcaaattcaggcttatcaaatagaataaattcacacattttttttcagaaattaaaatcagtactcagggcaaagaaccaactcaattcagacatatttttttcagaaactaaaatcagtacttagggcaaagaagtaagaaccaactcaattcagacatacaaaattagtaacgaagcctacatacaatgatctgacaaagtttgatccacaactaacctatcttgccgtgatcgcaatcatgtccgaattggagaatatgcttgcaggatgaagcgatgatgtcgagggaggtatggatctgaggcttgcggatggatggatgatgtctgacggagaggcacaggtttgaggagacgtctggtagcactggggattgcaagaggattatcaaaaggtttggaagaggcttacgaagagaaattgcaagaggcacataaatcgtattaaccatcgtgcctccagtaccataatgattttggccgtttctaatgtaaatgcacatcattaagggcggggaatgggaagaagcatggtgattaccgtttctgctagccaagaagatggggagggggcggttgatttcaccatggatggtgccagggttccagatgcttcttcccatcggatggatggcgctagggtttccgagtccagacgcttctccccatcgccgtatcgctggttgccgagtccagacgcttctcccccatcgccgcatcgctacacagctccccatcactacctcctactgcgaccgagatgagcgcggtccccaccaccacctgcgcgccatcgccgcctcctgcgaccgagcgccctgtccccaccgccacctgcgcgcgatcgcgacgcggtgggcgagcgctagggtccgtcgcactacgccgctgctgctctgctcaggaagtcaggaggagatgagacataccgaaccctaaaatctctcattggactgacttgggcctcctgggcctcacgacttgggcctcctgggctgcagtatatgtgttgtgttcgaccccgaggcagattgcatccaacggtgcagatgcaatctaatctaccgatctaagggctataaattaatgatgacgttgatcattgaggtttaagctctaggatcttaattgcccgtagtgggggataactttataggaaaaagggatactaaaaaaaaaagctaaaaaaaagcgcgctagctgtgcagcccagcagcagctaggccttgggcccttggcccacgcgtgcagcaacgcagcaagcaagcgagcagtagcggcagctgtagctagcttagtaccacctcggctagctagctccatctacactagcttaaataggaaatgttgccggtgactgtaacatatcgattccagaatttatgcagcgtgttacagtgttaggtgactaagagtatgttggaaaactctgttcattttttaagggtatgttgtcttatttctgcatgtctcttagaagtcaaaatttataaatatttagtaacatagatcaatttgtgatatgtcactatagaaatatgcatgttcaaattcaacttactttgatctatcttactttttttatggcattttaaatgccatgcacgaatgttcccttgaggaatttttttaaaaaaatccacttcctgtttggtttgctaccaatttttattcacgtagttcaatctctatactaacaatttgataacgcaaaaattgagtccaaatcaaacaagttaatttcgcgcatctggatcaacttggatcccgacagaaactcctaaactccattaatattgttgaagtaatccggttttgctggggatcatggcgtgtgtatcgctccgacgcatgctgcgttcatgcgggagctctttccagttttttagtgagtgcgtgcgcttcgtgtgttctccgatcgtgggatggcgcggtctagtcaggaggcatggcgaagtggcgggagtttaggaacgcatggcaacagcttcggtcgtgggatggcgcgatcaagtaggaagttgtgggcatgtaatttactatttaaagtttcctaatacaacagaaaacgctgccaagtttcttctcgctcgttctgttttgatcggctaaacttgcggtagttcgctaacaatcttcatattatatatgcagcctgcctccatcacgaccacgacgtactcacaacctcgccggagatccaagcagcccgttcgataataatcctatcggcggcggcggcgatcaccgaccggccaagcagcatatataccttcggtttcgtaatttttctctcttgttcgttctccatggcggcgaatttcgtctgcttcttcgccggcttgtgcatcggcatatcgatccaggcgaacgacgaagagcagcagcggcggcggcgcctcgtcgagctggagcggcgcggcgaggagcgggagaagcaggtcgccgagatggtgagccgggaggaggatcgcgagcgggagcggaagaagaacctggacaagctcgaccagatcgtccagatcctcaggaatctgtgaccggatagccgccggccgccgtggagacgaggctcgccggagctaggagagatgacaataacagtgttattactactgtactagattattactccctccgtcccacagtataaggaattttgagtttttgcttgcaacgtttgaccactcgtcttagttatattttttttgtaaatataaaaaacgaaaagttgtgcttaaagtactgtagataataaagtaagttataaataaaataaataataatttcaaaaaattttgaataagacgagtgatcaaacgttgctggctttctctgtaatcatttgtcccatatttttcgcttttctttgtgatcacttgtagtaccaaatttaggctttgttctaatgtgcaagtcatttataagcttttcgccaaccagtgcgtaaaacgagagaatcaatcacaccgtttagtagtttaaaatatgtgctaatgaaaaccgaggaacatgacgtttgaagtttcagaaaagaacgctgcctttaacatgaaagttccaattcttacattccttattgatgtttgttgaaaatatatcctacagaactgcatgatttattagccccctacattcaaaaatataaggaggattttgattgtctagttctatgctttgacccttggtaataaaataatatataggttttgctatacaaaaatatatttgttggattcatgttcgaaactcctatttaatgactatgatttcgtaacagtaagaaatttacggtgaaagcttgtctttggagtaaatattaagaaatccagacctccattgctttgttttccacaaaaattctctgaggttcctacgtttgaatcgtgcctaatagcctacacgagagagagctgtgtgcgagtaaaattaagctgatctccatgaggctccagtatttacaagcttgatgtatgcatccttgaagtcggcaaaaaatttagcttggtcctgtgcatataaattgatccatctgcaagtagtttggcatatgcccaatgtcaatggcctgaccaaacatgtgagcatgaaggaaccttgcaaatatatctatttgtcctataaatttgtgacttaaaacctaaagcctaggtcctgactgaaagaattgaagatagagtaggattagtgcatggagtttggaagcttatgattatccctagtacttcttcagagcttgtaacaagtaagcgacattatttagcatatctagttcaagaaaaaaaataccttaagcattcatcatcttcagtgagtgcccaatccgttcgcagtcctaccattgccggcatgccagcttcatagaagaacacaacacattgtattaaggtgatttacaaataatgccaagtcgattgtacattgtacaaggatgatttacaaaggcatgagctaagttgagattcagttatggcttatggattcatgatgacagtatttaaagggcatgatggaaaaaatgaatggacttacatgaagatggctgtggcttctcaaggagtactttaaaataggagttgtcgaaaatatttggattcccgaatcctttacctccaattgtgtgtgctccagataacacaaccatctcctgtgtcctgccaagtatcaagtttaacttcagacatggaaggatgctaagttttgaggaacattttgtagaagcctagaggggaaatcatgtgcagatacgtatcatgtacagatacataatttttaaccacgcattagtaaattttcataaataggcaatgggaattgaattcacaagatgtttgtgtaagtagagaaaaggaggactcacgaaaagccctttttgctgaataatgttttcagcgcagtggcatccaatgtttcttcaggaagtttaccagcaggatcagcagtactacagagtcaaatgcattatttcataagaatatgggtattactttgagaaaatatggatacctacatgttctttaaaaaatatggatgcatactaaatagaagcactgcctggaaatgaacagcctaaaattttgccaacattgcaagggaactgttaaatgaacaaaccactgtgatgttgcacctggaatctaatcgacctagtcttactggaatttctggccctccacatagcgcaactgactcagcaccagccacggcaatcaaatccgcccatgatactgttagcaaagtaacggtatatgtgtgcttgaagatacatcacaaccgaagctcaaaacagaaagaacatataaaaagggtgtaaaccatgtaccttgctgcacaaggtcaattacttctttcgcttttcctaatacctgttcagttataagtcattaaaaacagatatgggaagtcaaaacatgttgttcttcagtaaggatatgttactactatttatgataaaaagcaagaaaaaaaaggaggaaaaaaacctttatggatttatttagcccagtattttcaggtctatcaacttcataaattatagatccattcatgccacctgcaagatattgtcataaatatccatctactgttttacttctcagaattcatctttagataggttgaagtgtagttattcgtagtttgttcttgtttgcaatactctataattctactttatacacattcaatttttgctctaaaactgtatatagaacttcaaccaatgaagacattaaagatcgaacctgatttatcagcaatatcaaaagtccctgcatcatggaaagccaaacgaagcatgccagcagccttgaccttggataaaacattcctcacaccgttttgaataattgaaccatcaattggctcagccctatagagtcaaacataaaaaaacttctctaaaagatgtcatactgccgttttacgagaatgaaactactttgagtaggttattcttatacacaaatagctattgtaggtatactttattgacctgtggttcatttcgacttttgattctaggccatgcttccacaattgaaccaattaaacataaataaaaatactcatagaaatgtaaattaatacggttagcaactcatagctatggaaacttagagcagaataggaatatgattatggttgaatactgcacttacgcactcgctatatgaacatgaggaagtatgaaagggagcagagcaacagaagcaaagtccctccttgtataacaaagagaagatatgggacctgtggtcaccatacacaaagcaaattcagttgggcagaaatatatcagtaggcactggaagcattctctcagttcttgcaatggaaacaactcatacctgaaaagaaatctgcattttgctgctcagagggttctgaacaagcagaatcatcactactgcacctacgaccagcagcagaagctcctatcctcgtcttcccacttcttctaatcctgtatcatcacaattttcacaggtcatgtgccttccatgaacaaatgatggcacggttggtatcaaagcatgagagaagatgcaaacattacctgcaggtgcaacgactgcagctggagaagaagcgggaggaggctgcaatatgggggacattagtgagctccattcccgtccttctggccttgttaactgtcagcaatggctgctactatcctgaactgaaagaggaaaaggacacaactcactagtcactagtcagccagcctatctctacctggctatacatgtgtggttcccaactgatggtccccaagaaagcactttggataagctgtacttcagtggtaaatatctgcccaattgtagttctgaagaatatgcctctgatactccagtgattatttttagaattcataaatgccattaatgtctcttcctatgtggatatctttctttcaccagtaaatactcccatctgttcattaaaccttttatggtaatagagtatgatttgaactgtttgtgccttactaaatttgcaatttcaacacaaatctataaaacaagctaagcaaaaaagaaaaaagaaaagaaaagagcaccaacaattaacacaatttagaaaacaaagtaagccaagatcccaccgttaaactcaattacaagttactgctgatgccaagaaatcatgttcacagaacaagtgagaaaaatcatagtttgttgatgtaaacaggtagtacagaactttctaagcaaactgcaatgaaattatatgcttatttacaacagtcattgcatgtttgaatgtgaattatctgcttcagtgtgtaatatgtattgtcacatataaatgagagaacatagtggacacttacataaataggctacaaatttcgcaaacaaacacaggtggtacttgggagctattaaaagtaccatgtatacgcttttctttgtttgggaagctagctgtctgtgcctcaaatttacagggaattatccgtctatataacacagattgcttaggagtccaaattctttgaggatggattgaacgccacctggtcagcacaatccaagttatctccagctttgtcactaccaacacccatcaggtcgagataatgttggtagtgggatacaatgacgttcatcttatcgatggagccttgaccacagatgagatcgccatacaggatgttcattgtagcaccaaagccaggatacctcttggacaaagtgtcattcttggttggtttccagttgccaacgaatacatcatgggctgatggttgcttcctcttcattggagtcatccacctccagattgctgcttcaaatgctagggtcgcattctgttccaataactctgggtggttcaacagatcctgtttgataccctgaccgataataccatagttgtagttcctgaataccatgtacaagcagatttaattagtcagtaccttaacctaatcagttactaatcaacagctatcaagatagggataggtcagcctaaccagtaaacaggaagagcgcctcgaccataatactcgactccttcaacacaaggatacaattcgttgctgttgtcacaatagctttggcttgggctcaattcatggttgtagcaaagcccccaagccaatggaccaccagttgcgacactatatccacctgtagaaatcacaattccaatactctatcagatgctactagcctagggtttttttattcatctgaagttcacgtgttcggtgaacaacagaacatatcacacagttggaacgaaacttctgaagattgctaccaattgaacaaaccttaggttacaatcttctttacaaatcaagtacatattcaaatcggaccaaagtccactgtgttgtgatattcagaatttcagatgcagaattgcagttgtctacttttaatatggaaatgccaaggatgatacacgatgccaatcaaaactaattaacatgctccacatatagctgcattcggcagcaattaactactagctgagataaaaaattgttacctcccattctacacacggatccagattactttcagatcttaaaagcaacactccgcagagcacctatcctaaagattacagtaggccgcaaatctactaccaattcgtccatttcccccaatctatttctcgatccacgcaacatcaaattggtaaaatcacagtaacgatcagcgagaagaagaagaagaagagcagcacacgtacaggaggtcttggcgccgacgtggccgaggaaggcggcgacctccttcatcccaacctccttccctcccgtggtgccgaacccgcggggctcgaagagcgcggcggcggtgatgaaggcgtggtagtcccagaacccggcggcgtgggcgagcgagcggtcgttgcggtgggcgaagagctcctcgaactggtacgccttgaagtagtcggtgatggtgtcgttgcagcagaaccggctcccgctgcactcccaccccttgtcgcacgccttcgcctcctcgtcgccgctgccgtccttgtgcctcctcccctccgccgccacgagtagcgccaccagcagcagcagcggcagagatgccgccgccgccgccgcacgcgacgtcctcatcgtcgccggcgatgcggatgcggagcgcgtgatcggcggaggaggagcggagaagagagagtgtcggtggtggggtgggttggtgggggcaagctggaagggccgatgtgatatcgctgttcgggggtattttcgtaatttggtgttattgggttgtttcgaacttcagatgggccggtgttctccggctgtctaaaaaggcctcaaggcttaaggcccattttgtgatacggctttcattggagtgaaattgagcaatttcatagaagaagttcattattcatcccccaattatagccccaaattgattcattcaacccaaaaaccagatatggagcatcccaaactattaaaacaagatcaatttatgtccctaagcggtttggtgattttatctaacgtggctgcttacgtcgcatttcattttagaaaaagaataaacaaagctattggtggaccccaacatttcaacaacactcatctctctcctcccttctttctttcactttccattttctgatttcaatggcgacacacattttctttcagacataggatagggcattataagttctgcaccgtttctcttagtacgtgtattcattcatgagagttaagatgtgttattttcgcaacggctattattggaaaaagaaatcaagtgtactatagtattttctattgtttattggtaatccaatgtactaaacaaagagattaagtaaatacaccatatctttttactaatacaaaaagatttatatgttcggcttttggacgtacatctttacatgtaaggataaaaatagtcataaaaattctcgatcgatctagaattgttttcgtatgagtggtaccgtttctgaccattactattttaaacctaaaaaaattggtttttctaagagtgaattacaccttgagccacctttgattaccattgttacaatttggactaggctaaagccaaacttttcactttgggccaggtatctttacatgatgtttcaatttggactcccttcttcttcctccaactctcttccccctctctccccttcaatctgtaaagtcttccaaagaattcaaagggtagtttgcattttcaatcatcgactacctagtgcttgtggcttaatttcaaggacagcggagggtgcacaacaagtattcctactggtagcaactagcatacgaagaagctggccggcaatgacagacagttgctgctactttctgaactgacgataagaactaagtcaagtagcagatagccatgctcaagctcatgctcgacctccgctagtgctacatgttatgctgcacgcctgcgctaaatttccacatgtgtcgctcgagcttcaacaagttttgcaacgctcaagctccgccttcgtagtgccgcctgcatttgagctcgaaatcaacttcggcgggtggctaccctatgaagaagggttttgcttcttgccttttcatgcactacacctgatcgagaaagagaccttgagctgtacagagaaaagagagtaagaaagggagttggaggaagaagaagagagtctaaattgaaaccttgtgtaaatatacccggtccaaagtgaaaagtttactttttcactggttcaagttacaacacaggtaagaaaaaatagtccaagatgcaatttactctttttctaatttcgttcggtgtcgcattaatctcgatacttaatattttaattgataaatattatcaattattaaacagataagcgtcgttttcgaagatacgttaccgattccaaatgttctcatccttattcttatcgacttttgtttttctccatttgaccaaagcgttttgagacggagggctttgttgttcagccagcaaataggggagtgtttccagtgtttttccaccgaagaaaggcgaaaaaaaaaagagaaggcagcgaagatttctctagaaagagagacgattgtcccatatccaccgatgccggattagatccggtggactccaccgatccacgggccgggggcccattccaacttgcccagccactggtgggcccaccggccacctcatttccctcaccccccaaccaaaaagataaaaaataaacaaaaagtttaattcgccgccacgcgctttgccggaaagccccaaaagcccgaccaccactgccgccgcgccgcctcctcctcctccgcctccgccgccgccgccgcccgccggccatctccgtcgatccaccgtccggcgagcagacagcagcccggcagatctgcccccaccacgggatcgaatcggcggggggaaccgaatcggggagcgcgggaggcggggagcttagtttgagctcggtcggcggcggcggcggcggccatggtgaaggagacggggtactacgacgtgctaggggtgagcccgaccgccaccgagtccgagatcaagaaggcgtattacatgaaggtaagtaggattcgtcgacttgtcgtcgtcgtcgtcgtcgcttgattttggtctgatttgtgtttgctggtggtggcgcaggcgcggcaggtccatccggataagaaccccaatgacccgaaagccgcggagaatttccaggtaggtgttccgccattgttctactactggcaacttatacccttataatcaactcggtgcaagcagctcacagggtagtgtagaaccctcgattgaatcagattagatgcttatttagctggacagctgatgcgcaaagtccgagatgttggacagattagatgcttattagctggatagctgatgcgcaaagtcactatcccagcacgctgttctctgcggattggtttcgtaagcagtcgtgtttttgtttgtttggctagttaatcagtaatcactttaagtttaaggttatacagctaaatgcttattagtaaccaccattccaccagtctctattactctgaaaacataaaatgtgtctttgccttttttacgtttgagatttggttaatggtgattagctatatatgctaaactaagtgtttgcctatctaaactgctctgtgaaactcaacatcaggaagtttaatatctaacatttggaatcagaattatattgctgagatatatagtaagttctagttaggccattcaacttaactatgcagatcgaccattccacaaatgaaatctgtgtaataacatgccagttaatgatcgcgaggttatgatatgatatctctaatctacttaaaaaggcagtcgtccgtccgcactcccctccctccaccacgcacagtgagagaaaaagaggcatgcagcgcatgccccacttgccccacttgctccacatcctcgcctccccaaaaaactggatttatttaacagctgacagaaaacatgtaaaaacaattaaaaaaattggctataaacagaaacagggcacaattaatattttataggtccgttgcaacacacgggcatttttactagtattagtaacatatcacattcttctctcctccctaactccaaagcagcaatgaatatatttgaagctgttactgcatagccattgtagtattatatggcattggctttattagaaagggtgctttttttttttttgcatattttcctattccgtactattgttacttataggaattctcattgcaggcactaggagaggcataccaagttcttagtgaccctacgcagcgccaagcttatgacgcacatgggaaatctggcatctcaacgtatgtgctgattttctcaaagaaattatatgatgctcttgcaaaatattgaaaagctttataggattttcatggttattaatttgccatttgtggcaaagcaacgccagtactatagttgaacttctttttttttcttccattcgagagatgcagatttttgtgggatacttagtgattacctcttttttgttttgaataataataccagacaacaatgttctagctcatttggttttgaaattctatagggaagggataattgatccagcagcaatttttgcaatgctatttggtagtgagttgtttgaagattatattggtcaactggctatggcatcaatggcttcacttgataatttcggtgaagatgaacatattgacacaaggaggttgcacgagagaatgcaggcatgctcctttagctggtttattttatatcatcttccatgctcattgaataacatgaatacagtcaatggacattaatgtatgattcttttggcagctttcttttcatatttgttgcatttttcatattcttctgccacaatattctgctgagtagtatacttcaattcaggctgttcaaaaggaaagggaagagaaacttgcagagacactgaaaaaccgactgcacatttacgttcaaggaaataaagaggaatttgtccagcttgctcaagctgaggtgaccagacttagcaatgcaggtttttgtcaatactacccaccctcttcctcaactctgacttccccccttgctctcttcctttcctgcttaagtgcttattgctgcaaggacttgctcaacacttatcttagagaagttggcatatgatatttaaggaactgtacctatttatcacatgattgaatagataactgcataataagatatcttgacaagcatatctcatgagatggcatctagaatcatccacttcagctgaaacagatccaaaaattagtatgctattctttggctacacatacttcttgctgagcttattaattgaagtgaatatacaagcaccataagctcattctttttttttttaattatgcgcatgttgtaaaaggatgtgaatggcctatatgctattcctgcaagtatatgatgatgttagctcgatggcatattaccaattttccctatattaaagtatatttgccaagttcgtaaatagaacccattaaatgttcgttttggtatattttgttgtttttgctctgttgagtgctcattgtgacttcggttggtctttaagctacattatgtgaactttctcattctgtttggtcatgttttgcttcttgtgcagcatatggcactgttatgttaaacactatcggctatgtatattcgagacaagctgcaaaagaacttgggaagaaagcaatattcttgggtgttccatttgtagctgagtggttcagagacaaaggccatttcatcaaatcccaagtaacagctgcagcaggtaacataactcatcaatatatttaacttgaaagtatatgatacagctaatgtcatctattgtgctagcattatattaatcataaagaatttggttgtctcatggttctgtaggtgcaatagctttgatgcagttgcaagaagacttgaagaagtatcttagtgctgaaggccattacacagaggaggaactagaaatgttcatgcaaaaccacaaaaaggttatggttgattccttgtggaagcttaacgttgctgacatagaagccaccctatcacgagtctgtcaaatggtctgtcccagcttacccatcaccgttttactcatggttattttttaacataactagtgtgatagtgaattttgaacattgtatggatgccaggtgcttcaagatggaagcgtcaggagggaggaactgcgtgctcgtgctaaaggactgaaaacattaggcaaaattttccaggtatagcttgttcatttgttcattaaagttttggtgatgctgttgacattttcattatatgacttgtatttacccttcacttagcgggttaagctcaacaatgatgagggggaagcatcggatatgaggaatatagataacatggatgacaatgacgggagctcccccgatacatcaccaagaagggaaccaccatacaatcctatccctaaccctcctcatgctcaggtagcagctcattatgattttttacttctgtcgaatttctcaagatggccatttgccactgtccattatcatggtgccttattgattgactcattgagagattgaacttggagcacagtaattaatctataagaggcttaagagctcttatatagccttctctcatgacatgctaaaatacttttttctcttgttctagagcccatatgtggaggccccacagtttggaggaacctattacccattcaatttcccaatgccaacagctccacctggtgcgcagagggatccaattccatgacaccatttaagcttgcatgtgctgttgttctgtgcaatattgctggtgaaatactagatcatttgtgtgatgcatcatttgtacctgtagtagagaacggaggtttagctatccttcgcaccatttattcggttgtacaatcagagactggtcaggtagcagccgtgtactgttgtgtacagttgttaacgctcgtgttgaggcagtagtaggtcagcattggtgtacatggtttggtgttaatctgcggcctcgttccgtttagcttgacgtgcatcttctatggaaaatgaagctgagaaataaaatcatgtttatagttttgggtgtatttcatggaaatcattgtgaatgagtttgttggcggcaatgtcgaataaccataatgttttggaaatatcatttggatgagaaactgttggtctttctgcttactgtactatggcataagatttatcaagaacaaagaaaattcacagcatccagataatagagggaaaatatattataataattcgcacgaacagtgctcgtcgatgcttttggcgatgttgtcgccgacgtcgaagctctgcgtctcctggtaatctaggttgaagacgaaactggaggttaacatgttggcaataatcttgcaagcgaccgatatctatatgtaaagtttttaactctcaatccgttttttaatctcttcaataattaacgggaagtcctgcctaagatgaaagtagccattggtgacggccaccttcttgaagttgctctccgccatcaagaagttgaggcacttgctctttagctccgggcaatggtacgtctcggcgtagcctagcgtcgtcgccaccgtctccaccgacacgctctcccacagcttctgtgcacacatcagcttcaacctctccaatgcgtacctgtccgccgccacgagcaagctctcgaaaaaaccggtcgtcgtcgacgacgacgacgacgacgtcgatggcgacggcaaggcgtccgtgtacacgaagtgtagtagagctttgaacgtggccggatcgatgtcgtgcagggtgacgcacggcatggcggcctccgccatggacccgaggagctccgccttgaacaccggcgagcgcgcggcgagcacggcgcggtgcgcgtggaacgtctcgccgccgacggagaacgacacgtcggagcagtcggcgcggtccacgatgccgccgagctggccgccgaggttcgaccgcgggacgggtatagggccgccgtcgtcgtcgtcgccgccgccgccgccggcgtcggcgaagaccacgacaccgcagacgatcgtgaccacgccgtcgacggcgtagagcggctcgaggtcgctccgcctcacgaggtgccggaacgcgccgccgtagccgcgggggtggccggggacactcatcgggaaggccctgtccgagcagatgatcgacggcgcgccgacgccgccgtcgcggcgcatcaggaaggtgtggaagatggccctgacggtgttcgatctcgccggcacgccgatgcgcagggagacgtactcgccattgtcctcctcgcggtagccgcgcgggtagcatctgatgacccacgactgctccccgtcgccgacggcgaagctgttcgtcgtcgtcgtcgtccctgggtactcgagcttcaactcggcgaagctggatgatatcatcatcgtatttttggtgtattattaattaattgcaaaaatatgccgccaaacggacaaattaataaagtttatatatatcgaaaatctcacggacacgctctgcgtatcatgacgtgaactagagtagttcatgacgtgaaccatagtacgttgtaggaatttattttcggcaagataaatgattccttttttatgtacgcatttgagtcatattttgattggtaggagataataagtacttggtgttttatgtttatgctaaactaaacatgtctatctttaactattaatttttaagaaaatgtatggtttaacataataagatgttatgtttttagattcaccatgaaatatatttttgtaatatagatatatttacatgttgtcaaactatatgattttttttattgtttgacttcagatacaacaatgaatttgtcaattttatggattagatatgtcatataattggattcgtaatcaccatagataccacatatatacctaatattatacgataaggtatattgaaatataggaaaatagcagataagaacaacaactcttcgtacttgagggaaggggattgggagtttacacgagggaattgatggtgagattaagataggaatttgatttttcatcccagtctcttgtttggtagaggtaatggaaattgatagggagtttagttggagattagatcattaatgaaaatggatggctgagatttgtttaggcgaagtaaaggagaaatttcctcccaattacctgcccctacccaggtattgaaaatgagggagttcatttctcaattctctatccccatcccactaaaattcccatgtcccccaaccaaacaaaacagttaatagcctcatccctctaaactcctaatctcttctaaaaactccctccaaccaaacgggccacagtttacacgagggaattgatggtgagattaagatgggaatttaatttttcatcacagtcttttgtttggcagaggtgatggaaattaatagggagtttagttaaagattagatcattaatgaaaacggatggctgagatttgtttaggcgaagtaaaggaggaattccctcccaattacgtgcccctacccaggtattgaaaatgagggagttcatttctcaattccctatccccatcccactaaaattcccatgtcccccaaccaaacaaaacagttaatagcctcatccctctaaactcccaatcccttctaaaagctccctccaactaaacgggccgctaaggaaatatatataggttgtcaaaatctgacctaaaaagggcaaggtcttatttactcaaagttttaacacgaagtgtagtagagctttgaacgtggccgggtcgatgtcgtgcatcgtgacgcatggcatacggtggtctccaccatcgagccgagggactccgccttgaacaccggtgagcgagtggcgagcacagcccggtgcacgtggaacgtctcgacggaaagcttctggtttttctttcaaggagtaagggcaaaagctctgccgaaggatttcattaagaagggaaaggcctaaggttcacatcatacagattacaaggatcaaaagatcccagacaaaaggcttctggctattttttggtagtcaagtttgtactcgatgaaaccggaggccagcatgttgccggcttgccgccggcgaaggatgaactttctcgagagagaatttttttacccacagcaatgtgaagaagatcgatggtgaggaagcgacggtagttgctgccgataccgctggcggtttaggcggcccatgaagtgcgcagacctagtcaaggcccaagttactccagtctaaagaagtctaaccgcaattcccaagccaaccaaactattcgcaaaataacttttttctttttaaatctagggcctga

SEQ ID NO: 4401 - DNA, 62308 bp, Oryza sativa
  unsure (1)..(62308): unsure at all n locations
ctagattcgatcagcaatcaatagctacaactataagcattggctacgcaatggagtactttgttcttttgattctctgaaactctgaatctctacaagtcaagcagagctcctctgctctgaaatatctgaaactctgaatctgtgaaattctgaaactctcagaaaattctgcgaaactctgaatttgtgatcacctgacgaacttctgaacgccttcgaagaaatcgagcatgtagtcctcgagatcctcgaggctgtacttgatgtgcttcgccgccgacgaggagtggcggccgctgctgctgccggactccagcagctgcctcgaccggccgacgaacgagcggtacgccgggatgagccgctccgacacggcgatccggagctcctcccggagctgcgggtcggtcaccttccacgccgtctggctccggtacagctcctcgaacgccgcgttgaagctcctcgccttctccttcagcgccgccctgccgccgtgcccgtgcgccgccgccggcgaggcgtcgtcgcggagcgaggccagcacggacatccacgacgcccggaggtagcctgtctcgtactgcctgatctggccgcggtggcggcgcacccagtcgtcgccgaggagctcgcgcagcgccgggaactccaccatcatcttctgcacgatgtagtagatgttgttcatgaggaagatgttcttcagcccggcgtcgtcgtagagcctcgatttctcgtcgaggttgcggaggaggtgggtgaggatctccctcatgcaccgccccgacggcgtcgacgaggcgccaccgccgccgccgccgtcgtggtcgtcgtcgttggtgtcgtggttgctggtgttgttgtcggcgaggaccatgtcgagcgtgacgcggcactcggcgaggaggccgcagtagttgagcacgtagcgtgtcatggggtggatctcgccgccgaggactggtcgccgcgacgactcgccgtggatgacgttgacgaactggtcgatcgtgtggcggatggtgctgcccagctgcgccgcgacgccggcgacctcggaggagaagaagtcgcgggcgtctccggtgaagagggattcaatgtccggctcgacggcggtgagcgcctcgtacatgccgagcatgcggtagagcttctccgtcgccggggtggacatggcgacggcgtccgcgaagccgatgagctgcaggaggcagcccctggcgacgtcggcgaagcactcgtggccgagctcctcgtcggaggcgaacacctcgtcgcagaggcggcgctcgccggcgaggagggtcttgaccacggctctgacggcgtggctccaccgccgtatcctctggttgagcaccccccactccatcctgagcacctcctcgatggcgacggcctcgacgccgaggtgcgccgcggactccgcgagcgcgtcgcggcggacggcgacgtacacctgcgcgagctccgggccgtacccggcgcgcagcatgcggtccgcgacgccgctggcggaggcggccgcctccggcgagagcgcgtcgcggcgcggcggcgacccgtcgggggtcgtcgccgcgcccgcgtcgtcgaggtcctcgaacgagtcgagcgagaggcgccgcgcggaggagcccagcagcgcgcgcacctcctcctcgagccgcggcatggcggcctgcacggtctccgcggcgcgggacgccagctcgccctggagcgccgtcgcggcgatcgcgtcgtccacggcgtaaagataatcaaccatctcggacggcgacgacaccgagttgcaccggcggatgatgtcctccgccgccgcgaacacctcctcctcctccgcctgatccacctccggatgtgacaaggggaacatgggcgcctcaccttcgtacctggacagaacgcgcatcatgtcatcggccgcgttcttggacaccgcgaggctcttccccatgtgcttcgcgacctccaccacggcgtcccgcgcgccgtccgccatggccgtcgtcgacgcagcaatcgcctagaggagaagcaaaggagagagagagagagagagcttcttggtggtggtgttcgtcgtcgtcgcgggcgcgcgcgcgcgccgggtggtagctttcaaagaccgggtgctgtgcagcgcgacgcgaccaaccaaacgcgccgctcgtgctgctttgctttgctcggcgtcctcggacaatttccacgtatcaaaacactgcagcgccacacctttctaatactcggggatgattatctcgtgtcgagtttatggaaaaggctatcttttttttattgaaaaacacagttcagacgcagttgttttatccaattaacacctctaatcatgtcagtgtatcttaaaatcgacgaagtacgggtatgtcgtgagaaaaagaaaactaactgtcgttgattgttgatagaaaacacgaggtctgagagatctgcttaattccagtgcaggttcaaagctcgcctttgaatatatgagcgtaccagttgatttgatcctgtaatcaacaagaaatagaaacaaaaaattcgtggttaaatctataaatgatagccgatcggctaggtgccgatgacatatcatttatctttgagtcgatgtcatatatgaatcgatcggcgcttataaatagatagtaaggaactaaatctattcgatcggctgtagatattaacgatatatagttcttatattaatatatacttaaattaagtgattgggatagatcggtcaccatgccgagacagtataaaccacttagatcgaaatatatattaataacaggattatatatgtttatagcatagctgatcagatagatctagcatgtatcagctaatactccgatactactttatataaagatatcaaaacaaatataatattccaaacaaaagcttaatatacttaaatgcaataagatcttgacataaatggcggatttaatatgtcattgaagcatatagatcgaatatggttaaatcagataagatcggctgaaactccgatactaccctaatcggcaaccagagggcaggctagagattgatattctaagcacgacttaatagatcaaactcaactgatgcagcattaagtatgaaaagaagaacaatatctagacaatcaagccgctaggtgtttcataaagtggtagatatcttatataatctaggacaacgtcgttatttaacctaatcggctgccttctattaacatatgttagccgattgtaggttagatgacgatattgccaaagattatgtaagatatatgataacttgacgaattatatagacaagattagagtgtcataaagatgaaagcactaatctcgagaacacaagtcatcataacaagttttacctcttgttgaagatcgaaaccgatgcagctcaatccgaaagcaagaactcgtcgaaacaaaactaaagtaaaaagttggtgatgcgccgaaattgtattgaacatgtgtgttaaaaattacatagggctcggggtctatttatacccgagaattacaagatatgtccataccggacacgaccactatctctaacaaactctaagataccataagtctttgcggcagacttttgcccaaacatatctctaaggaagttacataaaacatcataattaatagatacaatcgccttctcaggactctatccatgtgcggcaatcatcttgaagcacctcaattcaacccaatgtcatacaccaaattatactgttagaatcggctgcatcggctcacctagttcgactcagacccagccgatcctaatcgtagccaatctggacttcagccgattctttgctctgttcttggatcaatctccgccttcgactacaccttgatctaatctccttttccgatgctgatattaccaaatttggtcattaacactaactaactgataaatcatgctcacttcgtgaaaaatgtcgtttttaatggaaaaaaaatgtttttttgatggagaaggttgtgcttttgatgggaaagtcatgttttttttcccttgttcgggaattgtaaccgtgtgcaaaaatatgtacggcatacaagtttgtattcaataggaggtagtaatacggttttgtccttctctaaaaaagtgctaatacggttttgtactttcatggtagcttcgtaggatttggaacattcgaactcagctggtaggaaagatgcacaatggagtgcgagtgtgtgactacttgtctacttccctcatgtcaagtgttgtcttccaataggccctacaatttttatttggtagatcagatgaaatttcagatgtccaatcccacaatccttgattggttgataatatcaattgtcaaataactttttacccaattcaggattgcaattttttcaggatcacattttccaacgttgacaaatgagaaagcttcaaatttcaaccataacaaggatcacatttagcgggacaagatcacaggcatgaccaaagaagatattttgcaggataactaacgaattgaagtttggaacaatgaattccatcgcatatcagaaaggtcattaattattgttttcttcatattttagagaagtcgacggtcaaattactcggtctgggacaggcagttagcctatgtgggcccacaggccgagaggccgggcccaccaagtgccaattgggcaagtggcctagaaggtcaagtataaagattcttgtagctgttctgtagacggagtccaaatcgtagaaagttcagacttggtactaacaaatcgacaaaactgtatcagtagtgacgtctcatcccaaaattacacactgttcattgaaccttgcttaatcacctccagtttcccccacttaatccaaccgaaatatcagagtgcccattgcacaagggaaaacatcgaacctgtgccgattcgatcgaagtccatcagagaatatccttctgaacatttgttgtcagctcttcagtaaacctgaacgattctactccagctgatattaaccgtcaagtctgggattgcataaatgtccctttatcgtcactatcttctcattagtgtccctttatcgtcaagtctgggcttgcatcacagctgacggtaattacaatgctgcttccgtttacgagctcttcttgctggctcgattgcgatcgcaatgcgcacagcttatttggcaaaaaagagcaccgtcgcggattaaattcttcatgtggttggcaacaaaaggccgttgcctgacagcggacaatcttcagaagaggggctggccgcatgacgcctcttgtggcctgtgcaatgctgagatggagagctgcaatcacctcttaatgaaatgccccctaaccaatcgagtctggcgcatgctcatggtttgctggttcatatggaaagagcgcaatgcgcgtattttcgagcatgtctctaaatcggcaacacagctcttttgggccatcagggaggagattattatttggagagaagcgggcatcttcaagcaagtagactaatcgactagtttctcagagtttgttagaggcgccgtgttcttcacggtcgtttatttcgggggtgttagccacggctagcatccctatcgactgtttaatgtcgatgatgtaaaagttgtatcaccctctctcttaataaattttgggcggccaaccttcggccgtcccggcaaaaaaaagtctgggcttgcatatagtatgtatctgattctgacaacccattgaaaaagatcaaagatgtcacataggatgaattatcatggttaatcttgtgcattgattctctctgatggacaccatgcctcttgtctgccggtcctatatgcatagtattaatcattttcttcgcagtttttgtatatgctgaattaagtgatcacacaggtgagaaaaacattgaaactacgcatcacttcatattcgttcaaacggccagtgtattagagatggcaaagcatgattcaggtgacgagtaatttcgtaataatttactagctagagcagttcctattcgatcggagtggttgggaacacatgaaagcatgcccaccttgatggatgtcatgactttgaaatgaaggccgcttctgaattcatcagttcacattcaaattttctactttgcccgaccaaaatactactcaacaggattgtaatctcttatgtattgtttaatactactctgtaatctaccctgttttggaaacaaagaaaaacgaatactcgtatcgaatttaggaattacaaaactcactgaaagttatgtgcagtcaacgtccaaggttcattaccacagtacgaatctgagcaacatctattgaaaagatccctttgggccaagtgagccaaacaaatgtgtatgctgtttctatcaaaaagattactgtatcacgaattcgagcctctgatttcatccgagttggacagtggatacaaagttttgacttttatcttgctggattgctactcaattagtctttcctgatcaatttctgatctgatggcttcagccaacttcatcaacctgatgctgtggtcttagaagaaatgaacttttgttgctcacagtacagactccagaacccattgtcttcaaggggatttttttttttttgtcttcaaggaaaaaaaaagttcagaacccattgtatttataagtgttgctgtgcttatgttcaatcttaatgtccttcggttaaatattatgttatgggcatgcagtcacaatcaaattacatgactttggtcgccgaccttcactatactatattcacacaatcgttagaatattcatgaggcagatttgctcatatcatcttggatgttcggccatcctgattataatacgccgcacgctgattaaatctacgatatacagccatacatgttcatattatcaaccgttctaaaccaaccatccttttgaatacatcctttgttttaaactttatagtttttatatggaaattgaattgtgttcttggctgtgttcgtttcaacaaatgagaaaactgcaactttttttacatgcacgcttcctaaaccgctaaacggcgtgtttttttttaaaaaaatttatagggaagttattttaaaagaatcatatatttttttaagtttgaagtaattaatacttaattaattatacgctaataacccatctcattttacgtatcttctatctcttattttctatgctctcaaacacaatcttatcgaattcattttggcaagaccaaataccaaatgggcctaatttgtctattagaagagcccacaataatgggccagccttgtgcatacatgtacgtacagtccactaggaaccaagccatatttttgggcccaactaaagcctaaggcccatgtagagatccctaaccatttctagggtttcttccctcctcttagaccgccgccgccaccgagccactgcttcttctgtgcggagagagagagagagagagagctacccttcccttcccttctcctcctcctgctccgccgccgccatggttagtcctgagctctctccgctccggtacgttgatccgctcgtggtttgttccgttattgatctgacgtctcgctgttgcatcttttcgcagggcaagtactcgacggagccgtccaacccgaccaagtgtaagatctcgatgatatcctttttccgcgatggtttggtttcggtttgatctgtctgtgtagtggtttttgatgggatgttgtttgtgtgcgcagcggccaaggccatggggagggatctcagggtccacttcaaggtgcgtttcgtcaacctgctctgtgtgcatctctgtttttgtgtatttggttgatttgttgtaggttattgtgtttgctcgttttgtgcaatgttgttcggttagggcaaataattgtgtggatggcatatgcgaaattattagagtttcattctgtagatagcatcgtgaaaggattggattctcactctgtagatagcattgtgaaaggattggagtctgatgatgacctaaagagtaaaaggttctgttctgtttttcagacgaacagttcccacgttactttaggaacattgatgcactgtcttctggcgaactgttgtatctcaatgacaaatggttcagagacagtgcgacatcatgcttattccttagttatgattttggcctgatagagatcataagtgtttctgcattttgttcagaacctgtgtcgtatatctgcaaagttagattttcgctatgcgaaaatggtgtaagatattgtgaactgcacataattttttttgacgatattgcttgcataatgctattcatgttttgatgttgttacctgttcaagtgcgcactgtacaacctggaggaagttatttttattagcctgattgttaggtataattctattcacatgttaaccatttcattgaattttcttgatctgattaagcttagactttcacaggttacagctattttatgctgttctattactcattatggtcttgtttctcatgttttccttatagatcttccttgtacataaaactattgtatcattattgtagaacatttggccttcttgtcacactgctcataactctcactagaagttgctgttgatatgaaatcatttcctggtactttgtgtgcatggtaaactgaattcactggactagtttattgtaagactctgatgcgtatgcgatggtttgtttcttggttcttgttatcctttttcctgtttctctagctgaatgtcaaatgctctaataattgctgcagaacacaagggagacagcgttcgctcttcgcaagctgcctttggtcaaggcaaagcggtaccttgaggatgttattgctcacaagcaggcaattcccttcagaaggtactgtggaggcgtgggccgtactgcacaagtgaagtctcgccaatcaaatgggcagggcaggtggcctgccaaatcagccaggttcattttggatctgctgaagaatgctgagagtaacgctgatgtatgaacctgttgctagttttcctctcaattttaatggtgacactcttcatatttttttaatatgcttgggctaactaatggtttgttgcgtataggttaaaggcttggatgtcgacaacctcttcgtttcacacatccaggtgaaccaagcccagaagcagagacgccggacataccgtgctcatggacgcatcaatcgtaagttctcgaggatggatgttgatttatggttccatttgtagtttacttatattgcttttgtggccagcttacatgtcctcaccctgccacgtcgagcttatcttgtcagagaaggaagaggccgtgaagaaagaggtatttgtttctttcatcccattatagtctcagttgttttcgtgaattaggtagtttgtgggaagtaatgctttggatttatatagactattcaagctgtttgggccacaatgttttttctcagtgccatgttctgtgcaataatacaatcatgatgttaacctaaatccatgtatccttctcagcttgaggtccttgtagttggagctaaattttgtgggcgatgccccttttatcgttccagcatttctttagctctttttttcttctaatccatactgtcaattgtttcttttgtagcctgaaaccaccatcgccccgaggaggcagtgagcttatccgcccagagtcgcaactttagttcattttctagtactttgttatggcattgtgtgctatttatgtttctggtaccattgtttagtcggaacttgttaagtttgatgctatcctttcgtttgtgtatgttcaaatggtaacaattacttgccaacttatctgccaaaattttactgccttacaaaagcgtcatcatcaaactgccttgattgcttacagtgattcaaattaaatcttattttcgtctatgtaaaacggtcggtcgttcccggcacacgatggttggattgctgatgctacaggccatctagattcacaacaattcgattacatctatattattgtgagcttggcataatcatattcagggcctgtttagttaacaaaacacaaattttcatgctgccacatcaaatgtttagacacatgcatggagtattaaatgtaggaaaaaaaatcaattatatagattgcgttagattgcgtgtaaattacgagatgaatcttttaagcctaattgcgcattgttaatgacggattaattaggtttaattaattcatctcacagtttcttgacagaatattataatttattttgttattagattacgtttaatacttcaaatttaaatgtgtgtctatatatctgatgtgataactacatccaaaaattttctctaactaaacaaggcctcagtcattcatcattttttgtttggtggtaacacgtaagaaatgtttcttacaaatttcttacaaatgatacattgacgtggcacacaaattcagccattcataagcggccatgtttcaaaatttcttggagctaagtattttcagctctagaaatctatgaatctgagctgtgattacaccaataacatttggattaatcattttgcgtcagttttagggtaaatttaaagggatttgctatacaatagcctgctttttttttttgtttttatcagctgaattgctggccatccaattgttcaaggtttgtgcatgtaatcaatgaatcctaaagttagccctaagccggcttctccctgcatccgaggcttagggctaattttagagttttattgattgattgataatagaggacatgcggtccctttatatacagggtggacatagaaggaactagtctataatattatataaaccaatccaatctctatctctaactttccaataaacctcatatctttcctaactaggtaatctcttatatttatgtgacttattcctaaattatcatacctaaactgttgcatgggcctggcccatgcccataacaaactattaaatcatattatttatgtcatagagtacttttgttaggccctagtagtccagatgaatttgtacttttgtttttgtctttgtctttgtcttttttttaaaaaaaaaattatgcaaaaaagtggttttgtgtgtcccatttgtaattttgttaccaaatttttaggtgtagtgagtagttgtgttagtaacctgttttgttagttcttatatggtttttcacatatacttgaggtgtttaaaaaaaatgcttcatattaatcaagttgatacgctatctacatgataataactattaaatcatattatttaggtcatagagtacttttgttaggccctagtaatccagatgaatttgtattttgtttttgtcagttttttttaacttctccaaataagtggttttgtcattgcttgtcttatttttttgtcaaaaaaatttactttatcataaatgagcataatttcaaaaacggtgtgttttatttagaatgcaagggctgaggctgagcagaaagtggacaagctaaatttctcctgtatattgacacatggttgttttttttatgctcctgtatattgagataacttgcaatatgtatttgtttctcaagactagcggataaattaaagatgatgtatattcgtgtctggtttttgtatttttttaaaaaaaatattttgctacttattaatcaagttcatgcgctatctacatgataataattactaaatcatattatttaggtcatagagtacttttgttaggcacttgtccagatgaatttgcttgtttgcttatgcctggcatccattacaagtatacctaacactaagatcgttcactgtttccacgtaggggtagggagacaaatcgtgtaatggctgttgattgattattatattcttcagtatatataatcttgttaaatattgtttgcccgggtgcgtaaagtcgcgcaatcatagcagcaagaacatataccctggcaagaaatgccgagcaagattactactcatgttgcttttgtttatttttacaaatcaaacctctgaatgagctcataatgtacaatactctctccatctatttttgatagtcatatttctaaatctgaaaaatttatttttgataatcatatttcaatccaacaatctatcatcttaatgactttctcggatttaatgcatgactctctattcttccacacaagattggctatatgggcatcgagaaatataaatattaatgattcgcttgtttacgaggaataattagtagcatgtttaaatgtatgataagtataattacttattcttagtctgtgtgttaagatgaaatatgactatcaaaagtaaatggagggagtattaagtagcctacaattctctttctaccaataaataccttgattttttagccagtgcacgaatgcaacattgattatgcacagaaaagtttgcaactggagagcttcattgatcatgtggcaggccgtatcccttttgttttctgaagactaaattgatttgtacgagtattgctgcttaattgtagccactcaagcaggagacttaggcgtgtatttgttgacataattatctcaaattctttcttgcatccaattagtacacttccctgtcaacatgtctacagttttgcacgcccagtatttcgctaactggtctgcaattccatcaagtattaaaaggatttttttttttgcgaatgcaattccatcaagaacttgtcatggtgaagcttcagattgaatatcagaattgagaagattttcaggattttggtctcacaaaatgtatccccagagcagtcgctatccatttcattgcaccattacaaaaaataataatcaaggtaccctttggatgatgaaggtttgcccaactcacagttggataatactggtagagagtgatgcctcgtctatgattaagataataataataattatgccagtccacttcagctcacagaagacttcagatagagaattgattttgtcaaatcatatcatagtacacacacttcattatcaagaaaagggccaatatacgggagtggatttcaatccctcgaggggatatctccttgttatttgcatgtcacttaaatacttatgaaaaaaaattaagaagatgcattaacatgtgatatatcactccacaaacatgcaagttcaaattcaacttctatatctcgtaacgaaaaaaaataattgtgaatatacgttaactagttatagtttaatttgttttttcgttgcgagatgtagaaattgaatttgaacttgcatgtttgtggatgatatatcacatgttaatacatcttcttaattttttttacattttttcataactatttgagtgacatacaaacaacgataggatatcccctagagggatcaaaatagtttcccccaatatattattcttgcaataaccatcagttgatcacacaaatcttgagccctgttctggcaccaatgctggcctctagcattatacaacttcagaatacaaatttttgaatgctccttaaggataagtattcataaactgaacaaaaattttctgaatgttcttgcattagtttagtaactgggactagtttcatttgcagagatgcagtcccttcttccaggtcttgttcgcttcatttccgttttgctgtcgtccgaagattgaagcaacaatcaagcctcctaaacaaagttgggcttttttttagcagaatatatatgctctctcttttacgactgcattgtttttctaagctttttttaagaggactgatcgattccaactggtggcagagggggataatggggctaagcccgtgtatttccagcaaatgggcagttcgtttcaaatttctcaaacagactagtttggggtattggtggattgtgtgtttttaagtcagcttgttttttgggcaatttttactggacaaaacacaaacgagcttgatgccaatctgatccacaagactgggcaagagaagcgcgcgtgaggtcagcatgcgcgacacgatgctgacacgtgttttatctgatggccccaaattcggctgaagacacacaagaattcagctggatgatggctagacagtccctagctattatttaacttatataaacttttaaattcaatacatgtgtttagtatttcaagctgtgcacctgttccaagcagggcctaattaaattgtatttaggggaaaagtacatgtacaaaaggtttctatgtttctataatactcttacaaacgacgatgtggaacacaagggtgttgattttctataactccgagcaaactaaaaatcaaacggttataactatgtattttttcatcatgcattgcacagctgattcaattatgttcatagcaaaaggggggaaaaaggtgaatttgtattatatgttatgataaaaagaacacttttacaatgctcctgatatcaatcagtcccacttagatcccaacaagagggaaacaagaaaatgtacacacgcactgactactcttgaccagtacgtaaaacaatcacagtaataactactttatctgttttatatcataaaactttctagcattgtctacatttatatagatattaatgaatctagatatatgtgcatagattcattaacatctatataaatatgaacaatgctataaaattttataatctgaaacggaggtagtaataaacagtggtagcagcagctagctagctaggctaaaagcttaaaattaagctagtagcaagcagctgctggaggtgtcagcggatgcacttgcccggcgtggtccatccgaagcctccccggcgcctcgccgccggcggtgccgccgtgtagttcctccagtcgcggaggacggcggcgaggtcgtgcaccttgttggcgaggccggtgcagcagttggcgtggagcgtgcagaccctggccatgtcgcggctgagctggcagaagccgccgcagtgcgccgtgtcgaggaactgcatccggacgtcggcgcggcggctgagctccgcctgcgcccgctccaggacgtgctgctcgttggtccccggcgggaagcgccgccgcgcgtcgcgccaccgccggtagaagtccaccgtccgcctcgccgcgcgcacgtacaggaagccgccgttgggcctgttccggaggctctccgggtcgccgttgtagtagtcgttggccaccgcgatgtccgacgtgatcgcgatgtgccgcagcgggttccggaaccacatgatgtcaatgtcctgaataattaatgcactactattaatactactttcgagttacatgcatcggccagttcgccgtaaaatttggaatattatgtactatcttttgtagtaaatatttaacgtttaggataatatttgatcaaacttttaaaatttaaaccatcaatattttaccaaatgcttagtttagtttcgagaaatggtatacatcgaaaactactatcataattccacaaattacttttttcttagataatgagaaaatctttataaacttactacttcttccgtttcatattataaatctttctaggattgctcaaattcatatatatgttaataaatctagacagacagacatacatacatacatacgtacgtacgtacgtatacatatatatatgtatgtgtatacatatatatatgtatgtgtatacatatatatatgtatgtgtatacatatatatatatatatatatatatatatatatatatatatatatatatatatattcattagcatctgtatgaatgtggataatgctagaaagtcttataacataaaacggaggaagtagattttataaacgtattctaatatataaaattgattgttgaaaatataaaattttatccgaatctttgtcctaaacatcaaatgtgtttacgaccgaacgatgatttgagttgcatgcgatcgacaaccagtttatgctgtgaagtttgtccaggtaaggtgatcatgattattcataccgtgaagaggaagttgaagccgagctggaggatggtctgctggaagaggttgcgcccccacatcatgtcgaggtagtccttgctcatgaagcgcttctcgtcgctgtagtccacggcgccctccggccgccggaggaggtagcagtgcgggtgcacctggcggcaccgggcgagcgccgcggggtccatggccacgatgaggacgtgcttcagcagcggctccgtgccctcgccgagccggaagctctccaggaagaggtccagcagcgaccccggcgccgcgtacgcccggttgatcgacgtcatgatcaccgtcctgtcgtccatcgacgcgttcctcagcacctcggtcaattctgacaatgctttcatctgcaatcattattattatcttttttcagcctttttccattagatgtttcaaatttgaagatcgatcttgttgttttaagaatctgaactgaaagttagtagcaaatctttccattggatgttgcaaatgtgaagatcttgttgttttgtctaagaatctgaactgaaagttagtagcaagtctttccattggatgttgcaaatgtgaagatctatctcgttgttttgtttaagaatctgaactgaaagttagtagcaagtcgagctgtaaaatttcatagaaagttcactcgaatcatttggctgagttgtaaatgatgtaatatatcctatccccacaaggctgcttggacaacaggttagcatattcgttacctcatcagtagtcagtttcagctttaagcttttgggctctgtggatgtgacaaagctacaggaagcttatctcaggctaatgttggaaaagtagaattggcactttggcttgttgatgattggcttttaaaaaaaaaggaaattctagacttggctaatgctgtggaagatatctgcagcattatattggatatggatttgcttgtcgttgcgtcttagagacttatcagctcactgaatgaagatgtagatagaggaataatctaggacgatagaaagggagaccagtagactacctgaccactaatacccgtctattatgcatagttgcaacttccaactatttgcaacgaaatgaaacagtcccaattaattgcacggccattatctattagaattttgaagcatcttgcaagacaataagaacaagaaaattgaaatgaaaaaaaaggtataaaaaccctttttttattatgtaaaagtataattcggcattactcaaggaaactgcactgaagatgttctcatctcatgttcagaacttcagattgttaagcagaaaacgcagaaagcagcatcggtagatcactgacctcgtcggtgacggccggtggagaatcattgttgttccaggaggccagggcggagagcctccagttgatatccatagtagcaatgacgaacgccgccgtcagcgccgcgccgaggaagaaggagatcaccgggatgagcttgcccatgtcccctctcaccttgcaagccatgttcttggcttcttgctgctgctccctgaacaaggtgatcagaaacaagatggatcatcagagaagagttgtgtggtatgatttatatatgcatgcaacatgtagcttttaccactagtttgttggctcgtttgttacaagacctccaaggaagcccacaggttgagccttttctaaagaagagaattttttagccttaatgttgatgattagggggccttgaattggaatctagtacaaaagaattgttctgaaatgttgatattatgcatgataacaaaaaatcaggcatacaacttgcgagagtagtggaacgggaaagaatatgctgcccaaatgtccaagcaaatgagtttgtgcaatgccaatggatgaatcaaatttgcgaagctattctgacgttggaactcaaaaatgaaagatgatgcgtcaatttgaacaaaatctgtattaactgaatgtaatagctaggtagcgaagccattggaaagtcaaaaggagtttttccttgttgtcgctttgcttcgttggtatttgaaaaaaatgaaacgatattaaaaatcttttgcgtactccgtaaaagtgagttgtttgcaagaatttgaagggacataccaattggagaaataaaaagtcagagtcaatgcaattcaaaagaacaaaaaatgatgccttcaattcgaaataaaaaccatatgggtttaacatcctattgaaatcctcaatagagaaattcaactccagattcctatgggtgattcgcaaaactgatattgaaacccaaaaggcacagttgatctctgaaaaactgaattcagaaatttaccgtgaagcagttcatccataacctatttatgttaaattctgttggaaacattgtcatgcaagtgtgatattattagtgtgaacaagtttgtatgtacggaatcatgtacgacatgcatgtaggagatgtattacttggtcagctatgatgcatgtgcttgcatgagttagttgagttggttaattagtggctgagccatgtgttcgatgcatggccagcagagttagtgcatgcagagtacgttgtggtcaaggtaattactactaatttagcatttgtatttaaggaggggttcaggaagcttctacagttgaggttgagtcttgaaataaacaggacaaaaaaaatatggtgtttggaaccacagaaaatcagtgtctattcatatttgcgttcatcatgtgtatacatttgaagttgagcgatcaaatcccaacaaaattcagagatttcagtcaaaaataaataaattcagaaatgtcactacacttgtgtaatgtactacttaccggccccaaaaccgtcgttttgtactttgtctgaaactgatgtaaaaacgataaattaaaacgccttccctgaattaattaatcacgacgatcaaacgacctcgtatcataacaaaaataataataaataatcatacggaattgtatgcgattgtgagcaataacatcctaatgatggtgattgaagatctcgaagtcaagagagggaggactcgcggttgatttacctaccgagacgggagttaaccgctcgcggcgggcggcggcggcggcctgcgacggcgagggagtggaggcgacgagagaggtgtgggcgagcagccaccgcggcggcgatgaggagggggtgcggcggcggcggcgtgccggcgtgggagtgcgtgtgttggcgagagacgacgacgccgcggcgccgcctttcgccctctcccccgcgtgcgcggttgggcttgggctggctcgcatgtctctggccgaaacggccgtaattgggccgcgtatcgaaggagttgggccgaattgacgtaaaccgagtacggctccgggccgaaactaccgcgttgctgggattttattgcgaacaaacattattattacctgaaaaatatacatgcataccaatataccatgctccctccaaatctaaaatataaattggacaatatctttctattataatatactctctcggttccaaaatataagtgccaaaataaacatttttaactttgaccgctaatagcaaaaaaataaaaataaaaaaaataaatcatgtaacattgatattactagattttttattaaacaaactttcataatatgcaactctttttatttaaaacataatattgttggtcaaagtatattttggaacagagggagcatccaataaacaaaaaatatatttctatttttattgcagtattttgtaagacaaatctatatatgttgttctagcgcctttaaactaaatatttttaaagttgttataatagttaaagttataaaagtttgatcttaatcttatccaaaacgttaagaattataaaaccgggaggattacgtgcataccaatatatcaatttgaaatatatacatgcataccattttcaaccctcctaaattttaacgttatcgatggtttatttagtttaaaggcctaatttttaccatatcaaaattaattttggcaacttcaatagtatcaattgaatgtttggttggctaccaattttgcacacactagtttaaattctatattgtctcaaaaaaaagtttaaattctattctatgctaaaacttgttaagattttgaaactaataaaattttggtttggcaaaaatttggctccaaacaaaacaagctcaaaatgcacaggcatcaccatgtttgcacatcacatgctaaaacacaactttatgtgcataattatgagcactagaatttacaatattatgtgtctacggactcatatcctctgcagcagcaacgtgcatatgggctcaaagaagagtggagtaggacctaaatgtcagtggctttcatatctcctagagaatttttgttcggcaccccttttctcagcccctctcactcgttttccgcacgtacacttttcaaactactaaacggtatgttttttgcaaaaagtttacatacagaagttgcttaaaaaaccatattgatccatttttgaaaagaaaataacaaatacttaattaatcacgtgctaatatattgcttcattttccgtgcttagtgcacgttgggagccggctgtagcgaacacacccagccaacaatgctgcttccacgatgcgcaaacaattgtcaggaccatatgcatggactttgcagtacatacatatgtaagtttcattagcatgcagttcaatcacaactgaaagtgaaaccacacggcatctgccgcattcaggcccgagaagtgggctctacatgtcacaaatttttcccttttttcacacgccgctgtaactagcgacaggggccttcaaaattcaacacccgaagtttttatcacagcagcaaacactaacacacgaaatcgcacgatttcggtacctccaatggtataccacaaacaaccaaacaccagtatatatctctctcacggtaatgttagctctaatgtgatcttttcacatcgccaaagaagccagtatcaatccctgattagtctgtaccgaagtagcgatcaccatactctcctaaccctgggatcacccggtactcctcgttcaacccagtttcgatctctgaggttacaatcttcagacgagggaatcgcttgcagacacaatggaccccttcaggagcctgttcatcgaaatgccattaccaagtttgcacaaaatgaatcatgtactatatcagtattaaccatgtcaaagagctggagtattttaccgagatgagattgagaaacatgatccgctcctcaggaactccactacttataagaagttctatagcttgatttgccgagttacctgtacagttgaatagttatgataagaaactttagctgtgacttcagtagttctcattccgacaagcaagcaaacatcactatgaaaggagcattggataaattcaacactacctgtaccaagcacaggatccatgagtagaacatgtcgttcagcaatatccaagggaaacttgtggtatatgagctggacaaggggaaaaacaaggtccgttcaaaatttcgcagaaagtgaactatttccatggtattttcaagaaaactacaaagcatttcacctgttgtccattgtccccatcccgatgtattagaattttgcctattttaatccccttacaacaagcacgtaatgcattctccatgctttctccactgcaaaacaacatatataccaagttatttcatgcagtaagtacataaggataaaaataaatcaaagaaatgggtcgtaagtctaactaaactacactgctggtcagcatgggctgagttatgagtaccaaatacatacccctccgtcccaaaaaacagaccaatcctacctacgaacgtggacacatgtgtatccaggttcgtagctaggaattcgtttttttttgggacagagtagtattgaataaagattttcatcactgaacactaaatcaatgtatacacaataatctgcaaaagaacttatatggtatagaaattcactcaggttttattaaccattaaaggaaggttcaacactagaagctgcagataatccaactttttttttgcatttgaagctattagttttcaggaaagcaatggcttaccttcgaataattgacacaccacagagcttcttacaaaagtcaactcccatgtaagtagaccctggacaaaagaacagaatgagtatgacgtcataaatgtgcaaccttccaacatttgtttacattaacataaatggacagtgctacgtgcgtgaaactgtagacaaccagtaattgcagcgctttgctttctctttattaatacaatgccagtgaagctggacctttataaaaaagaataattcatgaagtaattgggtgatcagacaacaatcttttagaagccccagattcaagatttctcttggcaatgaatattgaaccaagatggttagattcatttgattcacagctgcttacattccatatttttccactttgaatggagaagctcctttatcgccataaaattaaaatcagtagtaaaattgtaaaggggttattggagctcttgttgctccttgttatttttcaggacaaaagataataggtaagtgtttgttgaaatttagatgcacaactttatcattttagacctattttattggagcggtgcaaaaacatatttcccattgcttgttgcaaagacacaaaaatggttcttagtaaaaccaccatggattcaaatggctctgggcaaaaccataaacatgcaattggaaatgtcaaatcccacactttcataatggtatatatagcagatccagttttgccaaaactgtccttccatttctacagttcacaaacactattcttagataccatagaaacattgttaagaaaacctccagagcatatactaagttgctaccactaagagataattccaaacatacttaaggtgttactttttctttttctggctggcatatgctaatggatttatatagggcaaattccaagaacaaaaataaataggcgcaaagtataatggaaccagcaaagcacctgttggtgtaacaatctgcttctctgtgaaaggcaaatgccccagtccatgctcaactacctagcaatatatttattttccacatgaataacacatcaataaacagtcagacacattcagtagctatgtagaactagagaagggtacagaggccaaaaagaatgagtgctaccagacgaatcagacgatctgaataaaagacgaaatctggagttgcaatgtcccggtcgcgaataagagtatgcattccacgtatctgttaatcgagtgtttataaccatgggttgggaataaaataacattatgaaacttaggatcgagagaaactattgattgtacctggaaagttgtattaaccacataaacatttgggtagattttgcataagtcatgctgaccaagttttgtacgaatatgttgcacaattaaatctatggcaacatggttatctccccctcgcggtatgatcacatcagcatattttttggaaggaagaacaaaatcatcgaacgcaggcttcacaaacctcccatactacaattcaataaggttcatcaaaagtgtcattacatatgtattacaaacatcagggcatgcagattttgtgacatatttaaatagaaaaagactaaaataacatagacgggtgtttaaattacctgctccagcactgagatgacatctctacctctttcaactgtatcacgccttatacgccgggcaagtctaatatcggcatctaaattgatgcataaaatacaaagggataaaggtgaatgatcacaaacgatattgttaccataatatctattatattatacctaacaaagaggagcaacaaacctgtgtcaacaaaaattttcatatccatcaaatcacgaaccctttgatcatgaaaaactaaaatgccctccaaaatgatgacatctgatgcattaacctaagaaaacaaaatagtcaaaaggtttttaagcctaattaacaatcataattcattaggtttcactaccattaaagaaatccagaaaatagaccaacaacgacactgaacagaaaaagaaataccacccataaattattgccatggcgaaactagggctgggttggttatgaaaaaatttcatgaatcataactgctacataggttgagcaaggtccacagtagcttcttagacatatgatgtactctttatattgcatatccttatatcctttccccgcccacaaaaaaggtcactttatagtatactcttttagcatgtgtagctcatttattaatggagacttcatagtacactacttaactatgtgcctatagattcaatattttggcaccaaatttctagaacagaatgtgaaataaggcacaccagatgccatcaatctacataagacctttgcatacaaagttatcaaccagtaattaatcatagataaaaggtgtaataacaatagataaacaggaattatctttttcacaccaaaggtcaacaacgacattactacctttctaaaactttcagagcatcgacggtggttcttaaaatcatatataggaatatttacagatagcccacttttaagctgtcccatgcactctaaaagttgctctgtatcaaatgcatctgcaaaaaagaaagaacgaaaatatcttagtctcttcccaacgtaaagcagattgaaacctcgagaactcaaaaggcaatcaatttttatcaaatcaagcacctgggtgatcaaagttgtaatcttgcacacggtcagattcttcctcagttaaaccacggtagaatgaatcctgcaaaattgaaactttagctgaagtatatagaataattgcagaaatgatctatcagacatagtcaacaactagtctttgctcttttgatgaagctcttattcaaatgacagcaacttgcaagtacccagatcagcattcacccaactgagcaagaaaccacagccaaccatacaagacacacaactgaatacagatgcgaatatgaaagcaatttcatgcttctagcttgccaatacgcaggcaatgatttaatcaaatgcacattttgttcaagctgctccgaaagaagttcttttcacaacgcatttccccttttgacaacttgcacaaatagcaattctgcctgcttgccttaaagaaaagaaacaagctatgaatggtacagagaagaaaaaatataatactgcacgaaaggccctacatgtttaggcattaggatgcatacaaactgcacatacaagaaagtggagtaccatactcatcctcgaccttgactgttcaaatcatgtcatttttggacctaccgcatcacaatatgttccactccgtaagttattttgtactaacaacaaaccatacactgatcactgcaacaacggattggctgattgaacaaaacgctcgaaacacgaaatctcactactaggcaagcatatgcatatagcaaccaaccaagcagacatgatatgcatcctgacgatgcaacgaggcacaccacacctggttgacgagcacgacgcggtggtcgtgcagctgctggatgatcatgtcgcagaccgtcgtcttccccgacgccgtccctcccgacacaccttcgccaaccacaaccaccaaaattcaaaacaaacaccaccaaggattacgattacgagagagagagagagcgggcggaggagtgcgtaccgatcacgaagggctgcttgctcccctcctccgcggctgcggcggcggaggggggcggcggcggcgcgaacccgttaaccgcggcgggggcgtcgttgccgccgcagccgttgctggaggcggcggagggggagggggggagggaggaggaggagaggcggcgcgagtcgaggcggagcccgctgaagtgcggccccaccgccgactccatcgcggcgtccatctctcccctcgccgtcgccgccgccgccgccgccgccgacgtgctgagctggcgcgcacggtgcggaggccggaggttttgacacgcggattgggtgggtttttgggggacgcgtggacccggtttatgtagacccttcgccgagccgctgctgacgtcatcacgcggtccaccaaggataggtccagggatgtttcggttcgccctctctgtggactaggcgaggaggaatatgaggggtagattcttttttttttcttcttttgttttttttcccctgctctgcttaactgctttgcagaaatcgcagtcttgtgttgtgttgcagttgctggtcctgtttggattttgcaaatttgtttccttcccattgtttgctcgtgcgtatttatgagctaccagtattcagttttttttttccttttgtgtaatgtattcaatgttcatgaatgtccattgaccaaatttatgcgtttttcccgctacattgatacttccgatgctattactccccctctgtttataagtgcatttgtggtttatgtgtccaacttattttaccgtccatctcattttaaaatttataaaattaataaaaataataaaccacacctataagtattattattcatgtttttattatctaatatcaataaaaatactaattataaaaaaattaaataagatgttaattaaatgttggatatacaaaccacaaatacatttaaaatgagagggagggagtagtagagttaatgggacatgaatcctctgcagtactgtatttgcagtagcagtggctgacaaatagatccggttccacatgtcaatggcagctactacaagtgcagtactacaaacaatcccgacagcattggttgagctggtaacgccgtaagaaatactaaacttattatggatgaaaaaccaaggtagaaagaagcctaaaatcaaatctaaaattaagttttaacatttaagttttagttgtggttgataactaatacaccaactaacaaactggtatttttcatcttaaaagaatatcagggatatgccatgcaagttgctataattattaggccttgaaagtgtgattagtgcagacttgcagagaatggatggagcaggaccagcaggtgtgtcggtgcatgattgattagagattagtcactctttctttttttggacgaaagattagtcacattaaaaagacacaaaaatacatgtgtcttgattcctggggcgataggtttctgttcacacatcaaattatcaaatggacactgtgatctgatcgaaaatgaaataaacaatgactctgaactctcgacagacactgtggataagatcaagtaaactggaattaataattaaaaaaaaactacttggaagactagcatccaagtcatggcatcaagaattaatcgaatattataatgtaaatccaacgtggctagcatcaaattaaatctaccaaagcatcgagtcatggtcaagtgattaaaaaatacacgagacaattacgtgcactcatcaacttggttgcaagtagcagctactgatatagactaccaaattttcaaaaaagcaaaacaaaacaaatgggctctgtttctttttcgtcaggcctaaattgggccggagcaatgcatgatgtttattatctgggccgtaatttgtaatggacttcaaattgggccggagtaactgaggctggttgatttgggccataattcgtaaaggactcaaattaggccgaaaataggacttcaaattgggccgtagcaatggacgaggttgattactttgggccgtaattcgtaaaaggcttctaattgggccgaaaagagcccaaatcgccatagattggcctcccttctccgtcagactgaagtactgaagcagctggcctgcagccctgcacgcacaagttcagagttcagattttcagagaagtgttcgtgtggacactggacagtattagcactgaactgctgctgctgctccaatgtcaaaagggaggagaccagctagcgatgctctcatctcaattctcacctcatcttctccaagaatctcgcctttattctcgcttctgttgctgccttgcttgcttcatcagttcatctcatcgccatcgcaggataagtcaaacataggaccattctttctttcttccttttctttccttgtgctagctcgcttagaacagaactgatgggcttgatcaataattgagtgatatatgcagcaaatgcgtgcgtgcactcatcaactgcttggagggatcgatctctgctagatagatacatgatgtggatctgatcgatgatgcaaatgcttgcatgatcctaggctcatagctacacgcgtggacatctagggttcgaggctgagattaatggattcgatccatatccatgtcagataagcgaaaacttcagttcttctgacggtggtctgaatttttgcctgaagaatgaaacggaatgaagagttcagtgaggttcagaaggagaaaatgcattgattttttgcaaatgcaaaattggaaggttacagaaaacaattactaggtgaagtagtggattgattagtgccaactagagattgccaactgttggcagaccactaatcctttttgtaatggaaaaaccaccaatccttttataggctactctgttgatgtgtttctcctaattgttttctttttgtgggaggatatctaatgatggctggctagctagctaatctgaaaaaaagaatgaagaatgcacaatgcactaaccattgcaattacacgttttgcactctttaaacgataatgcacccaagcagtagtgccgcagaaacccaaaatcaatacactgatttcttttctgaataaaaggcaacaaacactgagatatgtgtcacctaggcactgaagaggattgagtgactggaccactatcttctgcactaaggaagacaggaaggtgtgaacatttgagcgcatatgttcacttctcctttttccaaggacaaagatcgagaaatgttcagttgttcactagtgcagagttcttgagtaaactgtactagcgcccatgctgcgttgcatgagttttcaataccgataggccatatacggtactcgtcgtatatatctatcttgttattgggtaggggagcttgctagctaatgttctacaccgctctgtacgtgccatattcatgtcatgatctgtataaaaggacaagaagtttggattggtaggacatgcatttttcttggctctttgtatggatcaggacgagaatgtagtattacagagcggtgcagatcacatagcttgttttctctgcaactgcatgatactatagtacttaggccgtaggccgtgtttagttccatgccaaaattaaaagtttgattaaaattaaaagtttgaagaaaaaagttaaaaatttatgtgtgttggaaagctttgatgggatggaaaagttggaagtttgaagaaaaagttaggaactaaacaagcacttatagagttggggtactcgatcgacgtgtatctgctggcctacttttgagtcaccattccccacctgatgaaatgggtgtaagatgagatgcacttgatagtgcaatgacaaaaaagttaacccgaaagtcttatgttcaatttctaacacgctatcttcttaaaaaaaatatttggagaacgtctccctctaaatcttgttttttttatatattatgggtgcaatatgtagcagttctcgattctatttgatagagcttcggatctagtttttcaagttacataaatttttaaggctagaaatattcaacttattcttaggtaaattcattgggacatgcttctctagatgttccatatctgttttccatcttgtatatgaaaactgtcgattcttattagatcttcgagtaatgtcaaacaggttcaagattatcttttatatccaacgttttagacctggactgttcgtaagtttgtttatccggaaatgtgaaatgcaacgtgtttttaattattcagactaagggatcagatattcagatgggttgatgggttgcatggattcatgtctgtttctcacctcctccgttcccggtggcgtctgaacccaagaaaacaggaggacgacctgatcgatgatgatactgacgagcagagtccaccacgccaaactcaataaaaacatcacacatgggcatacctttcccagcaattcggtgaacacattatcatctaaggtctttcgtctagaaaacattatagtgtggatatttcagaaattaattaaaagcctcctcttttcgcttatgtttatgcttatcaaccaaaatttaaattttcaaccttaaatttgaaactaactttggcttttttttcatagaagtttattttcagcctttacttttagatcgataagaacatatatgtaaaagttttatttataaattactattagtttataaatatgttgtttggcttattccacaaataagcgaaacaatgaggctttatctgatttctctacaaaagattaagtcttagctctgggtttcaggaagtgctgctaatggtgaagagttgttactcttataaaagcataagcatatatactcttaaaaacaagagttattgcttagtatttaaattaattgaatttcacatagttaaaactagaattaaaccaccacagaaacagatcgagttactactaacagtaattaaatagcatttgaccgtgtgtcattgttctgaaccctgaacaatgcgtgtcacactctcacaggccacagacagcacgcatatgcatcaggaacattatggcggttataattaattaattactcagaattaatttaccaagtcaaattctttacacacgcagtaatgcagttaattacagtgttatgccgaatgaattttgttagaactaatgaaccgtatcgcccatgcatgtacacccattcccagatcagaactgagctgagctgctagctagcaaggtagccaggccaaggtgtcacgctgaagaaagcaaaggccaagaatatatctcacgcactgggggtcgccgcgttcacacggcgcagctcaccgcaacaacatcactagctgagcagtgaccacttttaaatacgcatgcgcccactcctcgatcgctcgcagcactgagctcgatcgtgcgcgcgcgcgcacgacgcagcagcggctagtggcactcagagcgcgccacggcgggcgccagcatgagcaccgcgtgtcacggcgttcgcggcttcttctcgatctcggcggcggcgatgacgatcgtcgtcaccaccgccgtcgtcctcctgtccggcccgcagctcgccgccggggcgcgcgtcctgatcaaccacgctgaactccggcggcgcgacattgccaccgccggcggcggcggcggcggcggcgacggcgcgtgcgcgacggccgtggcgccgttcggctacccctgcgaagagcacgaggttaatcaatctcgtcgaacacctttaaacgcgcgcacgcagaacgttcgcacgcacgaatcaaaaccgtcaaatctcttttgttttcttcttcttctcatggacaggtgacgacgcaggatggctacatcctgggcttgcaaaggatcccgaggggacgcatcggcggcgtcaccggcggcggcgcggcggcggcgcggcagccggtgctactgcagcacggtgtactcgtggtacgcatcacgcacgcatggcacctaacattctctctaatccgtggtcgttttcttgccaatctcacatactttcatgtgcttagcaccacgccatgccggtgcacacgtattcgtctcatcatgtcgcccctgtttcattgcacctttcgagcttttcttagctttacagacaactttgtctaaatttaacccaagttcgtacgctttttcgtagtttgggttagtagaatagaatctgtgtccaagaaacctgatttttggggggtcggtgaagaattctccgaactccgtttgggttcacaatatccgttcgatggagaacgtacggacaggatagtccaggatttttagcatctttgaattaaagtttgaatggaattaaacaagcttgaggaattaatatatatgcatggatgcttcttttcatgatatcccagtgttagtctcgatcaatatggaatttgcagatatgcatggcacatggttcggtgctcctgtctccttctagcttctgctgcggactagttgcagcactcatggactttagctagcccatcacttgcatggggtctcaaatccgtacaccgttgtagctagctagaaacatgagacatgctacgagcagtaatacggagtatatcccaaaatataatccctccgtcacaaaaatataacaatctagcactaaatttcctacatccgaatacttatatgtccagatttgttatactaggatacgcctcatccattaccatactgttatattttgatatggatagagtaaaatctttcagaccagttagatatggtattaaaaaataggtaaaattaaatagaaaatattgtgattggttgagaagagaaagcagatggagaaattaaattgtaaaaatttatgattagttgagaaaaaattggtggagaagttgttatattttaggatattttaattttgggatgaagagagtagtccttaaatatgtacagcacggcacgcatcacagttttatattgtcaatttgtgttatctcttgatgcatcatttaaaaaatatcaggagtattaacatttacattagatggtgcaataactctcgagaccttcctaaagattctaaaaaaaaaatctcaaattatatagagtatatatatgttatatcgaacttgcagattatatatgcacaattggtgggtaatttgttgtttgcgaatctaattcttgctacaagttttttttctgctgattgagatttttttttaaaaaaaccgaagccagactaagctggtgttatattaagaaggagagaaaatatttacaaggtcaccagataggtgagagaaacaggggagggggggggagaaaacatagaaaaaatacacacactctaaatgagagctaagcggatattcttgtgatgttttttcgctccacacatgctccatatcttgatttcatcttgtattttgacgagtagttgtgacatggttttctcttaattttgaaatattcttctgtttcgttcacaccatatttccgaaatatgccaccaacaagtggattgacttgagtgctttagctttgctttttcgtctgattgagaattaagtggagtcagagagccgttaggacaatttacaatgatgtttactagtagtaatgatgtaaatgtatggtcagatatatagtacgtatgacaaactaatgaatatacattcatgcaagaatttactcctagtatctcacaatcaaacatggataatagcaagatgcatggttcaacaagaagcaatgataacagttccgtactacactattttgcaatcaaaacatactctccatctgtggtgtggtacgattattgattagtatggctatcaacatcactactctctctattccaaaatcccaaatttcattgtactacattatatctcatcccaatagattgatttattttgaaacggaggaagtctctcttatccggtgtcttcatgcatgaacaatgggcacataaatttcaaaattgtcaaaatacgcatcacctaaaacactactatatttggtcataaatatttaatatttaagataatatttggttgaactttaaaactttgaccatctatttatgttaaaataaatttataaaatctaataagtttatgatattagtatagtacttttcaggataaatatacacatacttctttatcctaattttaaattaaacatttgagaaattaattatagaagatcaagatttcaaaatgttgaccaaaccctgtactaaacaccaaatatcagggaatataataaattgttcgtgacaaaacattaatgctaaaaccgtcccacgttaattagttgaaaggacgtacaaatctaagtaaaaacaatctttttcatagtacacaaaaagtgtcataagcagcccaacaattacatcgttcaatcgaatactccatgtaatgatgtaaggctgcgaaaactgtcactccatcttgttgagctgaaatatctttgtgagtggcaggatggcatgacatggctgctggggtcgccggaggagtcgctgccgtacatcttggccgaccagggcttcgacgtctggatcgccaacaacagggggacccgctggagcagccgccacgtctcactcgatcccaaaagccgggtaattacttcaccattaatcacactctgaatctctttactgcttgctaatcagaaaagatatgttctaacttgtactacaaagtaatcttatatcatatcctagatagcaacaattttttttttgggaataaagatagcagcattttaaaccggatgtagtgatattaactgcaaccctgcattgcaacacggtcatgtacactgaagactgaagtaactgatgaccatctcttctcatgtcagagctactggaactggtcatgggacgacatcgtggtcaacgacatgcctgcaatcgttgactacgtttgcagccacaccggccagaagccacactacgttggccattcaatggtatatactaagctggcaaattaaaggagaattcatcatcatcatcatcatcatcatcatcttactgtaatctgttgggttgaaaacgtagtactctgtttttgttgttgttgttgcaggggacgctggtggcgcttgcagctttctccgaaggcaggatggttgacaagctgaaatcagctgcgctgctcagccctgtcgcgtatctgtctcacattaccactcccattggcgttgtgttagctaaagcattcgctggagaggtaaaaatccatactgaacaaacaatgttcttcatgcagatgctgcaattgcaatgttcttacagacatattttattttctacactgaactctgctctgatcaactatatgttccaaaactgcagctcatctctgatctccttggcatcgccgagttcaacccagcatcgtatggccggcattctcgtgcctttcagacaaataaaaatcatttttacagcttggaatcgtctccggttgctatggagctgacatattggtaattcacttctgtctaatgcaggcctcaagtgtccaacttggttagaacgttctgtcgtaagcccgggatgaactgctacgatctcctcacatctttcactggtaattaatcaaggattagtattttacctacctgagttaatttgctctacattacatttcactccatgctaactcccatgcaaacatgtcaggaaaaaactattgtctgaacaattcagcagccgacatcttcctcaagtacgagccccagccaacgtccacaaaaaccttgatccatctcgctcaaagtaaaccaatcaaattctagtctcatcagtcatcttataccctctaattaaccaaaccaaaatcatgttaatttgatgataatttgatattaattatctggatgcagcggtgagagacggggttctgaccaagtacgactacgtgatgccggacgcgaacgtggccaggtacgggcaggccgacccgccggcgtacgacatggcggcgatcccggcgtggttccccatcttcctcagctacggcggccgggactcgctgtccgaccccgccgacgtcgccctcctcctcgacgacctccgccgcggcggccacgccggcgaccggctcaccgtgcagtaccttccccagctcgcccacgccgacttcgtcatcggcgtctgcgccaaggaccttgtctacaacgacgtcatctccttcttccgtcgatttcactaaaaaaagggaaagaactgaataaatcaaaacaaaatatagctggcatatattcactagtagtgattaagtagctaattaatttggaggtctgagaaaattatatatactagtatagttgatatacagttacatgaaagatgataaatggaaatgggaccaaaattttacaatagaataagatatagagagatggcatttgggccatatcgattttttttaattttttctaagatacttatatgtggcaatgcgggtcctgcctattttaattttattttttttttccaaactatgaatgccatgtaaacgttacataggcgctgcgatacataaacgaccaggtctaagtgctaagcaagcgcctcgtagcatgaaacaataattaaaactaccgaaacctaaattgatcaggttttaataatagctgagtgaatatttatagttggttttgttgttgaaggtcgtaaatttatagtatagggagctgcaatggattttttttcctatagtattgtcatgggaagtttggcccaagaatgaccacccacagtgacggatctagaaaaatgattcaccacccatccccgttgcaaccggagccgccatcaggttaggttgttgccgacgcctccatccaatccaatagaggaacgtcggcattccaactgccatagcagcaacaacaccaccgcgagacaccatccggaacgggaacaccatcagcgtatccctttccctcacgcacccacgtgtcactcctccctcttcgtccacagttgagaaacacctagggattttctgggccttccggctagcttcacaaagtggtgggctaaacgatctgggttcgaagtctcacctcttataattatttgatattaggtcattccctaatattcaatcttttttttttcttcgtccacagttccgacatgaacctcaccatgggccacaaggtcgtctacacgacgaacaagctctatgagttcatccgtaattatgttttagacttagttggcgcttacaacctcaacaagcattcaccgagaatacaatcgtcatctcatagcttactaactactccctccgtttcacaatgtaagtcattttagtatttttcacattcatattgatactaatgaatttagatatatatatatatatatatatatttatttatttatttattagtatcattatgaatatgacaaatgctagaataacttacattgtgaaacggaggaagtagtaagatttgaccgaaaagacagtattaatttagtgtttatgcgtgaattattgaagcaatttattgtgtgaattatgtaaggttaatttatgtgtaatgtatttgaatagttaataccattatctattctatcctattgtatgtctctattatagacacaactaggtgattctctgcactttgttgcgggaatttctaagcaattttcaatatattttttcgataatcgagctaggagttaaaaaaaacaaacgctagagtttatcagtaattatcatgaatcaaacaaatgatacccacgctttaatgtggaacatactaattaatataagttaaatattataaaaaagatatatttattaaaatattgtggaaatgatgtgagagatgacgattgaatatgtttgcatgttgatttatagaattaaatagattatatatatgatgttgcatacttgcatgagattaaatatgcaattattattgtgagtgggtgatgatgtggtatggttgtatgttgaactttagtcttagtgggttgtaactttataaaatgtatagatgactgaaagacaggaaaaccaaccatgcatacattggaaatgatcatcaacaataattgtcacctttgagtattgccgtgtggccgcgcggttaaaaagggtacctataaaaacctagaggtaccgatttttcacaataggcacatttatgttgttataggtgccagttgtaaaatgccacatcagtgtcgtcttacgggtactggttatgaatctaacaccgaattgaaagccggttttcaacccgcaccaaagtggttttatgtagtactgaatcatgatttagaaaccatgcatcaattaacatgacacaacaaactaaaaattaacggagatttcgttttcgtcaactatatataaacaactccctacgtaaaaatgacctcatgctttcctacctagacattattcatgataagctcccaaccataatgtaatctccaagcagcaaagattatcacaaatgcaaatgattggttatggtagtcaatgtgaaactatggtatccttgcaagaatcatgatttagaaaccagcaacatgacagaaagaaattaagctagcacatacgtctatatatcatcaagtgacagtagtggtgaggagaaataaaggggaataaggaagctaaaccttggacagacaaaacctaggttaactcctcataggtcttaattttaaaacctacaaatggcaggttgtcctagctacgtacaatgtactcctttcgtcccaaaatataaacatttttagcatagcatcaagtcaaacatttttaactttgaccattaataaaaaaaatagaaaagatcaataatataaaattgatgttactaggtttatcattaaacaaactattataatatgcaactcttttaaatttaaaacaccttacttttatagatattgttgctcaaagtagcatctcgaagactatgacaaagtataaaggtgcttatattttaggaccgatggagtggtcgacaaagtttgccgtggtaaaaaaacattggctcatagtattacactgcacgtaaactaattaagacctatgtaaagtatgctatatatgacaaatcttaattttcagctcatctaatctaactactcagcacggatgagcattagtgttagaatcatgtgtgatacgtcacgatattatacatatgagttgcgtctgtcccttgagaaataagctttcatattctcaaaaccctatttataatgcacatgaacggtgagaaataagctattcatcttctcgaaaaccctgtttataatgcataaaagtccatttgataagagaaactgcacatctatattatcttaaaaaatgctaagatgatagtagtggtgttgactgtgttcgctggtggggagtttagaactaaactctccgcacgaaaaacggagcggtccattagcacgtgattaattaagtattagctatttttttaagaaatggatcaatacgattttcttaagcaactttcgtatataaacttttttttttgcaaaaagcataccgtttagtagtttgaaaagcgtgagcgcgggaaaagagaggggtgagttgggaaaggggattccgaacacaccctttgttatcaccaccatccaactatcatatggaacccacgaacaatgagaaaagattttatctgtccctatgaccaacttaacatatacttagaaagtgacaacaaaattagcattacgataatttattagacaatatatttttatgtacttgaagatatatgttatgatcttttttttaagaaaaaaacgtttcaacgcattgatagtatgctattaacataaaaataggggacggatatatttgaaaccatgcactactacagaaaccatctttgctgggttgaccaaaaatcacaatagtcccggtttgaatagaaaccgggactaaatatgattttttttcccggtttaaaactctatcagccctagatgatttttagtctcggttcattttctgtccgaggctgttagggggtcaaggatttttagtcccagttggtgtgaccaaccaagaataaaaattagtctttagtccatatatagtatataatccctaggacttatccccccaaactcctcatcttcctattcctcctctctcttatccttttctttaaagccgaacttatcatctccttcttcctatcggtgagagcagattgaggagcgagagcgagcgagtgaggccggcgccgggagggcaggcggtcgggcgggggcgggggcgggggcgggggtgcggactgcgggcggcggcgtggccgcgtggaggccggccagcgaggagggctgcacggcaggcggcagcctatggctctaccgaagggaaggcgggaggcgggaggcggcagcaatggatatgtgattttttgagaatttgtgattctggatctgagatgtatttgatttgtgtgtgatgcgaatatgtgatgtatttgtgatgatttttttagaacttgtgatgtaatttttttagaatttgtgatgtatttggagatatccttttgttttgtgatatgtgatgatctatttaggttttcacgatttggggatgatttagggatggagtgaaatcaatattcaatgttaaaaacaatgaaaaaagaaaaaaaactagcaatcggacctagcctggctccatctttagtcccggctggtaatcccgattatttcacccgggactaaagatgatcccggattcgtggtcctggttacataaccgggactatagggggttatcaaccgggactaatacccctttctccagcagtagtgggatgtgtatgcagatatacgtacccatctatccagaaaattttttcattattttttttcttcgaagtgttactttttttttctcaaagcatgcatgctatgttccacagcaggcgcacttgggtaaaatagacatatcacaaaagtgcaaaacgtattagattgctcccatacctgtttttaatttgcaatccacaggtaaaacaagcggtattactgttgttaggcctacttcaaaaataagtccacatcaaattctttcttttgactaagataattaagtcccacattcaaatctaccccgtacggcctaactgcatgttgcattattgaagcctttttatcaaccaatcaatcaagataattcctagcaactcttgttatgtgataatttcatattgttgcttaatttaaagtacaagtcaattagggaagtactagttttcaaaagataaatcagggaagtactattgaaacattttataatactaacaatccatattgcattttctgctctacaagaaggcagtaccatgatggcctataaaagggttaagattgatcataaatggagacaactcaaacaaaagaaacaaagcaaaccacacacttagaagatcatgtggagtggcaagaaggcagcttgtatggtggtggccatgaccacaatactgattctgcagctgacagtaacacaggtagtattggcaatccgctcaccacaggaggtggaactagatggtttcattactacggtaaaatcagactgccttactgtctcccaaacggaagtggatcaggcttggacaccttgcggggaaacttgtcttgttttaccatgttatacagctcggattggctgtctatgtgttaacagcgtatgtatgctacctgtgcctgcgaagtctgaagtcattgcatgataaccgtccgtccgcctccggagtcagaagtcattgtattccatgatgccagacttgccagtcttgtctagaatgttttaagtatgttgtttgcttataattaagttgttgttccatgccatatgtatgatttgctggggggatatggaaaaggttgttgtacactatgtttggtgattgaatataggggacgcgatggatgtgtatgagttgattggtgcaccttttgtctcagcaaaatgtaactttgtcattcaatccgtataagtttgttaccaggagcattcgattttttttttaactggagtattcgttgttggttatatatatcttatacaaaacaaaagaagcaacgctagccatgaagtggtatagaactactgtgaaaccaatttgtgtggtttttgtttttgatggaaaattggtatttatctgagcttagattggttttgaaatatcggaggagtcagcagggtttacaaattcaaagaatggatcatgagtgcatttgcttaagaatccaaaaatacaaattctgaagaatttttaaaagccaagagtttgtcagatttaataaaaattgaaaacaaagtgatcttgagctacaaacactagacaagataaatttaactagtcaggaagctactgtagtatttgctcaaattaataaccttctttgcttgttcaatttttttaaggtaaagagagttttattgattttaaacaattacatcgagttgatacaattaaaaaattaaaaataagtactccatatagttcctcttgttttctcttccgcttcttcatatgtctctctttacttcaatccaacaagtagcagacaaaggagtgaaaccatcgaccagcacatctcccctcgccaccccatgagtaagcatatactccctccctccgtccctaaatatttgacgccgttaactttttaaacatgtttgaccgttcgtcttattaaaaaaatttatgaaatatgtaaaagtatatgtatatataaaaatatatttaacaatgaatcaaatgatataaaaataattaataattacttaaaatttttaaataagacgaacaatcaaatatgttttaaaaaattaacggcgtcaaatatttagtgacgtagagagtatatccatccaccttccaagcttccacaatatggaagccatggctttgcccgagctcgccatgcatgaagtggagagctccacgatctttctctctccctccctttgtttcagaacagttaataactatgtcatcctcccctcttggcctcttctcaacccttcttcaccggaaaaaacaaaaagagagaacatattctataccactgaatttatcataggttaataacttaccattgactttctctctttctatattatactggcgactttatcaattgttctacaatacactattaggctgggcttatttttcaataatagcaaaaatacccttatggacatacaagtataacaattgatttatatcattagaagttttaaggaaaaaataaaacttttatgtggcctccttaggtataaaagtttgtctataagtttcaatttttttcatttctattttttaaatataacttatttgttatatgctatataaaatatttttgtgttgttggttttaatttaaattatctttcatatgcaacataagatattttttgctattttcttttgtgtaagctatttctctctgatataccacacaaaaatatttttttctaaaaattaaaaataccaaaaacaaattgaaactgatgtacatacttctctgttatgtaaggatgccatataaaatattttatatttttttgaaactttctaatgagataaattaattgttaaccatgtatatctctaagggtattttgggtattttttgaaaagaggcttatcccaatggtgtattgtagaacaattaataaagccgtcggtatattttagaaagagacaatgtcaatggcaaatcgttgaactgtaataaactcagtagcatagaatagattcttaaaataaaatactgccttcaccaacgcagagccgtatctagcatattgcgagattgttgcctcaaggaatgatgaggattaacttgtaagcatgtttgcaggcagacgtgtacaatcatttctctctctttttttttcagcctttggctacgtaactaaacctcttctattaatactagtaatgtgcccatgctaacgctacggcgatatttagtaatgacaatatatgtgtgagcatgataatcaatttttggcagattggcacggaaggttcgccaccatgtggagctattttatcaaacgaccacaagtgatgaagataataataaatgcacatataaaaagatatgatgatgacaaagttcattttatcacggatttttctgcttaaatagtcttaataatatcttgaaatgttcccatttgctaaaaaggggagataaccaatagaaaataaattaaaaatatatctaaagagttttaacaaacacatggccagtgggttgttaatattacatcgagaccaagcattttacctaaaatatggtttgtcattttaattaaaggtaacttgcatcgatgcatgcacaacgcagattaaatcatactcccttcgtctcaagaaaaggcaaaccgtgtgtttccgtgccaacagcaaaccgtgtgtttccgtgccaacgtttgactgtccgtcttatatgaaaattttttataattagtattttcattgttgttagatgataaaatatgattaatactttatgcgtgacttatctttttaatttttttcataattttttcaaataaaacggacggtcaaacgttggcacagaaacccacagtttgtctttctttggacggagggagtatacattaagccttatctccaaacaagatgggtagcagcgttcagtggcagagtcagatgcagagcaatgattctctctacaaagaagaatcacacatttgagatatgcatatccatattgtccacttaatttttggcatgcaactgtgattcttcattcacaatcagatggagcagaaaaggtcagccaatccctaaaagttttctatactatataaacttgtgttgtattgcataaagtcccatagaccatagtacatatgttcccgtcttcttccattttttaccaactcctcaattttcaacacaccttgctgtgaaactttgctttagaattccttctaaacactgtccttttttttttgtcatcgggaacccacaagagttctttgattggtatacacttttctgttatcactatctacatgtgtacttacaacacccaactaaatatattgattatatcaccaattatttttttatcataaaatattaggggaagcccctacgtgtattgattttataaggtttatttacaatgtctcatcatacctaactataattaaatgtagacttagatcctccttattctacaaatgaaaactgataacacggtgcttaaaatgctgaaagtttagtttattgtgtatattgtataagattaattagaagcacataagatttaataggcactactgaaagctgtagcaaaaaggaattagtttgacagttccttatctttttaaatgcacaaaagcaatctgtcaaagacaaaggaaattccttttttttcttgtttttcctcttgatttatgtaattatgtcaggtcattactaatttgtatctgcaataatgtagttcccatattttggagatatacagatagggtcctacaaatagaacaaatcttcaaatagagcaatcatattgtatacacctaatagatttgtcgtcgatattatttacataaatatcattcagtttcagggaaatgtcaagtacagagaatcattaagagcttgtttttcagttgtaaattcagatttcagatacattcaaaatgatttaattttattcttttacttaaaaaaatgatccatcttataatgctatcacaactattttatacgctctacaagggtccatatgttacttcaatataaggatgcaatcatgaattcatcatatacaatacctctaagtgattcaccagtgatcccaaccctacaaggatcaacatcctcccattcactgagatgatctccaagctttatcaagtcccacacctgaagatgtccaaatttggcactgcagcttatactatacctgtgtatcaagttcaaactatgatatatcagatcataacatcagaaacaattgtttgagggaggcaaaacaaaatagcaaatccaggattcaacggaaaatcctaatacagtagagcgcaatgatgctatttcgtctgggctaacaccagcatccatgacttttaacccatgaacagaggcagaccagctcaaatttacagcatattgtagagtctgattaaatattttggatacataaactcctgcttatatcccattcctccaagctgattttagtgcctgtgtttaaaaccatgaaaataagaatcaagtcaaataataaccatgaatatgattttcaaacaatcatgaaaggattttgagtataatacatctatgtaagtgctgttcttgctagctggccctttcaccgtgatagcaagaattgatggcaacatagattttttttaaaagcaacaactaagagtttttttacctcaagcagtggaggcagctattcgttaagtttcagaagaagcacaggtacacgcccttgttgaactaagtattggggggaacaatatctaattctgtaacttaggaaatgagctgatgaatgaagccaaggaagtgtgcattgtctcccaggttatataatgtaggtacagaatagtgcatgtgagcctggatatcacaatagaacataatataagcatcaaactgtacacaggtggccttttcaggaagagtcatggctagaatagcgatgcattattcactccatgagtgaaattcatgaatttcatatatctttatccaacaaagttggtaatgaaaggtacatattaagacaataaccacattaattatttgtctaaaattttaagcaagaaaaatcacaaccaaactgttatgatccattttactttggttcttctacaatctctcagggtggctcaaatcaaactcaccacaaagaagaaaataaagtgcttgtagcatccccttcactaatagtgatcgacatagcaatgtatggctatgtacctcagtaataaggtagaaattttcttcaaccagcttctcgtggaagttcctcacctccttcctcgatcatgattgcatggcctgaaattttgcacacataactaagagccagtgccaacaaccctgctcttacgaaaaatccttttctccaatggaggatccggacctcgctctgccccatcaacggcatcccctggtataacgaattaatggatccttcaccggagccccttgttccaccgtgagaggcactggcatgaacaaatccaaagccaaacccagccattgatcaggacactcaaaatcgtaatcccagttgctaattaagcggccactctgtagattgctcacactactccacatggcagagggaaaggaggagaccttggatgttacagcggcggctgaggaggacgtcgaggaagttcgcccagagatcggcgccagcgccagcggcctccgtttttctctctccgccgccgtggcggtggcggtgaagtgggagtcacaggtgttgaatgtgccgtttggcttggagcagcggcggtggacttgccactcaaccactaactccacagaggtagcgctggccgcacgacagcgacggtgggttgcccgaggaggagatcttcgcgtctacgatgccggtgaggaggatgcgatattcctggcgccggcagggatgacccatggcgatgcgcagcatggagggctgcccacagcgatggggacgacggacagagggttggcgttccgatctggacagcgtcaccggtgagttggctgaggaggagatcttcgtgtcccgtcggcgcctcggcaatggcgatgcttctgttcgagtcggatcgaggggcgcggtgatgacggcgatggtgaccggcgtaggggcggcggactggacgacagagatcgcgatcggtgtacgggcggcgtggaggcggcgaaccagcgaggacgggaagatccaaaggggagagggaaagtgggaggtgcgtgaaggaagcgccggtcgggatcgcgtgacgaggacagccggcagccggcggcggtgaagggagggggtgcgggaagaatggactgggtgggggaggacggcgatggcggcgctgggtcggcgacgtggtggggggacggcgatggcggggaggatggaaggcgacggcggtggatacgatggatgcggtggatgcgggcgctgagatttaattggacgcagcgatgagagatggcgtacgacatggcggcgatcccggcttggttccctctcttcctcatctacggccggcggccccgccgaggcgccgacgtacgtcgccctcctcctcgacgaggccgcagccacggccacgatggcaaccggctcaccgtgacctcgtctacaacaacgtcatctccttcttcggtcgctttcactaatggccggtttggttgaggggagtttctaataagggattggaagtttgcagggatgaggctattaactgttttgtttggttaggagatatgaaaattttggtgggatagggatggggaattaataaatgaactctctcctttttaatacctgggtaggggctagtaattgggacttgggagggaatttctcgtttactttgcctaaacaaatctcaaccactcgttttcattaatgacctaatctccaactaaactccctatcaattttcaccacctctaccaaagaagatatcgggattaaaaattaaattctcatcttaatctcaccataattctcttgtgtaaactccaaatcatcttccctcaagttaccaaataagctgtaagctcttgatcctaatatcccatcattcagccacaaaaaggaaagaggaaaataattgaagagactaaaacacaacatagttggtattcactagtgattaagtagctaattatattttttaaaattacacagtaaaacgtagacactcacaacacacgcacactcacccttatgaaggcacgcacgcataccctacccctatgagcatcttcgaagactgggccggcaaatactagagattaacgaagtcaccatagccacctcggtgtcgacggatacgccgtctaccactgaaagcacaatgttgttaaatcctggaaaattcgcacctatggagagtcgaatctataatctaaggtgttacagaggctgaggctcttgtaatcattagactacaatcaatttgagagggtgagaaaattatactattagttggtgtatacagttgcatgaaagatgataaatggaaatgttaccagttatcacttggacgatcgtcctactgtgaataattttttacgaggaaaatgtccatcatggctccatcaactattggccaattttagtttgtatattatttaaccataaaatcgggtataccatctcccttaaatattaaaactgcaaaacacaatttgcacaggtatgcccaaaatagtcgaggaaatcattttgcgctatttttatatgtttgttggagatgatatacccaattttacggttaaagtatatatatcaaattcgatcaatagattttttttattacacggtaggcgtacacgcgtaaacatcactacatacataacaccacactcacacccccactctaagaggcagaaaccagtagtatatccctgatttcactaaacctcttgaaacttgaaaacacaccagcatgttcgtattatttttaggcaccagaattcgttgaagaagttaaaatggaacttttggcttttacaatagattacactaattgtgccttgcgttaattgaattagcacgggaagctcggcccaagaatgtaactgggccacccattcccgctgctaccagcgccgccatcaggttaggtcgccgtcgcctccatccaatccaatggaggaaccccggcggcgtcccgattggatcctcttggacaccaccgccgtcgccggccgccacagcggcagcagcaccaccaccaccgcgcgtgagagacagccggaggcatggattgctgctgttgatatgaagaatggctgagtgcaagctgtggagaagttttgtgatttttttttgccggtatgaccaaaggaggtaattcaatgtaattaagataggaagaaaaagttacaagaaaagttttacatcgacaactggttgtcgagtaaggatgtgcaccataacacacgccccgaaccatgtgccaactgcccaaacacacgatacagagagggaaaccaagcaccgaacaggccatcgttatgcgagaccgatcgccaccagaccaacaacaccaccacgacaagaagactctaaaacgacgccctcataagggtcacgacgccgaaagacgccatcgtcatctgtccaaagaactggacaaggtttttacctagagctccttgcccaggggtacctcaacaatgccctcaggagggttaccacgtgtcacgccctgaagttctcctttttagctttaaaatttgttaaataaatcgcctaaataaattgttgaattaacctagagttgaatccttaattaataaatgcaaataatcatcggaatcggcatgtgaaatttttcttggattctacatgtcaaaatatgctaacaggatttttagtggaatttttagagccttggaaataattttaaccaattaaaataagcaaagtgcaatattaaattcctaggaaaatcctttttcctttttatcttttcttttccctcctttttccttttcttgggccgccggcccatttcttcccgcgccggcccgctcctccctcccactcccgaagttcacccggcctccctctccctctcgggcgctgacaggtggggcccacctgtcagtcctttcctcttcctccatccgcccacgccggcaaccgccgaaaccgcgcgcgctgctgccgtttcccgtccttcccgcgcccactcctccccactccgtgccgcgcccacgtcgtcgccccctctccgctcctcccgctctcgcgcgtgccccgcaagggcggggtacggtttgaatcccccctccctctctctctccacctcccacgtagccggcgaaatcgggagcaccccggccacgtccgccactcccgagccccaataaagcttccccgcactcccttccacctttttcctctttccaccgctccctctcgtgccctctatcgctcccgcgccgctacactcgccgctacactcgccgccgccctcctgccgcgctccggctgccgctagccgtcgctagccgccgcgccgagcctcaccgtcgacgccgccgcattcaccatcccatgagccgtcgcgtccaccatccgcccggcaaatccaccgtcggggcccgcttctccccgcgcgccggtgagtaccaccattgccgccgccttcggccatggtttccgcccgccgtannganccacccctctccctctaatccttcccattttgttccctagaaggtcccggagatcgtctgcccgtcgccgtcgtcctcccgtcgcttgtcgtcgtcgttcgccgtcgtgtccactcgcgccggccaatctcggtgagaaactccccctcctccctctttccctctctctcgtgtgcgccgccgtcctccgcgcgcgcaccatcgtcttcggccaccgccgccgcttttcgcgccgtctgccgtcgccgtccgcgccgccagttgccgtcgccggcgaccgcgcgtgccgccgtcgctcgccatgcttggcctgccggctttgaagccgagccgagccaccagccgcgcccctcccgccttgtgccactgccagtggggcccacgtgccggcgcccctccctctctctctcttgagccgctgacccgtggggcccgcatatcggcgccgccccctgctgacgtcagccctggggcaatattgcgcaataaatacattaaggcttttctttaatagtaaaaacacagagaattttctaaaaatcataactaattcatccgagctccgtttaagtccattcaagtctcagtaaattcataaaaatgcatagaatccattaaaaatggttttgtttcctgttttagtagtcttatagcctgttttgcttgtgtgctttgtttgtcgcgtagatttcggccgtttcgtcgatccacggtttctcgaagacgttgctgtggtctcatcagtgcgagagcaaggcaagtcatgcattataattgatcatattgtacccaatttacaaatgtcccgcttttctattaaatattgcatcgttttacaatatcacgtgggatgagtcctactactcagccatatattgtttaccttatgccattgctaactcgggtattaaaatgactagatgttggtttgggaaatgcttagccatgcttagttctactagtacacaaaaagggaatcacattaaagcatagactttaattattggcaatagctttggatcagtgccaccgtaatggtgttggcttattaaaatacactacacggtgggctgtgggtgcatggttttgctagttgtgcccatggcgattaaggaccggttcgcgggaaaccctggaagaatttatcgtgcttaccacaagccagcgtgggcaacggctgggcttgtagtgtagcttttctctagccgacgtacccaggcgagggtgggcgtgatggagttgggtcggccgaggtgtccggttgatcggcttctggattcactgcggcacgaaaggggggctgcccgttgcctgctggggacgggggcgaaccctaaggtgtggtgcgatcggttagaggggggttatgcgaagggtcctgtcacggcctctttccggtatgtcgtggtggcatgtcggcgcacggaaacgtgtcgtggggttgtgtcttgtgggtacagttgtacacctctgatcagagtaaaactattcgaatagtcgtgcccgcggttatgggcgatcgaccagattcaccgtgattagtctcacccctagtttagcttaatgaactggtgtagttcaggtggttggttgggcctgttgcaacgtggtgtagcgttggacagtgacgggttaatactgcttaattactacaactgtttttactgttttcaactactggttttaaatgcctgctttatgcaaatgaaccccgtaacctcttttggttatatcctgcatcatacctcctcttccggtatgacttgctgagtacagtgggtagtactcagtcttcctctcttttcccccacaccagagttgaagtccttctcagttgaagatgtctcgaagaggttggtttcgtcgctgccgtcaaggatgcctgtggaatggagtcgtccgctgcaggagtcaagtcttcaggctcagctcgcttttatctttttccgctgcatttgtaatcttttatatttttgtaaaacgtggatctgtatgtcaatagttgtcgtttgtgtatcctggctggtcctggacaggggtttaatgcacattcagcttagaaattctggttcgtgaatttctgggcgtgacaccacgcctgaaggcgtagccactgttggcccaaagaaattgcgctaagctttcactcggaacccccaactgccgtggttcgtcgcccaatccgaatccaccatctaaacatcgcgtcaacagtggcacatggcttccgccacacccgaccgatgcccttccgccagctagcttcgagtcctgccaacaacaagactgccaccacaccgcaccgacgcccctccgtcggccgacttcatcaaaccgccaccctgagagctggcccggctagcttcgagtcctgccaacgacaagactgccaccacaccgcaccgacgcccctccgtcggccgacttcatcgaaccgccaccctgagagctggcctggctagcttcgagtcctgccaacaacaagattgccaccacaccgcaccaacgcccctccgttggccgacttcatcgaaccgccaccctgagaactggcccaggacccctccgttccaccacccgccggccgcctcgccaaatctggctgaaggagaacccgggactgggtggcactgcttcggtaccctgagcttcccccgctaatgagcagccacctcaatccagcctagaaactccccgcaaagaaggggaggagctccaggaaaggcgagggtgccgaccggcaacgaggaagacgaccaaccgccgccagctccctttgcactgccatctggccaccagcgcccccgtagcccggccgccgcacctcacgtagccatcgcggcggcattagcaaaaacggagcaagaggccgcacgccggcagtagcacccatggtgtgcacgtggcgggcgtgctctaccgtggctgagaaggacaagtagcagagggctagggtgccacccctagccgccgaggacacggccggccgccgcgcccaggctgcatcgctgagccgccgctgccctccgctgagccgccgccgccgcccccagacgcccaccgcgtccgcgccccgggctggccgcacgccgccaccaccacggccgcacaccgccaagccgcccctagccgccgccgcaccggatccaggcgagggatggccggatccgggctttggggcaccggatccgcctccctacacctccccgccgtcgccaaggacaaagccggtggaggcttcgtcgcgcgccctgtccacgtcgcgccgaggagtgagtcgccgcgaagaaaggaaggcctcaccgccggcgagagctccggcggcagtgaggtggggggaagaagtggaggcgggcagctagggtttcgtcacccccgagcagcccgcgcgagagcgaccgggggggaaaatatccgtgaagttttgtgatcaaagacagctttggttcagctatcatctatcgccaagtatatgaatacagatactacctcaggtaattagttagttagtttccccgcaaaaaaaaattagttagttagtttattgtattatttcttaaagaaaatgcttgctcctgcctcctgtgatttgcatgaaccatctatcgcgttagtatgatttccaagtatatatgagtccatattgtacctggttagtagtttattgtgttattgcttcaaaaataaatgcctacgcctgtgacttccatctgctcagcttgcttttcaataaactttttatccattacaattagtaatgcgtgagaaacacccatggttttctggctaacttgtggtaagctcattggtctggattcgaagtctcaccccttctatttatttggtattaggccattccttaatattcgtcgttgcacctatcagtgaaaatgcttttgttattatctgtttggttattctacatctctctctccaattgttcttttaatatttgcaatgtacccattggtaataatttcgtactgatctatggtggtagagagttaccatcaccacctactttttaaaaatcttttttaaaggttagtgtcactacattttttttatgcaacaaaatggcgcaagatagcatgttgcttgaattaatcgaccggatgatgaagcgaagttatatggtaacaaactaacaattgcagttttcttcttgagaaattaaaatccttactcgctgatttgcaaatacttgtggcatatatatacatgcaggggataacttttataaacatacaatgcaaatatttgactgcatagacattgacacatattttaaaaaacgcacgattacttatggagaaggaataagtctaggaaaaagtctaaatatccccccttaaactttagatgaaagtccgtttaacaccataaactttaaaaccggacatcatccaaccccttgaactttgttatgccatccatataccccctaaggtggtttgggttttggatgatggttttgcatgttttgaaagcttaaacgaccaattttgaataactaatataacttatttgcatatcatcagttataagtcattaatttatccttatacaatgatatcatgctattattaagttggtacttgtttataagtgagagccaataagaagcatgtgatcaaactcatccaacttatatacaagttagaaaaaaaaaccactatgcaaaaccaccttaggagttatataaatggtattataaagtttaggggttaaatgtccggtttcaaagttcagggtgttagatggacttccatccaaagtttagagggttatttggacttttttctaaagtctaatataaacattttacaacttttgtaggttcaggattccacacttatcatattaagtacaataggcactttgtgttcatcttaagagttaatattaaagtattaatagtattaaacgctcccagcactataccaccgaccattttgtttgtgttactaaaaataatagagccaacaggcccaattgtaagaaaatcactcgactctttgggaaaaaaactctaaattgggcccatatacttttggtatgatatatttgacctcattgctagctttgcattcctcaattaacatctttcaactttatttttagtttgcggcacattacattataccatgtgtgatgtgtctatgtgtttcaactccgccttcgatggaaaaatggttttataaaaattggtattatatttctctactacccacattcatcgtctcaggaccaatctttggagctccgtttttacatcaccaatagaaagttactttctatcacttttatcatagctagctgctttagacccatttttattcatctgattcgatgaatgtgggatgaagtagaaccccagggtttccaccacacatagccacaaggatttgccataggctttacttaatttcaagaattgaatcttgagatctatgagtggaatttggaagacacgaatgctcacttctccttttccaaggaccggagaaatgttcctagatcttgagaagccagataactgtacttatccactgtactgtgacataaaataaaattatactaattgggccttgcatttattgaattggcatgggaagctcagcccaataatgtaattggtccagcaccaggtaaccatcaaagcccacaaattttcaacttgatttcttacatttctcgattgtttttccttgatggtccccatttgtgatttataatattgagatttatggtgtggtagagttatcaccaccttcaactgaaaaagaaagtttagcaccgcctatatattttcaaacaataaaatgaaagaagagccatgttgcttgaattcaccggacactgaggcgaataagttatctggtaataattgctgatttcttctagagaaatcataatccgtaccagttgattggcagtactttggacgcacacaatatttcacaatgacatagacatgcagatgataactttttgacacatacaaaccggtacaaatgacagcatagagctgacacacacatattaaaaaacacaccacgtgattatttatggagaagaaaaaccttatattattatatatatcaagtctaatataagtattttatgactagccttttgtaggttcaggcctcaaagcttttcaaattaggcacatataaacacttcctattcatcttaagagttactccgtctgtcctaaataactttattttttatctatcccactcgtatcaatagaaaaaataaaatacccctactttattaaatctcaatgcaactaattctcactttatttcattcagtataattattttccactttcacaaattttgatgcgatgattagctaaggcatgttcggctggcagggcaaccagctacagtagcaagcaacacagccgcgcacaacatacatcgccgcagcgctgccacataaacggctaccaaacaaagagacagaggacgtaagattatagatttaaacagattatagatttaaacgctcctagcactatgccaccactcttaaggctcctttggattgaatttttttttaagaaaagtagtaaaaaccaattaatccaaaaaaataactcctatgtatgttacttatttggtatatagaattaattcgaaggaatttcaaaggacaggaaaaacttctccaaagggtgcctttatatttcttctctttgataattggcatggatctaattgaaaaacagttggaaaaaggaacccatatggatttgccactgccagccataccacgtagtgtaattaatccattgaacaaaactagctgactccctcgatggtgacaggtctgaagaagcttggattaataggacagatcacaaaattgttcattggaaaacttgacctgacatgcattggtataaggcagatatatatttaaaagtatatatatggcccagctaaatcttctgataggtgatggccaactctaaaaaaatgcagaaaactcctcctttttcctcttctacgttaacaaaaacatattggttgtgtgcccaggacggtaagcgaaaggtacttccattattaaaaattaagatactgtttgtgcaatcatgttattattaatctgagcttagtgggcttccttaattgtacatgtctctcttcattctgctgcatcaatgatatttatgtgtgtgacatgtatgtcgagttcgttaaccaactcgtctgcaatggaattctgtgacgatttgctcgtggagattctctcgaggctcccgttcaagtcgcttgcaagattcaagtgcgtctcccgctcatggcgcgcgctcatctccgcggcgacctccgccgccggctcccgctgctcgccgccggcttgttcgtcggcgacggcggcggcggcgagccgaggtacgccaccgcgtgctccggcgatggtgttgagttctgcgacatgagcttcttcccgctggcggagacggcggcgagggtcgtcgacgcgtgcgaggggttgctgctgtacaggtcgctcgccgcggcgtcggcgatgtacgtcgcctgcccggcgacgaggaggtgggcggcgctgccggtgccgcggagggaggcgcagctcccgctgctggcgttcgacccggccgacggcggcggcggctcgccgcgctaccacgtcgtctgcttcgtggcgtggcaggagcgcggcgccaccgtggacgtcttctcgtcggagaccggcgcgtgggcggagcgcgacgcggcgttcggcggcgtcgaggcctcgtcgctgtcccccaccacgcactaccgcggcggcgtcctccacgtgctcgcgtacccggaccgcgtcgtgctcatggacctcgccgccacgaccacgacgacgacgtcggtggcgccgggcaggctcgcgccacggctgcccgacgacgtcgacgccggcgcgcgcctcggccactcccgcggccggctccactacgccaagtgcgacggcgagcggctgagggtctgggccctcgacgtcgacgccgcctcgccgggctcatgccaatggatcttgacgaacaccgtctgtgtcaacgagatgaccatcaatggcgggctctgggcggcaagcgaggtcaagttcttggcgttccacccggacatggccgacgtggtgtacctctcgtcgccggaggggaaggtggcgagctgtgacatgaggaggaaggagatggtgagctcgtggaagctgggagctgagcaccatgtcgtcaggttttggttgcttggtttctcctcgggtttgatgagctgcctgggtggcgagcaagcatgccagattgccggtgctagctagctatagtatactagtatattttttttctgctatttcttttccatttgaccttcgatttgattgcttcagaactcatatatcaaaacgcagttttgaagaaaaagttaaatggatggtggcggcgtgtggcaacgataacataagcccttttgaattgtgctttggtttgggtcggataggtgttgtgtgacttagtgtttcttggtggagttggagttgccgatcacatgggtgatggtgtgatgataataacgtcgcgtttttgccagtgtgggagttttgtttacttcttgcttgttgcttggctttatcgttcttgtgttgagcagcattgttaagtgttgcgcttgcctaaccttgcttcattgcgttggcaggttaagtttcttggagtatttgctgctgtagttttcgctcaatttttcttaattaattatctgtttttttaaatgggacatcttcttcttcttatatgtaaaacatcggcaatggtctgtccgttcgtaaacaaatagtcaattatttatcaaagttcatacatttcagcagtgttatactcccccttataaaatatactatctccattctcgtccacaagtgaattgtctttgtttttaaaaaggaaaaagtacgaattaccccccctccaaaaaaaactagcgcggtcgtccgaattaccccctgaaccaaaaaaaccggacattcttcacccctatctatgcaaaccggacgaattacccccctcgacctaatccacaatggttttggtctacgtggcgtacgcgtggcagtccagtcagcattttatttattaaaaaaaatgtgagacccacctgtcatactcctattccactattcctatctgtcactcttcccctctctctctcttctctctctatgtctcactcaggcgcacggcagtaggcgggggatagggagcggcggcggcagggtgcggcggaggaggcgagcggcggcgggagctcacgctgctgttgacagaaaacacgaggcctgggagatctgcttaactccagtgcaggtccaaagctcgccttcgaatgtatgagcgtgccagttgatttgatcctgtaaccaacaagaaatagagacaaagaattcgtggttaaatctataaatgatagccgatcggctaggtgccgatgacaatcatttatctttgagccgatgtcatttatgaatcgatcggcggttataaatagacagtaaggaactaaatctattcgatcggctgtagatattaacgatatatagttcttatattaatatatacttaaatcaagtgattggaatagatcggtcaccatgccgagacagtataaatcacttagatcgaaatatatattaataacaggattatatatgtttatagcatagccgatcagatagatctagcatgtatcagctaatactccgatactactctatataaagatatcaaaacaggtataatataccaaacaaaagcttaatatacttaaatgcaataagatcttgacataaagggcggatttaacatgtcactgaagcatatagatcgaatatggttaaattagataagatcggctgaaactccgatactaccctaatcggcaaccagatgacaggctagagattgatattctaagcacgacttaatagatcaaactcaactgatgcagcattaagtatgaaaagaagaacaatatctagacaatcaagccgttgggtgtttcataaagtggcagatatcttatataatctaggacaacgtcgctatttaacctaatcggctgtcttctattaacagatgttagccgattgtaggttagatgacaatattgccaaagattatgtaagacatatgataactcgacgaattatatagacaagattagagtgtcataaagatggaagtactcatctcgagaacacaagtcgtcataacaagttttacctcttgttgaagatcgaaaccgatgcagctcaacccgaaagcaagaactcgtcgaaacaaaactaaagcaaaaaggtggcgatgcgccgaaattgtattgaacatgtgtgtcttaaaaattacatagggctcggggtctatttatacccgagaattacaagatatgtccataccggacacgaccactatctctaacaaactctaagataccataagtctttgcggcagacttttgcccaaatatatctctaaggaagttacataaaacatcctaattaatagatacaattgccttcttaggactctatccatgtgcggcaatcatcttgaagcacctcaattcaacccgatgtcatacaccaaattacactgtcggaatcggctgcatcggcttacctagtccgactcggacctagccaatcctaaccgtagtcgatctggacttcagccgattcttgctctattctcggatcaagctccgccttcgactccacctcgatctaatctccttttccgatgctgatattaccaaatttggtcgttaacagctgctcaaggcaaggcgaggcggcggcggcg

SEQ ID NO: 4402 - DNA, 101960 bp, Oryza sativa
aaaactttcacacacttaaacttccaacttttccgtcacattattccaatttcaactaaacttttaattttagtgtgactaaacacattctaatgcgtaaagatttgcataagctacacgtagtccatttatggtgcttgctgtttactattcaggatcgtacgagagaacgcgtccttctctgttcatcgttttctgaactttgcagagatcagttttttgtccacatgtattcaaggttttttgacgagtttctgactgtattgaatgcttagcttaaggagggtgtgttgtagttggggaaaataaaatttttgggtgtcacatcaaacatttgaccggatatcggaaggggttttcgaacatgaatgaaaaaactaatttcagaactcgcctggaaaccgcgagatgaatcttttgagactaattaagccgtcattagcacatgtgggttattgtagcacttatgtgctaatcacggactaattaggcttaaaagattcgtctcgcggttttcaggtaagctatgaaattagttttttcattcgtgtccaaaaacatcttccgacattcagtcaaacatccgatgtgacacataaaaattttcatttcgcgaactaagtaggaaaaatagaaaagggaaaccgtaccgttttctccccctatcctgtcgatgtatccgcgtgcgtggataaagggcgagaaaagcgaccggtcaacctccctatcgcttacactcacccggatctttcccaaaccaaccttgccaaccccagatcgagcatctgagcagccgccggcacactctgcctcctcctcctcctcccatccttcacctctcaagtttctcacaagcaaagtggaggcccacgacggagggcggccagcaatgcaaagctggcgatgggcagaggctggcgaccacccgatcttctcttgatatgggcagcggtggaggaggagggcgcatgcggctagtgaccgcggcatcaagcgatccctagccaccatcgatccagcagcaagcttgaagaaggaggtcaaggtggagttggaaattctcatatccgattttagttggattagagtccgattcatttagtcatttagtttcttttttccagatggaaatttggatatggtcttctcctatgtatccttgtgctgattttttattgggtggattagagtttgattcctttcagtttcgtgtttaactcgggaaatttagaatttggaaactacctagatacgggctacatgcgcgaggctgagatgacgcaccgtgatggatggagttgggaagcgcgttttgtgcaaccggttgcaaacccaactcatatctacaccgttcaatgttcattgagattcgtgcggagaatcttaatcttaactaattaaaagattattagtaattttaccagatagttaaatgcccgtgcttcggtacggtgtattaaaactaaaaatatttaagttcaaaaaaaaactaaaaatatttgtttttaaccaaagttatttttaaccgaagtctccaatgacagagagtaatatagtagctcataataaattattatttaatagtgcgttgcaatgggaaaaaaatactgttatgataatgattacagttattttatagttccatgggagttataagatatagttctagacataaacaataccccttctctcccaacgtaagcgacagtagctgcgccttttcccaccgcaggtcgtaaaataatatgatatggttggatttaatttttattaaattaaccatgattaataacgctctttgaaacttttttggaattttcggagcttcattgctaattttgacaatacaaacatcatttcagcatttatttaaataaaaatgtaaataaaaaccccaatttctctatgggccatttttagtctttttactgtctcatcccgtaaataaagtctaatttacctcctttaactccttctctgattgcgcaaacttgcaggtctatttggaggcccaatagtccgacggcccgagcgggagaacccggaaccatccgatcgaatggacggttcagattgatccaaacctacataaatatctgtagccaaaccctaaccctagattttatttccctccccacctccccactcgccccgatcccctctctccctcgaatcgaaaagcgatggcggccttacccccgtagtagcggcgacctcccccaccgagcagcgttggcggcgccctccccccacgagcggctactgtggcgcccttccccctctccccgcgagcggcggcggcggccgctccctccacgctgtctcgcctccctcgccggcagccgctccctctacactgtctcgccactctcgcccccttctcctctccctcggtggatacggcggcggttgcggcgggttgatggtggccgcgggcggatcggcggcggcttcctccacccccgtttgccttcctcccacggcaaaggcggcggcggccgcggtcggatccggcaacggcgactccctccgacggctgtggtggcgtcggcggcggttgcgacggccgaggacggctatggcaacggcggagggtggctgtggcgatggctggtggcggatccggcggcttcttcttttttatgtatatttttgtgaagttttgtgacgtattttgtgatttggtgattattgtggttgttttttttgggcaaagagtggttgagttttggttgtgtcgattttgggatgtgtttcctgtatccgactcagagctattgatttggaggctgcgaagacgccccgccaacggacgaaagcgccttcgtgatgaacagaaaaatacgataagataagatttgcttccttttttctgtgcagtagttttttactttgtgggagcctacataataaaataatagaaaaagaacaggaatataatgggtcggtttccatgttctgaaaagaaccggtctgttgtaaaaaaagaactggtcggttttaattttcccggtgaagaaaaaccactccttggttcgattagatcagatcgatcccctttctactttacagtccttttccccgccttgcttccgcttcacacgattgccaccgccgcctgctttctcgacgtcttcgcatgtgggagccgccgctcctaatgcgccatcctccaggaatcattgcctggctccctcgacaccccaacatccaggagctcgccgttgagggccgccacgtcctcatggcctccgccccatcggaggcggagccctgccgccgcctcctcgccggaggcccaccgaaccccctccacctcctcacgaaccaaccgccgcctacgacctgtcccatctatggggagatgaattaaacccgcctccgtgaaatcaggtcagatatcaccaattgctccgtgacttgttcgattgcttgtagtaactctttcgtgtatttatggggttaattttattcgattttgagttcaaatcgaatccgcatccaacttcctttcctgttgaatctggtatcctccctgcctgtctttgttcaattttgtttttgtttgcctctattaaaaatcgatttgttcaattttgttttttttttggattatttgtatttgatgcggactcctacaagtcgtgcagaaagcatgcgcactgaatcggtcaaaattttggaggacggacgaaaatttctgtgtgacgaacgggaaaatttgttatttacgcgaaggattttgaatctgtctctgttttttttttgtttggcgacgcaatgaacacatgtgtgcgggacggaggatgccactcggatttacggacgataatttttgggtgacgattggaaaaatatcaatcttttaataattattattaattattattattattagttaagattaagatttctcgtccgtcaatccgtttcgtccgtgcgattcttccaatcgtcaatgtctgattttgtcgttggcgtgtaattttccgatcatcacagtataaaggaggggagcgccagaccaccacacatcgctcccccgttcaccaagaccaccaccaccttatccctttcgcacgaccgcatctcccgcacacgcgcagtgatccggccgcttcccccgttgccgctctcttgtactaccagtacctgttgcctcgcctagctagctgctggcctggccggcgtcgcgtgccttcatggcctcgctcctacccagtccggtgttccccaccgccgccgccgccgcggcgtccacatcctcgtcctcgaggtgccggtgccggtgccgcatcacaacgtcatcttcggcgcacggttggtccaactgtcagggctggagactccatcaccgggtttgggccgcccaggctgctgatcagcaaggaggggtgcagcagcagcaacaacaagaagaaaatgaagacggtgtagtcgacagcaacgtgctcccctactgtagcatcaaccggaaggagaagaagactattggggagatggagcaggagtttctccaggcgctgcaggcccgtgccctgccctgcccttccctcttgttgaatccggctacctcctaccttacatacactatacttacaagtcaattgagtcacaatttaattcgattagattcctctttttccttctctttaggccttttattacgacaagaaggccgtaatgtcgaatgaggagttcgataacctcaaggaggagcttatgtgggaaggaagcagcgttgtgatgctaagtaagtggtataaaatattccttttcttctagcttgtacgagatcccggcccttactgtacactataagtgtgcatgccgctgaaaagaaaaagattattgttggaaattcagagataatcctatctatatccctgtagctagtttatttagctgctatcattttctggctgtctggttgcgcatgtcgtgtcatgcgccgtgatcggggcgtgtgggatggcacacactgagaaccgatcatggtgcactaaggtgtggatcgtggcgatttgcccatccgcatatatcgcaatggaagagaaacataaaatggccatcttatcgcagcacaaataccttgtgttctggatatactagttcatatcgtcttgtgttcgatatacgacagtgagtttgtgatagcgttcgctggattggtgccgttatattatgtccacccaatgcaagtaacattggaagctcaattcttaagacaacatatatccatcattaagtgaatgcgagacatccctgctaattttcaggaaaaagagaaaatgattgtaagcattcttatcaacactgcacactttatattttgagtttctccaataacattaaaacgataggagagacaggaaaatggatgaactgcaaacagaggaatgtttgtgtccaatttatataaaaaaaatactaggagaggtttttttttaattcagtcatgctaatgttgtcatgttaatgcttaatcgttgctttttatttaatattttttttcgtcaggccctgatgagcaaagacttttggaagcatccatggcttatgtggctggcaaccccattatgacagatgctgaatttgatgaactaaagctgagattaagggttggtctttcttgtccctagtaaccttatacttgctaaaatgtgtaatattaagtgctgtaaaaaatgaatgctattctaccttattatttaatatcagcgatagatttggggctccgctaattgtacttctcagtgctgtagcatggtaatgatgctaaagttgccttataaaaaacatgagttataaggctcagcattttgagttaaacggtaaattttagtaatttctatcatgatatttggttgtcagttagcttcagtgtaaaaatgagatttaaagatgaaaccatacatataaaagacatacattgtagcagtaatgtaaatccgagactgaacttacctgtcaatctgttattatttttttctcttggccagaaagagggaagtgaaatcgtacaagaaggtccaagatgcagtcttcgaagtcgaaaggttgggattgacttatttgttttattatactaattcatttttttttgtaaactgcagtttagttattacactaatctattgaacataacagatatggggaatttacaatagtaaagcttcagtttagcagccctaaaaagtagttagccaaatagcagtccattgttgtggaataaaaactgttgaacatgaaaagtacggtaagcaatttccattttgataagcatgctgcaatcatctggttaacaaaaagtattgtgtttaaattatgcctcttcgaagaactcggccccaaagggaaatacctccccagggtagtataattaagaagtatatgaaaccggggccaagaaaggtcacgaaagccaatcctcccgatgataaatcctaagctccattcgagacactcatggctatgattgacccgatctttcggtgagttgaatataactacgatttgggagaaacgttgacgaccccctacaaccgtacgagacattgttgtgttgcgccttagcgatcgatacatctctccgtgggttgttgatctagctggtgtagatcaaccttaatcctgcaagtagatcgaagaaacaagcaagaacaagctaaaagcaatctaaattgcaaataagaattgaatacaaatgataagttggggtttcgtaatgagcaaatcagcgatttaaccgatcacgggattacacagcaaagtagcgaaactaaactttaatataaacaaaaccctataaaccctgaaggggtacctagctatttaaggcggtgggttgacgacctaggggcccctagggtcgtgttccacctggttggggtccaccccacatgggcctcacttgggccagggtcccaaacaaagttacaagcccaaaggcccatgacaagtggcgcaataccttatttctctatttgccgatgacttgctaggaatttggagatgaggttggatctgttggaaagaggattccaaatgctttccatcaagtactcatggacccaaaacagagcttgtatgcacatttggcggtagtttgaagtcagcactgtagcaggtggccgaattagattccagaacttggtcaacttgatcttgatgtgagcgacggttgtattaatagtaaccatggtcacatctccctacatggggagcttcccctgtgtagatatctataagaatatttccagcaacatgctatgatctagtgtcaaaaaccatgtcatgtcaaaattaaaacaagaatagtttagcttagagaactattttgtagagacatgaccttattcacatcatcactattttgggtgctaatgtgatgctgtttagttaatctatcctggagtaacaaatttgttattttcgcaggtctacagtgacttgactgtcgattacttcaagatgttcctgctaaatgttccagcagcagttttagctctgacactgtgagaatcatatgacatgatgtcagagatacattttttttttgcattacgccatgtttaatatattttttcttgactagatttatggtcatttttcacttcgatgaagaatcattattgtttttggcagttttgtttatgtgtactaaatactgtgtttatatctaatctagatttcgtcttcacagattcttcttcctggatgatttgacaggttttgagatcacatatcttcttgaggttagttctaacaaattcaagataatataccaattgagatccatacagtactgctcactgacatgtgggcccgagggtctgtggggccctctctcataataatacttcttccttcccataataagttcatttttgcctcccatttgtcctaaaataagttcacttttaagcaatcattgtatcgtaatttgtgaaagtagggtataattgcactgggatttggtaaagtgagagtattataatcttttttggttttgtatttgtatgtgtgggatgggtaaaaaatgaacttattttaggatggagggagtagctaagtcaccaatatataatgtttctttagttctttacatgtataaaattctgaggatgttatatatatgacatcctcaggattttatacatgtaaagaattaaacatacattatagtcctataatttgttcactcacttgaatagattttgaaaagtcagaattaggtgcgacctttatacctctattttaccgtaatcaatgggccaggtggcagttaaagacgacgatttggctgcccggcttggtttgctgcatggacctaagtgcgcactaagacatgtgcatgatggggggggggggggtaattccagctaggaagtgagagttaggagtgatatgatggagggagtgaggggtcagaatttgtaatttgcataggagacaggaggggagggctgagggcaggcttgtttgggcccatctttccatagaagtaatgggtggtggatacatggttttcaatttcatcgtctcactcaagcacctgaattttgggaaagattgagcaccctctaaccactaccacatgcaccgcatgctttgctgcctctgcccctctgcatattgcatgcatactccatcctctctcccacttacccctcctctaaccacttcattagcaaattttaaatgtttttttctcctaaattacttatgcaatctacggtccaatttacatagttatatttgttgtaattaaatttttacaacaagatctcacatatgatttaatttttgatgaaaaaatagaaaatattatattccttattgaaatatttttatataatatatgaaacatcgagttgtaattgttgaaacatcacaaaatatttactgaaacatccaaaaaacaccatgtgcaacatttacaaatgaactagtgaaacattagaaaatactcattgaaacatccaaataacatcatgtgcaacataaaacagattcgttgcaacataaagacttaaaatgtgcaatacagttgaattcaaattgaaacattcacttgtacatgaaacatcaaattacaatggttgaaacatacatatatttttttcatcataatacaatcatgtacggtcttgttgtcgtgatttaattgcgatgaatacaacggtctaattggattgtagattagattattagtaatttaggagaaaaaaatatttgaaggttgcaaagggagcttcatgcatgtacagagagaggtcggtgcaggctgtgcacactgcacagggagagagagagtccatcagggtgaccaagcacaagcatttttgacatcaaagttatggtcggtggcctcatctaactttatttcaacagtacacaatttcataaatgagtagaagtagagcagaaatcacaaattattgtcacttacatcagaggtttgaggagatgattgccccttagggatgatagttgatagaatatatgaagtgttcatagattatatggtcctacaatacatgggccttgatataacatattagtccaacaacacaaggtcacggttcacaaccagttgggacatagatgtaggcatgctgcatcgaacattatgttcgctacctcttattagtgaccaagaataattgatggcgtatccgcatccgatgtaatattcatatctgatgctaattagagtacactgtattcatatccgatgtagtatctgacagtggtatggcactgtttgaaagcatccatgcaatgtgggccctcatacagtagaacgtgcatcatcaccagtaagggtaatatggaaagtatgggaatatagtgaggcacctatgggaggtagaaaagtaaaaataaaaaataaatggtttataatatagcagaaattgtgttggtctttttttcatgaacatcatttaccctctacataagcagagtaaatatctttaactgttctttgccaacctgctaatgtcattatgcttcttccatattttccaacaagctataagaaatatgttcacgaaacatcttccttgtaattggagtttggcttgttcaaataacgccattgttttaactgttgggcttcaattgatgatgccatacctgatatatgctttccatgccatgtatggatttttccagaaaataaatattatagcagtgccacgataaccatctaatagtaacctacaatgttgtttttgaatactgagcatggtagactcctgtaattctatatcatacgtcacttttggaacaaactgtctaattctacatcagaccttacagtggatctgatgccataaaacaaactttgttatttactgatttttttagataataaacattgttatttactgattacattcatgaatgatgcagttgccagagcctttcagtttcatcttcacatggtttgccgcactgcctctaatattttgggtagcacaggcaattacgagtgccatagtgaaggactttttaattttgaaggtattttcattgtcttatcatacatcgtgggcatgttaagtatggtacaaaatgacaaattttttgataactagggaccgtgcccgaactgtggcaatgaaaatctttccttctttgggactatactgtctgtgcctagcggtggtgcaagaaacagtgtgaaatgtgcaaagtatggatttgaaatctagtcctcggtttctgatgcattctatcttatattttaactaatgtggttactttgtatgtttatcagttgtagcagttcattggtatacgattctgcatcccgattgattacactcccagaaacagctgaggcttgattgaagatcacttcggtgagtcattaccctaatgacatgtctataaactgcatatttctggatacttttaagcatttgaactgttgataatgtgaaggctgaagatcatccaatagtttttacaaatgtaaaatttctggagaagagtaactgaatcaacaatttaaagaattaagtggggaagcatcatgtggaaatggtacactttttgcaaatttcatttcaactcggtctagaaattaccaagctaggacagacaaaatttctagtccaaattcaaacttaattggacagataaaaaaatacatacttactgaacaatgaacttgtcctctattttctgagtatttgttttattaaaatctagcaaatgaaattgattctcataataaaattttgcttgaatagaatatgtctaccctgtaattttttcaattttgttatgtatacctagggaaaataaaatttgcaacacttgtgctagtgtgtagttaggaaacatattgaatgtgaacgtggtaattaatgacagcttgcttggtggcatctaaaaaataacggagttggaaaatgccaacatatatgttattgacattccccacatgccattctcataggcgatgatatcttgcagcttgtatcttttcgatggcattttccttattttctcttaataatatgaaaaacaccaatttacattagcaggacaggagctgcaccaaagcaattccttgtatctaccatggagagcaagatgaacttttcatcttgtgacaatcgtgttgtgaagcatccttttttatactccttagtctgcctctttaaatattgtatatatttgcatttattaaaagtttaagaaatagctatgactatatatactgtataaacactttggaaagtttatattgtacatgaactaaactgtcgtcatatcatgatgaatgtctgactggcccatgcttattgagtaaatgaagttagcagtacatgaagacgcaaggtatatgcaatagtgcacagactgatgcacgaacttgtgtactgcgtgcgaatcaaggccaaatgacataacagggctgattttaacgtctttgacaccacgtaatcggggtgggtctagttcgcggacgttcgtgggactcgaacagtcgataacctctttccttgttcgttctaatgatacggttaactatgaaatgcttcttttccgttataatgacatggttaaccatataatttgctcctatcgagcactagtatttcattgtttcagttagatgttgttccctcgcatgaaagctgtctgagatagatgttccctcgcatgaaagctgtctgagttggtctcactatatatacgatcagccactgaattgattctattagtggcaaccttgatgaagatttgaaagctagcatttaaaagactatatcggtctgtatatgtattcggttagcctcttttactttgggtatcaaggtgattaccctaaaattaaggctaaaaattgggaactctctagcataaaattcattgaacataagcaataaatcatgcttgagaacatcccaaaattttcgctaaaattcagcgggaaagccatctggatctggcgccctatttgtttccatcccaaaaaccgcatctcttacttcctcctcggagagaggggcaataagatgatcattttctgcctccgacacttgggggatgtcatctaatttggaatcatctagggaaagggaacttacttccggtggtctaaaaaactttttatagaattttgtgatgtaatttttttgaagcatcgttcccctcaattttttcttcatcccggtctaggctaataatctgtttctttctatgtttgctattagcaatctagtgataatatttagtattattatcaccaagaagaacatcggtagatttagccctttgataccatttagtttcttctcccccaagtaggtgtgccaaccgatctctggattgaaagtgtctgtttccatattagctaggacatgactttctgcggtgatatcaagagtatcaatggtgtgttgcaattgtcctttctctatatgataaaagccactagtgttagttgcccagccttttagatggcgccataaggcattcatcttattgttccatctttggacagtgttttgccctttcaccggcttatcccatacctctatcactcgatcatgaaaatcttcccgcacttcaaaaatctcgcttgtgggtggtaatgacatgattgatgatgaagactctgtcccacagggcataccaagagcgtgttactgtgaaaacacggcggtctaggagatctacttaactccagtttaggtccaaggtttgcctcgattgctaaaggtgtacttgtattactgtactccagtaattttttaggctctctcgagtaaaaaagaaaatgttgatagtattactgtttatactatgttcggtgaaaacgatattattgggcattgtgatcgctgccaaagatatgaaaatgtgcacaaaacgtttttctggatcagctgctagtgatttgctgtggacccgatctccattctatttcttttcaactactcaatgtctccattcgttctaatgaatagtaagcttagcatgggactacgaatttagatatagttttgtccaaatttataattctacaatatgtcaaattcgattctaggttactatatattgagacggaggaagtactcacatgattattatcgagagaattatttgatccacatctctaaaaatgtttcttaaaaaaaatttcctaatgcattgtatgcatttcttgttctaatgcatttgttctaagtcgtttgttaagttatttatcaaaacatttagcttactaccccgtcccaaaatacaagcatttctagctatgaatttggacaattatgcgtctaaatttatagctaaaagttgctatattttctggatcagctgctagtgatgtgctgtggacccgatctccattctatttcttttcaactactcaatgtctccatttgttctactgtatagtaagcttagcatgggactatgaatttagatatagttttgtccaaatttataattctacaatatatcaaattcgattctaagttactatatattgagacggagggaatactcacatgattattattgagagaaaaatttgatccacgtctctaaaaatgtttcttaaaaaaaattcctaatgcattgtatgcatttcttgttctaatgcatttgttctaagtcgtttgttaagttatttatcaaaacatttaacttactaccccgtctcaaaatacaagcatttctagctatgaatttagacaattatgcgtctaaattcatagctaaaagttgctatattttaacaggtgtggtatatcatataatctactataataaattagtcaataatctattttaaactaggccataatctagtatttggaattctgtatgcagatggaacattaatcatctgaactgcactctttctctacgagcgattctgtcagtctgtcggtggccgctcctgtctcactccatgaatggagctgaactctagtgttagaactgcatttgacaaagctcatctgccagattaacgtggatgaaagttctgaatatattggccgatgtacaagactcgtggatgatcctggcaacatgtccacttttgctaatgttgatgccatatgcaaagattaaaagtagaattttttttcacttttttcacttgttgtagtgtgtagtgacgcctgatgagaggagcaataggtcaccagtcaggggggtggcccactggctaggctcacacatggccggggcccacagctttgggggttcatgggttgatgatggaaggttctgttctttagaccatgatggaatgttgatcttaaggtgccattgatcccacctctattattctcatggcatgttgtggaagaagcttcaggttcaggcccatgcattttgcattggtgaacatgagcaaggatgcatgaatcatgatgagtgaaagatccatccaaggagtgtatactcaatgattaatttcattttgctcttgatcttgtttggtttctccggccaacacatggctgtccaaatccagacaagcccaatcaaatccaatgcagtatctggtccggacagggttgtccttgtacttagctctgttgctgattgaaatggactagtatttcctgacactttttgcagaggaagggcatattgtcatgtgaaattatgctgcatccggctagtcttttgctcttctttcttgatgccaatactcaaaggaaaataagaagatacagtaaaaaaaaagatgaagaaaattacaaaatggaaaagaaaaggtatggatcatgcaacttctcctgaacctgttaatctgctcgaaaagaagaagataatacaaagaggagatattgatttgtgttcaccgacatgcatggtgcatggacagaaatgacaccaatgaatgatccttcaccaatgtcattttcttggattaagtactgagcacgtcctactctcacatcatttcagggaagctggagcttggagcctagaagcagataaaagagagccgacggtttggatccacaatgagcttgagatatctcgcattgactgaactgcattaattccatgcaggtcacggcgatttaatccctaattagctgtggaatcagaagatcatcaaacccccaaagtatagttatcaagcttaagttatcagtactcaagaagtcaagaaatatacggacactgtgtgcctgattgttcaccgcatcatcacaatccaacggatttcatggactcaaggggttcggaggcatcgccgcactttatccgcatgatttttgaccgcacattctcgatcggacgattcctgcgatccaatggctcccgtgaaccagcatcagcggctttttttacccctcttgcatctggaccgtacattctcgatccaacacggttcctgtggaccttgtttggttcacttccgaacattgccaaacctccatgccaaaactagccaaatgtgtggcttataaattgatggccacaccttagacaaggtttggctaaaagatgagtgtatgacatgtgggcctttgaatcgaaaaactttggcatacacaaatatcctaaaaagtgtggcaaagtttggcaaagtgagggagtgaaccaaacgcccctaaatctctgaccctccccggcgcctcttccggctatctgctccgtgaactcagatgagttcatgagttcatcataaaacccacaattctttttgtttttatataaagactcaaacattgaatatcaggttgttttcagttcaggttggcatcgattagaggtagaatgaagatggtgaaagcgagcaacaagtttgtgccgatagattacagtagaatttagcatctcacatcacattgagtggctgtacagtagttaaatcatgaatcaattcacgatcgagtcagaacagcggtttgtaacacttgtaaaggaaggccattgttatagtgaacctcatgggtcatgccgtcatggaaaactagatattttccctttttcagaacccacaggagaaaaatgcacgccattacatacaaatcagatcagatgtagtcaatgagctaagaatcgtgttgtgcacttcttaccacattgttagcctacagggctaacaaacaaagactaaatgtctaactctaactactgctcaagttcttttgcacacaagatgaatgtgcaggagtggactagtgaggttcaggccagcagaaactaattaatcataatcagcaggagtagggaggtaaacacgatggaagctcttgatccctagactcttcctacaagtagggcatttcttctgagccttgagccatgcctggatgcatttctcgcagaagatatgaccgcaatttgtcgtggatggcttgtccagtttgttcagacacacaggacaggtaaaggttggttcctttggagcaaccttggcatgcgtcgtactggtttgggccacatttttcggctgcaaaggtgagagcatattatgagttgcatgtaggagtacaatactaagcattaagaaaacaatatacatacaccagccaatgcggaattgcaattatcatcacagtacaaagaagatcaacttaaaaagattaacaaccttgctggtcccttcttccctatctggagaaaggcatataacatgtacagcaccctgaaaatttctgccccgggaaaatatagctccagcaacgccataaccttggggaacagggaaaacagggaatcatgatgaacatttgtgaggtatgaatcataattattgtatatgttgtagtgtcttgtaataataatctataagacagtacaccgatgtactatcaagtttcagtttcacctacagtacagaactatgggttagaattaatggtgcacatttcttatgtcacttggaagtatccaaatgtttctgagtaacacaagacttccaaatagttcttttagactaagctatgtggagttcaaacataagtaatgtacttacctcccggaccagtatccttctccggatccactacagccacagagcgcctcataatttttctgctcctcctctatcaaaaagaaacatcagcttcagcttcttgtaaaggtttcagttattcattcgcttaattggagacagaagaaagcaaaagcttactttatcatctagagcttcaacatcgatgggtgaggtccgtgtacccctaaggatcagagcctcatgctggctcccagtgttcaccactggagcagttgtttccaagtttataacatcaactttttgtctggatccatcatgggctcgcttcctagagcgtgcagtacttgcagtactcatgattcttatgatatttggaataacctggaaatcagtgagccacaattacttattgctgaatcttcagcttaagtaccctaattcccttaacagtttctacaagaaatgcccattttttggcaacatgcacaagatttgcgtatcattgcattaaagatagataggcaccaaaaaaaacgcagattgcgatcctgggcacgccagaagagcaaaagagggggaaaaaaacaaaactgagaaccctggaaatttggaaggaagggaacaattcaacaatactttggcaaaacaagagtcgagatgagaaatgcctgcaagcactgggaaatttcaagtatgtggtatataaagaacctgtaaagatcatctaatcaggcaattctcatgctcctgccgacttaaaaaacttcttttttaggtgttgtcaaatatcaattacaatgatatcctctaatctcagctctctacgatctatacacacataactttatatcacatttcgcagaacttatcacaacacacagatgcgcaacaacaataaagaaagaaagatttggggggaaacaaatgctcaccgagactgctaaaccccaaaccctgatcaagagtgcctgaatttttcccgaatccgtcacaattcacaacgaactgagggggatcagcttactaaatcaagaaaagtcttagcgagcccgatcccagacgacgatggaaaccggacgagcttgcttccgcggcggaatcccagagcaaagaacagatgaatcagatgaggcaaatcatcagagcagttaataaacggaaggggtgaattggcgagggggaaaccttacccgaatcggtctcgaacgaacaaccaaaacgaaccgcggcgcaaactcgctagggtttcgcttcgagttcgggacggatcggaaggaaaggggagtcgctgtggactttggcgccctcctcttcctctcctcccgcgctgggcttctgataggtgggccccggtgctgaccactcctcgtctcggactcgttttgatgggcctcaatcacggcccacacacgtagatgggccggataaaactgtaaaactagatttgaatccagatggactagctacgctcactaggccatccgattgggggctgtttagattgataccattttcaatcatactatattttttttagataaaattaccaaaaaagtgtctatatttagtttgttgccaaactttggtaaatatataagaaattctactaaaattttaggaatattgtcaacttgccaaaatttggtaaggtttattttggctacaatctgaatagcccctgggttttgagtgttcttgatccagtacgcaccgtatgtgcatttcttttttgtatgataatagtttcaagcaattcaatttacactgttttgtttaagtaaattcagaaggaaaaagaacagattgcttctagaacttttgaggatcagagtgcatgtgatgcgaccgttcatcagtcttcagattaagggagctctgcagcagactgccagcttcagcaataaaaagctatccaaaaaacaaaaaactccaaatctaccagaaatctagtttcatagattaatacgtgcataatggactttctgtgttgacaagggacaaattaaatgacgataagaacaagaaacagcccaagctttaacctgccattacaagcatgtaaatccagtacagaaggaaccaaacaatccaatacgtaatctaccattacagcaggcatgaactatactgtaatgtatatttccccacttccaaataaataatctatgaccaaatgcagtttcgaagctgatgaatcgcactggggaaacgaaaatcccattctctgcaatttacaagtacattgataacagcctcaaaatccatctctatttgcaccatccaaagcaggagcacttctgcaaattaaaaaaaaatgtagagctcaaatgagatcagaaatgtaaaagaaatcaagaacctagcggagccatcgtttcgcttattcgcggaataagtgaaacactatatttacaaacaaaaaataatttgttaataaaacttttatatacgtgttctagcgatttaaaagcaaaggctaaaaaataaattttgataaaaaaccttaaaatcagctaaatttaaggttgaaaatttaaattttggctgataaatataagcaactaaaaatgaggcccctatgtgcaatggttggttggtggagtggctcaccgtggaggcgaagtcgtcgtcgtggtatcgcttggcggcgttgccgtggccggcggcggcggcgccgcccttgccgagccccgccgccggcttcccggcggcctggccggtctgcttctcctccctcaccttgttgaagatgtgcgtgtagccgtccgccgacgccgggttcgagtcccagtcgccgaaccgcggcaccgccgaccccctcgtcggctgccattggcgatcacaacaacaaggtcacgaagcttgcaaaagcgtcatcaatggcggagaggtcgagcggagcggagggaagctagcttactgtctcgttgccgcgcggggcgccgccgccgccgcccttggcgcgggagttggcgacgaggccgccgccgtagctgccgctcccgctgtcggagtaggggtgcagcggcgacggcgacggcgagtgctcgacgctgtacgacgacccgccgccgccgcttgtccgcccgcctcctcttcttgccggcggcgtctcgccaccaccagcggcgtggcggtggtacggcgagccgccggcgtagggggccggcggcggcggcggcggcgcgtcgctcggggcgcgctcgtggtgggacggcggaggaggaggggctcggctcggcgatggcgcggcgatggaggaggagaaggcctccgggttgtcgacggggtcgttggggttgaacatcttgccggcggcggcgaccttgcccttgcgcgcgttctcgaagtagacggtgtacggcacgttgccgccattgtcccagttgccgaatttcggcacgtgcgcgttcttcttctgctgctgctgcataaatgcaaagctatatatgatcagccattgccgccatgcattttcttccccttctcacaattttggggattttttggcccgggcatgaaactatttcgcacgaaaaattcaaaaaaaaaatgcgtatgtggcaaaatgtatttaaattcgatcagaatttgtttaatgtttattttttttccgatccgaaatttaggtatactgagatagtggatcctgaatcccagtaactactatacagttttagtatactagatggtaaaacaaaaattagactataaaatatggtatatcacgatgtcttcttaagaattataaaaatcgctgacatgaccactgccacaattttaacctaaaaaagaacattttcttttgcatgtcagatcaacttctacaagaagccatatacaactacaaaaaaacagctgtgcgaattcatcaaacatatcgagattttgattttgttttcaaaagtcatactcataaggacattgctgaagtaaacattattgaacatgccaacttgacagagctgacttgctgaatcatgtactactgcctactacaagtggttgtaaatgagcagtctgaccagcaaaaaattagcaaaagaaaaatggagaccaggaactggtcaattgcacacacactgcatacatttgatgtatatggccggactaatcaaatggaacgtgctgattttctaatcggaattaatcaatcgttcacatgctgtggcttcaccacttggactgattaatcaggctggccagacaggaccgggctaatgcggcggttgggtgttcaggtctgacaattaatctcttttgtgtgccaatttgtcaaagcttctggagaaatgacagcgcaaggtaggtctaccttgctgacaccctacgtttgattaagattacaaaaagtgggagaaatttcaagtcaaagagacacagatgcatcatgcatgatgcatcccttatctcttcagttttggttatatacaaattcaatcttcaggttagaacagattttgaataatgtaatcgattaagggagaacaattgattatccaggacgtcgtattccagtgagttaagcagacaacatctatcttctatggcagtttgattaattgtggtatgaatactatggagacaatactacaacttaaatgtttattcacaaagaaaaaaaaacaacttaatgtgatggaaagatacatctcaaccatcaagaaagacttcttgcagatgaacacgtcaaggatattccttcgttcacacaagcaataagttattcataccattcaagttgagcaaactaggtggattcaagcagaacaagagcacaacaacagaggactttgttttccaagcgatgaaaccggtgttccaactaattaactagctaacactggatgacaagaaacaaaatcgtggtgatcctgttacggttctttcagaaaatccaggctcagatttcgcatccaaaaaccatggacagataaaaacgagttactctgaagttattaagaaagtgagaactgttccttcagaaatttcaggttcagatattgaaccagaaaaccatggacagatcaaacttagcctacgcctaacggtaaactgtggcagaaagagcgatggaagaacatggtcgcatgcaattgcaaggtatgcccatgcccaagaacagaagagcaagaagaaagagcaaagaaagcttaccgccatggccgacgaggagatcgatcgatcgatcagacgaggtagcagctagccgtcgaggaggaggggatgggtatgtatgcctcgtttcttcctccttggaaggcaggggctaagctagctagctatagctatagctaagcttagcttgtcgccaatggagtccttctcctctcctctctctcaggccggctggcttgcagctgcagcctgggattataaactccacgaaagggacccagaaggcccagccaagtcgcttctttgctatgtaccctctcatttctctgattttgcttaatagtcctcgtaattaatgtcacttcaagtcttccctagtctctcttgatgatgattaatatttaatcgttgcaatttttcagtggttatggaagatggcaacacctactccctctggttatataattgacaagttttaaataatgatacggtctctgatatatatctttaaccatgtccttctattataatatatgtatcacaagtttttgttttattataatactttgtaaattaaatctatatatgttattctagtgtatttaaaataaataaacttaaaactattgatacttaaagttataaatatttaaccttaattttgtttaacacatcgaaaccggaagaaaaactactacttcctccatttcatattttaagtcgtttttttctaatcaaacttctttacgttttaaaaaaatagtaacatatgtaatatcaaattagtttagtttagttaaatataacattggatatatttttataatatgattgtttgtgttgaaaatactattatattgtttttataaacttgtatatgtaacggagggagtacttcaatagttcactgcttatcgccagtaggtagcaattataaggccgcgtctgcatatagatccttatcatagagccaagttcatttcacgaaaatagtcaaaatataaggggtcttagtgaaaaaatattggtcagatggagcagttgactagcacactatagctcgaacgatttaacaattaacaccttaaaccaaagttggccatctttgaccattcgccggctcgccaactccatcgctgtcttcttcctctagcttcccaatcgacggatggattgttcgatgcttccaagctaaacacctccatctcattctcattttttttctttgtttactcgaactaaccacacgattaattctgtcctgttctatatgcatacgtacactgctgcaacctattcgtaattaattaacaagttaatttaaccatcatctggtcccatccggcgactctttcctccctgattcaacggtgagattaccggcgatcaatcgatcgattgatcaaccggtcgttgcaccggccgtcctcttgctgcgacgacgacgacgacgaggagacgcatggatggatggcaagtcaatgctcccgcgtaagtgtagatacaagtggactgcacggttggttggtacaacaagtgccttgagttgaatggtctcctcctctcctctccattgaccacctctaccttgcatagtcaaactgtgcattgacccccatttcatttatgtagtttggtttcttgctcactgtcaaattcaagggatttaactttatgcattgtttgaatttggttcctagggcttgtttggatttaggctaatttatgtcttaccaaatttttggtagtttcaaccgtactttatggatgtttggtttgatatcaaatgttcgccatactagtataaattgtattgtactctctccgtttcaggttataaaatattttgactttagtcaaagtcaaactgttttaagtttgactaagtttatagataaatatattaatatttataatactaaattagtttcatcaaattaataattgaatatattttcataataaatttgtcttgggctgaaaatgttaccacttttttctacaaacttgattaaacttaaaacagtttgactttgacaaagtcaaaatgtcttgtaacctgaaatgaagggagtagcagtttgactcccaatattttggtatggcaaaatttgggttcaaaccaaacaagcgcttagatttgtggagccaattgagctgggctaattttgggccagaatataagtttcagctattttacttgatgggctttaattttcaaagtccagcccagttaggcccaagcccattatattatttcccctctaaaaaaaatggaaaattaatgttttttttccctttgaaggaaaatttccgaggaacacctccacgtcgcccccttttcccattccgcctcctccggcctctccaccgctgcccccctcgccgccgacgaaaaccctagcggcatcgcctccgccgccgccgcgatgtactccgatagtgtctccgggcggaagcgctccgtcatggaccgcctcggatcgggcggcggtggcggtggcggtggcggtggcggtggcggtggaggcggcggaggctctcgcccgcggcctgactccgtgaagaggtgcgacttcgagctcgctataggctcaaatcgtcgcttgctttttgtctctgtacatgcgctgctagatgttacgggcttgcgactcgtggttggatcgtatggggatcgaggtgggtttgggaaatgccgcttagggcgtggaaattagggagttcgtggcttcgtgcgtggtgattgtagctttagggcgcacttaaatgagcattttgcatgttgattccaggttgacccacttagaggggagacatgtggttgcgaccagcggattgattagtcagactgagaggaaaatgtgtttatttttgtcttactgcaaatgtgatagccagtgacctggttagaatactgcatttgctttaaattcgttttgaaactgtggagagtgtagcattttggacagccgtgtcgtctgttgttgctgcagctaacctttatcactatctgccagtctatatgcatgcacgccttggtatagttactatagtattgtcacttttcttgtgttgtctttagttatcgcatcattaagtcatgtttaaattgctgcatcactgcagtgtttccacctgatgtgtaagattcacaaatggttggtatgatcggttggtttatatgttcccagattaattgtgagcacagaagcaaacacaatcctattgcttatatcttctactttgtggtttggacaggtttcgtcaggcagatgggacttggagacgtgaactttatatggactctgtgggagttcaaagttcatgtaagggacattcatagtatattttctaaacatacaattcatttttgcttcctgcatgatgatttaccattactgtattactttcgttttgcacggtgaagctggagttccttccagaaatatccaaggaaaccagaaaccacatttgcagcaaaacactcaggttatgaggaaatcatcagttccagatcttcgtgaaaaattgtctggagttcagcggcctcagttgaatagtactgtacagatcccaaagtctgtaccggagatatcaacgagcgctaaacctgttcaaaagagggaacctgtccaaaagagggaaccccctgttaatgcggcccttcctgctactaagaaagtgaacgaaccatctgcaccaaagcaatgccaggaaaaggtggtgacactgtcatattatcttctcacaaactctcgtcctgatcaactaatatgctttcatatttgttctagactaatgggacaataatgtatcattatgctacatcccttttatgtatttcgcgtgtgtaatgatgtgatggtggtgttcttgagcatttaatgtttctccaacctttattctgaattattgtctttttgtatataatcttatctatgtttaatctgcttgactgcttgttaaaaaatacaaacttcatctgcatagtattgtaccaatgtaattatctgtccagatgcttttatgattactttgggtttcatcattaaatattatcagttgaacattttaataatgtgtttgtttaaaatgtgcagactgattcctctcttgatagattactgaagtctcttgatgtagagaagtactcaataaattttcaggctgaagaggcatgtttgacttatttgggtattcaagtttttcatgtgttactagcctactacattttgttaatgcttaatcatttttcaggttgatatgaaggctctgcttcacatgaatgaggaagacatgaagtctttaggaattccaatggtactgtacgaatttggattggaactttgttttacatgcaggagctagtccattctttattattatttttttttcaaatgagtgtctagatgcctctgtattgccacctttcctactgtcataattttaaatatgcaagttggtagagcaggtttaagttatataacttccctgaagagtgaggattaacttgatttaatcccctattctcctgtgtgtttgggtgagctggggtggggctaggggttgtcttgcagaattattactaagatgtttcaaattatttagaattatgatgcattctttataagctacctgtctctcttttgacatcttgttagatagtataatctagatcggttactaatccaaatttctagtagcttttaatagagttaaatgatgattctctaaaatgaatgaagtggtataagtactgtcatatgtgcctttgtgtaccttttgcatctttcagattttatcctagggtttagtgttccactaatgatatttcatagatgacatgcgtctggttgcagacaaagcaagtacaagtggttatctcctgtgtgttatttccccctgttttcttttgtatatatagctaagtattccttcactttggttttttattatttcgtaaaaacttcataaatgttggctttgctaactgcctataagctctaaaatttagcaattccggtgtgcccttggtagatgcatgtcggtgatctttcttgtctatggtatgcgtgcatgccgtaacgaaactgaacaattgctagagtgtccattgtgtactagtgtacaactatccttccgattgcaatctacttacatatatttatttttcaagtttgtcagcctttatgagtagcgatatcattgagttttgcagcattatatgccttgattttgtgtccatatttattagatatcttgatttgttttcaggggcctcggaaaaagatattgtcagcattggcttccaagaagaagaaattatcaaaatcattacctaccagttgaatagttgatgcatctttaaacgtagtagctagatgacatgttgatttggatgtgtgcactgccaggatcaacccaagtaaccccatttcttgtataagatttccatcgagatgatgtacaaatagagaactgtgatctagcagtgctgttgtgaggcaattaacagcttgtcaataggagttatgttctgatattatgcggatatttagatgccaacatatgatgcatcggaattattttcccgtatcatgtaaacccagcccattattagcgtgcacagctagggagataaggagattttatttgtatcggcttttgggggtttccgtgggtttgtgcatcttttccttaacttgtcatttatcttttcgctttattcatagtcagctaatgtgctcaggtggagccgtggagctgtgaggttgaatgagatgtctcactcatttcttttggttagcaaactggtgcatgcttgtcgtctgctttctgtattttggatgcctgcttccaaattggaagatggaaaagctttactccgaccgatgcgtgaatgtttggagtaatctgaatatagcgatgattccgaacacttgtagcaatgcagatttcatgatctctggagattcaaaactgctgttctgccatgaccttccaacgttttggctcgaatttacaatgaagattcaaacaggttaaggtttcactagaaaatttagtcgaagttgaaatacatgtacacgatatatttctccgtagcttcaagccttcaagacactgggggagagaaggtacttgccaagttgcattctccatgacctcaaatataggtcatgctattgctgttgatgacgatgagggcaagtaacatgatgcttaatgtgttgcccctaaaaatggcatgtaggattggatgatgaggtggcagtaataattgagaaaagagaaggtgcgccacctctcatgcaaggggcaacctccatataaacccgaagaaaaaggaaatgaacgaaaaaggggattggacaaacaaataaaataaaattatttgggttataatgatagaggtggtgtagatgtggtgtattattttcccttatatatatcacctcttatcttacatggataaaattagatgtgacaactacctgtactataaaacttgccctgacgcggtttctgtaggtggggcccactgtcggtgagacaaagggtgggatttggtgggctccgtttgtctcggcacaggaggagaaaacaaaaaaaggataagtacatgttggctccctcaaaaagtataggttgaatataatttatatcgcttaacgagaatatttgatattctggttaagagatattgaatcatattcgacctatatttgagggtgtcgacgccaaatcagttaaagccacctacaaaaccaccgatgaagtcaaatcgtactggtattgtcaagatatctggtatactactccctccgtttctaaatatttgacatcgttaacttttttaaaacatgtttgaccgttcgtcttattaaaaaaattaagtaattattaattcttttcctatcattcgatttattgttaaatatacttttatgtatacatatagttttatatatttcacaaaagtttttgaataaggcgaacagtcaagcatatgctaaaaagtcaacggtgttaaatatttagaaacggagagagtacaattctggttgagggatatgaattaaattctacctataactctagggagcctaagtggacttattccaaaggaaaaaaggagtgggtttcggcccatctcaattctcaaaccgagacggggattaggatcagagtctggattccgatacggcctctccgtccccttccccctacaactaccagatcgatcaatcaatcaatcaattaatctcttgttcttcttctttggacgctcggttgaatctcagcgagaagcgatgggatccgtggtgtcctccgcctacgccgcgctgcgctcgttcgtggacgcccgcattgagaaggtggggtggtgggcgtggcccatgggcgagcggcggcgagagcgtcccaagactgacgccgagttcgccgcccggattgcttggattattgaacagtcgaatcgctgcaatcaccggggtcgccgccaccgcgaggaggaagaggaggaggaggaggagcggccggtggggtggtgggcgtggctcatgggcgagcggcggcaagatcgtccccagaccgacgccgagttggccgcccggattgctcagtcgcatcgctgcaattaccggcatcctcgctaccggatcgataaacaacaatcgccacgggatcgatgaatatcccccatcgcttatggatgttatgttagtctaagtttttttttttcattttctgaaagcctagacgagatttcattaaggggttatttggttgatgcctaagcttaccataactaagcttaggcaagttgtatcatgtggcaaaagtatggctaagaaatagttagccacaagtgtggcaatgttagctctagttatctgagtatgacatgtgggacctaagggtaggaaagtgtggcatgacacaactgtggcattgaaaaaacacagacaatgaaaagactcataaaatttctgaaagaggtgattctcagagtcctgcttcagaattggaagatgtgttcttggtgaaaacatcaaagcctttaaaagttggtaagcttatatgctcatgtgcttaattaaaggaagggaaaacaatgctcaacagtcctacaatgtgcatgctgtctcagaagtcagaacatagaacttttcatgaatgagcacagcaacctttgatagtaccagtattgtttgttagtttttgctcaagataagaaaaagggcattttctggaacggcgctgtcgtgctagcttcatgaagaaaaatgtttaaagacttgattcatacatggactgcacaacaggatgtttacattagcaggatgtttcggcagttttaacatggcatagctttttgttacaagtgtggcaataattatcactaagggaaaatagctcagggttttgagtccttgttttcgtataataatttttttctccaaattgttggttaacttaagtacatgtggagatctttgaagaaaagaagcttcgaataatcaaatgtagaggataaaggttctcaaaccttgtagagaatgaagattgctggtttcatgaagtagctgttgaggacaaaactaaaaatttatatgcttgattctgcagattctaccaaagtggaacagatatctcatagcaaggatgctataggtggtcctttgcagactagaaaggataaggtccaaggaaaggttgttgatgctcttcctcagaaagtgttgtgtgatgccaaagttgatggaatggatgcagcaacagcagattcccgcattccagaagatcgtgcttcaccatcatttgtttctccactaagcgaagagaatgcactgatagcatcaggcagtgatgtaaagataaatgacagtgctgttcaaccagaagttagtacagaagccaagatgaccgcctcctcagcaaaagttactacaaaagacaaggggaaaactcagattagcgatgttgtttatgacaaggcacatgatatcaactctcttgcatcgattgagaaatgcttggaattgtatcttgaaacagaggagagagaatgggcctgtgagaactgctccaaagttgttgagaagccaggcatcatgtcaagtaccaaggaggacacaacagctggagaccagagtgaacagtcagagaagagtgcataccaagtggaagaaaaccaaaatgagcagaaagataagaatgaatgtcccattcaaacacgtcttattcgcaagttgccacctgtattaaccattcatctgatgagatatttggaggattttaagaaggtgataggacatgtgagctttaaggaaatccttgatgtggggcagttcatacaggactcagagtttgaaggctattctatgcaagacagccaacaaattgctgaaagaggtgattctcatagtcttgcttcagaattggaagatgtggtcacggtgaaaacatcagagcctttgaaagttggtaagttatgcactcatgtgctgaactaaaggaagagaaaacaatgcttaacaggcctacagacgtgcatcgtgtgtcagaagtcagaaaatagaacttttcatgaatgagcacagcgaattgtgatagtaccactattgttgtgttaatttttgctcaagataagaaacaagggcatttttcggaacgacactcttttactagctacatgaagaaaaatgtttaaggacttgattcttacttggattgcagttcatcatgtttacattagaaggacgtttcagcagttttgacatggtatagccttttgttacaagtgtagctgtcattattgccacaggggagataactcagggttttgagtcgtccttgttttcgtataatactttttctacaaattgtggagattattgaagaaaagaagcttcaaataatcaaatgtagtggataaaggttcagaccatgtagagaatgaaggttactggttgcatgaaatagctgatgtgcgcaaaactaaaaacgtatatgcttgattctgcagattctactaaaatggaacagatcacacaaaacaaggatgctgttcatggtcctttgaagactcagaaggataaggtccaaggaaaggctgttgatgtccttccccaaaaagtgttgtatgatgtcaaagttgacagaataaatgtggcaacagcagattccctcattccagaagatcctgcttcacaatcatttgtttctccactaagggaagagaatgcactagcatcaggcagtgatgatgagaaaaatgacagtgctgttcagccagaagttagtacagaagctaagagaaccacttcctcagtaaaagttactacagaagacaaggggaaaactcagattagcgatgttgtttatgacaaggcacaggatatcgaatctcttgcatcgattgagtgcttggaactgcattttgaagcaaagatgatagaatgggccaatgagaactgctccatcattctagttgaatacagggagcccatcatgtcaagtaccaagggggacactacagatggaaaccagagtgaacattcagagaagataatatgccaaagtgagcaatcttatgagaagaaactattcccagaggttggcacatgtaacacagatattgttcaagcaatagttgaaggccgtgattctcatatcactggtttagaactggaagatgtgacccatgtggccatagaggaaacagatgatctgaagagatctttggggtctcgtaaggttataggacatgtgagctttgagaaaatccttgatatgggactgttcatggaccccaggtaatgacaactgcatctgttttttttttcttttcgaaaacatataacaattggcatttatatacagcaaattaatcaagtttcttatttgcagtaagctaataaatattatttttcctaatttgttccttttgctttagaagacatctctctgcaacaggctactttcagatgacacaagcattgatgcttgatggtcaatctttgtatgtccatttttcacatcttcttgctatgggtatatgaattattgtactgtgtgtgtcaaggtgtcatctagatgcctcatctaatgctaaccactaaatgtgcgaaggtgtcatctagatgcctcatctaatgctagtaattttgaatggtggttctgttattttgtgaaatggaaacaattaaacaaggcgacaatctgaatgttttaactgtatttggggaattggttgtgatttggattttagaataatttgaatttgtgtgatgttaagaacctgatttgattctactctactcttgctctttcctaccttttagagtcagattatacatccttagaacaattattggtttgttgataatatccatcgttctggccaaagtcaattcactgtagcatagtatcattcactattctttggctacctctctttttggtgaagaatcacaatctccttaaaaaaaaccttcactctgatatttagccaagaaagatgtgctattgtttacatcgagctatatgagctgaagtcttatgtctgctttgatcatttttctctctaatcttcagctctggcgacaaagataattcgcatagtccagttggtgttgttgagcaccagggcctaaggggacctctgaattttctaggagctacaaagtaagttcacaccttcaccttttattttctgtccatgttcctctttaacaaattttgatgcctttcaactgaatattacaatgatggatgtttctatttattagactgaataactgatttgtttgttaattacactcagtttcagagaggtcatcgagtaaaagcagcaagttctattgaaccacctgatgtccgaatcaaatctttcttatctgcactacttgccacaataaggattgggcagctggtttttctatccttatatgattcagttctcagctggctcccgtgcggcttcttttggagaagaggagggccacaagcccctgagcctgaatttagctggatctctgttatgggtgatcccgttattaacactgatggtaagtgttgctatcaatgctttcattttcagttattcctatctttatatggatcattaattgaatgaattgtttttattttaggaagctgcaccatcgcagctgccacagtgtgcatagaggcccaacacaggttggcctttgaacggctgtacggaaaaggttctttcccatgcaaagctaaagtgcctaaagaactgaagaaggcctgctaccgtcaagggatttggagcagcgaggaaggggcctggactcccgacgttcttttaatgataatggagaaaggcggtatcctcacgcaacgagtaccgaataacatccagcttgcaattgatggatttttttggctagagagaaatgtagcttttggaaaacttgagtttatgcgcctgctgtatgcctatggtcctcttctcagcaccctttggacagatgatggttatgcacaaacgtttggagaccgtgtctacagagggctacaaaaggatccagattcgggggaccatcattgcgttgtctgttttgcataccgggttgacagcaggacaaatgagctctacgttagaattatggacaattgtgcagatgatggacctatcagatgggtattatttgatgtgttcgatagcttctacgttccactgataaaaaaatcctatagagcctcatgaactacggagaaagaagaagaagaaagagcatagtatctttgcttacgcttccagttatttctccacattgaagagaaacattgttggatgggctgttggtagagagattaggagatattattatcctccgaagcagaggaatgtagttctgtgttgatagaagttgacttctggagatatcctttagagagaagtaacgatgttgttcttgataatgcgtttaattttctttcttcccctgtttgttggatagacatgcaattagtatagtaggacatgtgcaagtatagaaactgagaaagatgattgtatagccgctggtacagcttggtcggatggtactgttattttgcaattgctttttacagcactgtggaaatatctggaacatattgtttgaaacattgagctttgcctcttttttctttctggtggcaaatgtacaatgtatgcaagatgattaagaaccacattttttcattcctctcgttttctggatggatacactgtgaaacgatttttctctaatgtaatgtgtaaagagaacttacaacttttggtctgactttgaatgatctccattgatgaggacaagtactttcaaagcaacattacaaattactactacctccgtcctaaaatacttgtcattctaaattgtttagcatgtgctaagattagaagaaaaagactataatacccttaataaaatattatatagttaaatgtggaatgttggttgggggtatgatggggagatatttgaatttgaagtagttgatgtgacaaatactacttgcaagtgataactattttaggacaaattttaaatgccaaagagccaagtattatgggacggaggaattacaactgtagaacaacacagcttccccaggtacatgacgtttctctgagttcagtacaaacgttctgcgctggtagtatgtacagagtactgacatgcaacgtactgtaaatgaacgagaacagttgactagctgttccaacaaatcatctagctaccgaagaaattagtaaaacataagctaaaaggcaaagaggctatgccactactctgattgtttttctacatctccgttagcactcaaaagattccaagcatggttagtaggccttcactccatttttacggcttgagttggtggaaccttagctgcaagtattggatttaattttgaactgtcatattcatcccgtaattcctcaaaaagtcagcgcttggatgagcaaggaatgtaaaactccttaggctgtgttcggtttcaggggatgagaataatccctctctcacggaaaacggagcaatcgattagcgcgtgattaattaattaattattagcttttttttcaaagaatggattaatttgattttttaagcaactttcgtatataaactttttacagaaaacgaaccatttagcagtttgaaaaatgtgcgcgcagaaaacgagagagaggggttgagaaaagggatgccgaacacacccttagcagaggtataaacatagacacagatgaaaaccaactgtgaagcatattgtaaagaaaatgattcaaaacaactatcagcagttgagcttacaactctgcttcagcagtgagtaaaattttaaaaacatccaaaaagaagaactatcaccaggcccatagtatatcttatataatgaaagcaacaaactttcttgtataaggatgtgccacatcataaaaaatatattggccattggataaagagtttagataaacaatgaccatcggatcaaaatgatacatgcaataataaaaaaaacacaaatgaattgatatatatatatatatatatatatatatatatatatatatatatatgtatgtatgtatgtgggaatttctagagttctctagtgctcctattaaacacatgatacaaatagagagaacgcaaagacaatgaaggaagaaaaatacctagagggttccaatgattcattttataaatatgtagtataacttagctaaatctgtagtaggttgggccatcaatattttataaataaaaaacttattaaaaccaccttcttaaaagataagtttatacataagtttttaaacgggattgaaagtcgtgcaaagtgcgactacgtggctagtacaggtgagacatgtaaaggtgggtgcttcaaataacgaagacatgttgaaccctatgaatggaaaaactttgtaaccgaggaaattagaacattcaacagactagcaaataatacataaatacagaaactctcattcaattatccagcaatgtttagtagtaacgacctcaagaccttgaccgcatttaccacattattgttgagaagagccaatatctatggattattgattggactcttcatctgagcccaaatcatagtaagaaaccgcctacataaacaacaattgtgtcaagaaaagagtctctcacaattagctctatcgatttgttgtcataaatgacctaaaacttcaacacaggtaaaatacaaatgaagaaattccgaaaggaagctttggctctgcaaacatgttatgatatagccaagaaagcgtttttcacaaaaacaaacattcaaaaaaagagtggagctatttctatcatgcatatttgatatttcaacctatgcctctacccaaaatgtggttacaaaagctaggacactaaaggcttagggctttagggggagcttaagattctgagatatgagaagcggctggttgttagctagcttctaagaatctggaaaagctgggtttcctaacttctagcttttagttcattttctggattttataactacagcttctcaaaatctggaccaaaagatggactgtttgggggagcttctgattatgggagaagttgcaacagctaaaagctcccccaaatagagccttaaattcattaagggtatagatgtgaagggcattttggtcttttcctctagtcttgtaatctactatatatgtgcctattaggctaactccaattaaaactgttcattcattccccaaattgtgacatggtatcgtaacaaaagatccgccgccgagccgcgagccattttctcgtcatccagtcatcagtcgtcgtcagttgtagcagtttttgccattatttgtattcattctcttgtgtcaaagcagcagcagcagcagcatcaatcacctcctctagttgcaaccatcggctgcctcgtccatctgtcgtccaacgcgcctcttcacttcgtcctctgccacgtcttgtcgatttgtcttccgtcagcaacggagtgaatggatctctgccaataggctgctcctccccgagcccaaacagtgaaaatactggaaggaggatagggattaggaaaaagcaaataaaaatgaaacaaatggaacagtcaataacaaatactcccttcatttcatattataagttgtttgatttttttcttagtcaaaattatttaagcttgtaggaaaatgtagaaacattttcaatacaaaacaaacatattattaaaatatattcaatgttaaatttaattaaactaatatagtattgcagatgttatcaaacgtaaagaattttaattaaaaaagtcaaaatacttataatatgaaacagagagagtaacagtaacactaactactgacgcaggcatctatttgttaaattgcattcaaactaatcagacaaacatctctcatctgtctatcagtttcgtccaggcacaacataagtagaaatgaataagcttcagcgaaaaacaacagaaatatgagaaatatctgccttctataaggtgcgaaagagggcctttttgaaaacaaaatgcaggggtatttgtaaaaaaaatatggaccgttagcaatggtagcggtaataagggttcctttttgaaaaatgcaggagggaaggaatcctggccattggatctatcaccaacggttagatctccagtacaagccattcccccgccgccgccgcctcccccaccggagccggcgagccgccgcctccccatcgtcaccgccaccaccaccacgtcctcctcaaggtctacggctcggcgccgctgccgccttcccccaactagtgaagccccccccccccttccgcctctctgctcgccatccatgccccctcttcctcgccgccatgctagcagagtcgggggtggggcaacgatcggcatctctgcttggcggcggagattgcaagcgttcagccggcgacgaggttgtccgccgctcatgctcgccgtatagttcttgttgcctttgtttatgggtcgaagtagtggtcacataggaatggggattttaattccaaatgtttgtgcctgcaagttaaagggttttcgctgctaattataatatactcctataagacaatgcaatgcagcttccttgacgaaagcactagttcttgagatggtgaattggtgatggcacgataggctttggcgatatgtgcaatataagattggtcattctaaagggaattatggttttgctcttggaagtcttacatacactttaaattgctttcttatgtgtttttggacagttttgggatccatgaacagcataatgtggctgcactggtgcaacagttagtatggacaacagtcggtgattcatcaagcatggggcagcagctgcaatggcatggccgtgctcaaggaaacaaagctaacctatgtcccatcttttgaagcactgctacaaaattgcaaattgaaatttactcctcattagtcccatttcctgctgagttgttgccttattggtcttcctagtgatttattatgagcttttcaccccagaagaggttactgatccagctgtaagcatggtgttgattcaagaggaaacttaagtaggaagaaaggtataagtaaccgcaggaaggaagatgtcactagagtctcctgaggtccaaagaaccatctgggaagaaaagataagaatgaagtgcagaagaagcaaaagctctgatcctcctcaaataattttcttacttccttctgcatttggagtaatgcattgctttctgcactacttatagaggattcgtacagccacctgggtccaaagtttgaaagtgaaaagaaattttgaaaaggtaagaaattctgttcaccattcatcttgttcatgcagtcgaaaactttcaacattttcctttgatgttctgtcaagataacctggaaaatgctttgattatttcgcccaactacttgaatcctatgttttgctgtttctaccatattaccatcctgtaagtatgcacaggtgtgatgccaaattatgcaaatgtctcagccttcttcagttccctaactgtgccataatagcctgtaattctagactatgcttaccaggcagttttccgttctcctattcaaccaagaatgataattacacaaataggctatggaatgagatcagtgcgtggacagattgtagacattaaacttcagaatgttgtaactttactaaacatgagttagaagtatttgcatatagatcactccaaagatatctcaacttcactttactggtaacatttgctaattctttgtccttaaaaaggctagttcgcaatttagatctttaatttttatgggagatctagcttcaagtgtaccaacttttctcatgaggataacatttcattcctattttgttctaattttgcatttatggtcagtagaatgctcttattcttattcatatatgtatcttctaggatggctaccccacaattggacaagagaattcttagcgaacttgaacttatgggattccctactgctcgttcaattagggcactccatttttctggtatgtctatttcaaaaggaatacaaggtagacatattgtaataaactattttatggtaggctgaatggcatagtattcaattagaacagtaaaggatatttaatttcgtctatggttgcatggctgtaatcctgtttgtgaatttcttcaacacatatccgaatcggtttggttaaaacaatcggtctttatcaggtaattccagtcttgaatctgcaataaactggcttctggaacatgaaaatgatccagacattgatcagctaccactggtatgttatttataaaaaaataactgttcaacatgagttcattgaaatatgcattgttctgtaattggtggaataattatcaatcgggaaacctatcagaagtttttcacttcaagcattttaaaagagagcttccctctatatcagttacatacttacatagtattgcacattgtcatgtaaaatagtgcttttgttaattttcaccttttgttctgagtacttgctttcattttctagattccaagagaaatcaacattgaatgtggtgatacaccaaatgaagcgagaaatgacattcaaggaatgaggtcagctcttatttcttaaatggtttcagatgagagctgataaaatatcagagtattatttcagggaaaaggcatttttttccttccctgttacatagctacgtaatcaatcaagaaatctgcactctacatatccactgtatttttcatatggcaacagccagatatgtcctagtaatgctgtaggttcagaatctgatatacctcaagaaacaagtgtcttattggggatgccttacaagagcaattgcacatttgacctttggtactgctattataattgtaaaatgattgctatatggacctgtcctttagcctgtgcatttgataaatccgaacagttctgatgttatccattagttctcctaactggtacaagtacactgtatgtgttgatttcaccatgcatttttatcatgccatatgccattgtcaaatactttatgttacaaaatacaaacaagtggagacaaaaggcaccatctgttaatccatatagatttgtgaaacttgtatactcaagtaactcaaagaatgtatgatcgcattcttttcttcgatatgtgctgcactgtaaaatgtgtaataggcatggttgttttgtagggctgatgcccaggagagtaaaccagaagagtcaacagcagctggaagacagaaggtttactcagagaacttcctaattttgacaccttaaccattttccattacatcagtgtgttatggacaaaccctttattgttatacttgaaggagtaaaacctgcaaagtgcatcatgttgaggcaactcttataggaaaggttaaacaaggtggcaatttgcatcagtttcttttccaattttgtcagaacacatcctcagattctaatagtacactggactagaagttgtgcataagaacatacaaggggcaatagcaaatatattcccttatccttgtctcaaaattgtacttgatttgcatatcctgtttagtagtctagtgttattacattagacaatttgggtcattgttagatctgcttacagcatagttagacagaaaattaaggaatatttcagtataatttgcaaatttatatgattgaccaaagatattggtcaattagtgggctactttactttcgttgttactgcctaatgtgaaggatgccaatatggaacccatttcactttctagcagtttgtttttctacctgattaattgatctggattctgcagccagtgctttatactttcataaactgttgtcacacctcacacctgaacttcctgtatcaggaaacatcacaggtagaaagagaacttaatgcagatcaaaacgaggacgaagtcagaaggaggtatgtaatttgctttggacagatatcatgtctttgatgatattgtttatcgttctggtaagtctagcgtgcgtgccgtttcaggatcatagaattgttcaagtcaaaacaggatggtcaagaaagagaaagaggtagaatccggaatcaattacaagaggataaggtctgataaaacaaaatacacttttttgggtcttatttttcatctcacttcattttggtaaccacgcaataaatccatgctggcctgcactgtccccctttgggatgccatatgcatgtgatatgctgccttaagcccttgaagcagaaagctaccaaaaagtgttaggcaaattaaatgggaactattcatatgttccctatcatgtttttttacagcatattcctcatccctaattgttactggatggttgttgaagcatcataattgaaggctatagtacgacatgactggaatactatttgttaagaaacaacaagatgtttttttacagcatattcctcatccctatttgttactggatggttgttgaagcaccataattgaaggctatagtacgacatgactggaatactatttgttaagaaacaacaagacattgtctctttgaaattttttatttgattgcaagaatggaaatctattgtgataaacgtatatattatgctaactaacaactgaatcatatagtatgctaactaacaagtgaaccatatagtctacatgatacaaccgataataacatatactgtggtctacaatgtgtagtgcccctgtgctgacatcattttttttctgagagagattgttggactgcatcacatccttcagcatttcttgtcatgcaaaacttacttttgtcatacattgtgaagagggagaggattcgagctgctaaagatcttatggaagcaaagaggactcttgaggaaaatcaaagaaaacggtttgtttcatatgcaacttgtatgtgatattccaacttaagggtgcttacttaagacacggtttttttagtgcagtgtgatggagagtcgaaaagcagatcaagaggaggagaaaagaacaagagagagaatccggaagcgtattgaagatgataaggtccccctgatccaatggttttaacttttttttttaacttcaaaatttcccttcatcagtttttttttcagttcaatccaattgttttctaggatagttcaatctcctggtgccctcacaattgttcatttaaagtatggctatctgaaaccgtaaattcattgatcattgtaattgtctttttattgttattggatttccacattgactatgttattgccatgtatatcacctcagaccacagtcatatgcattagtacagcctacattttacaattgcagttcattgcatgacctccaaacaaccagctagttcaatgatgacattgcttattgccatagtgtgattacactattactccatgaccagagtgacatgattttagtacgcttcaatcagtgacatgctatgttacttgttgaagtaccaaagagccttaaatccttatctcctatgcaggcagaaagaaggcgaaggcttggtttgccaatggaaaacccagtagcttcagtcccaaccttaactccaacgaaggtctaaaatttccagagcacctctatttttcatgcgaccttgaaacaacatttctcacctttttagctcctcagataaaacctgttgaacctgctgtgtcaccagaacaactgagagactgcctacgaaatctgaaaaagaattacaaggtaaaacagtattctgattgcagatacgaattatgcctgcgatcattttgacaccgaagcattgagctattgactgttactggacactgttgatatgatgcttcgtaaacacaattgtagtttatcgtatatatgttcttccacatcatcgttcagagaaaatgttgatatgttctcaaaagctcaccctcgtagaatccaacaatttgtgcctcataaatgcaaaatagcattgcgttaggcagcaaaactcttgtgtcatgtttcagataccgtttcatgagttacatacatatcaactttatttgtaggatgacactactaaagtcacaagagcattccaaatactgctgaagataattgccaacatagtgaagaacccagaagaggagaagttcaggaggattcgactaaacaatcctgttttcaaggtaactatgaaaagcgatgtgcaaggaggcatagaattccttaattatttcataaaaactttttcattcatttctcttatcctgaatccaccattctcctcttaaacaggaaagagtgggcaatttgcaaggaggcgtagaattcctggagctgtgcggattcatgaagctcgcgatcagcggctacctggtaatgccgagggataatatcaacttggcacttctcaatgctgctggagttgaggtagcatctgcaatggaaaacccctactttggcctactctccaagtgaatggaagatcctttcggctacttcatcatgaggaggcagctggtgctgctgcttctctacatcgtacaatcctcctactagtgatcagtgaatggccgccactacaatgggtccatcacagctgctagaatctgtttcctgtcgccaacattcgtgtacgatatctctcggttaatttggaactaacgacagatctaacacctgggtaaaaaacactggtgcttctcaagttgtaacgcatacgatgtgtcatgtgtatgttcatccaggaggaataaaaaatgaaaaatatatacatcacctgcaatgctgttatggtaactacagtaagttgcattggtttctctcgttactgactgaatgacaagcagatcagggccatccatccatataaatggacaggtagctttgtctcaaaatttatagccatctcaaagaaatcaatagagagggaaaaagatcaaatacccattgttaatagaaaactagtattgtcagtggtagataaatggtatcgaatggataaaatttctcgatttgtggacaggtggtagataaaagaatagaaacaactcattttaaggataaattttgaactctaaaaatcgaacatttatttttttttgcaactgagggagtatgtcactgttgcttgtggagagaaacattaattggcatctgtcctcaagggagataggaatgaaagatgaaagaaagaaagggagaggtgtgctaggtcagctgcattgctgcttgccggcacatgacatgcttggctcaactgtactgtctctactgtacttggtgggcttcaattctggcagatgagaattgagatgtgagaggagccgtcatctcatctcacttccttccttgctggtccctcctctctactagtctcctggaagagaagagtgaagagaaggatagtgtggaggcaggggaccagcttactctgaagtctgaagagaattgggagattgcttcttgtcttgttgacaagctgcttctgctgctgctgatactgataatgatgagttggttctaatcatctggccattagtaggatcttgaaatgagaagtgtatacatgtgagttgggttgtgcaagttttttgtctttgagcaaggttagctaggaatgttcagggttggaacttggaagtagtgtggcaagaatccaaaaaactttgcaggcaagagtacaaaaaacattgcaggtaggcaggcaggcatgctgatgaatggaacgtacgtacacatgggcagatcaatcatcaatcttcaagtcatcaaggagccctattacatgtctgagaaccgtggcaaaatcactgtaccagcctgctatcacctaccagttttaaaatataagcatttttaggatttaaaatttatgtaacgatataagcgattccaggacactgattcctatgtataaaaatccaaacattttcaactcgtcagaagcttaaaaaggaaatctaagcaattcaaaattcaaccaataatacgattgaaagagaaatttcccatcaatcttaatcattgctaaataatctagaaatggtttattttaaaacggagggagtattaatttgggaggttctgttcttggatctatggtccatggaggcatggagcagtactgcaagcaccagcagtgtatagtactgtgacttgttaaaagcccttgatctgtctgcagcctgcacaacccatccgatcttctcgacttgaatactatgggtgtgtttagttggggaacaggaaatttttgggtgtcacatcgaacgtttgaccggatgtcggaaggagttttcggacacgaatgaaaaaactaatttcagaactcgtctggaagccgcgagacgaatcttttgagactaattaagtcgtcattagcacatgtgggttactgtagcacttatggctaatcacggactaattaggcttaaaagattcgtctcgcgatttcctccataactgtgcaattagtttttctttttatctatatttaatgcttcatgcatgtctccaaaaattcgatgtgatgtttttgggaaaaaattttgagaaactaaacggaccctatatcatcataatgtatgatcatatcatatcatcgagataaatttcagtaccatactacacctgctgatactgtactccacgaactaattacaaatgctgcttgaatcgatagatccatccatcatcgaaggcacggacctggatcacaggcaaaaatcacagaattaatccctttaggagagtagcgcctttcggtttttattttacggaccatgtaaatactttgttagtgtttttttccttctctatcaatataaaagtggtaaagctttcgcccttccttaaaaaaaaaaaaaagcctgcaggcagcaataatacacggaaatcagattaggctccgacaaaggcaagcaggcagcgatttgacacatatagctagctaagctagctagccatggcgatcgatggatgattgatactataaactggggatgggcgcacgcgtgcagatgcatagaatccaatgtcgtcgtcggctgcattgcttgctgttcctcgccagcgatcgagatcgaagaagaattagggccgggcagtagtgaatgcgagcgtacgtgaagcaggaggggacatggccatggctatcctgcagcttcttgaatgcctccgttgatgcatgattgatccgttccagaacccctggactggacttggctggatccgttccttctccttccattgatccacttattagggtttaccagaccgatgaaaaccagttagatttcacaaaaccagatttcccgccgcggggattggggtgctagaacggaatggcgggaggtacaactcgcttgctttactctactctatttatatcgagttcacactgatgcgagtgtctgaatttgaactgaaaggatgcatatatggtaaaaatagacaaactatagaaaagaaattaagtcaggttatatattgggcactgtcctaacctaatgtagctcctcctctatttcccggactagttggagattacaaccgctcagtttgtttatcaagtaaaaaatttcaaacttaattttaatattttttgacaaaatccgacctgatttttttcaatgcttttcaaacggttttcatgaacccctttttggtgaaaaccgttgaccccctttttttacgatttggtgaaccctgccacggatcgatccctaatgtgctaggatgatactagtaggagtatagtacagtatgtaatatgcatgctagtttttttaactcatcaattttatttccattttagaaatatagtagtacatgatttgaaatgcaattcattgcactgaaatgacttctcaaagatctagctctaattagttggccatgagttaattttcagccaaaatagcttatcaacgataaaaaaagtaatttatgactaaaattttttatacgtttcctttgagacttaaaatccaatattgagaacgaaaactatgttgaaaactaaaataaactccaaagttacgttttaaattttaaattttgctagctgttgattttatataggggaaacgatgaggttgctagtagcataaaaagggttgctaggattgacaagatgcgagatgttttgacattcataataggattgacaaagctgcaagatgttttgacgatcataagctaaaggattcaactcctgcatttttataaggactcaaatcgacgcatgggctcttgtgtagctcccacagagcgacccaggagtgtcttggctatggtgatagggcgaggccgtgatggatgtgtcagtattcaacaatggtggcggtggccgatcgactaacgtcaacagcaatgatattgtaggtggtacaatgattccaatggcattcggggtagatggaaggcggccattggtgtccgaatctatcgtgcctcggcaagctgcattggagtggcttcttcttctctgcattcattggatagcatcgccaagcaaaggcactagaaggtagagacatgatggcaaaggaaaaggagccagccaaaggtggatgaaatgtggagaggtgcaggagcttagacatatatgtggtgttcttttctcctgtaaataaaaatgaagatggagattaagtgttttacgtaaaacaaggtggtattaacatatggttggttaagttttagttattacaaacttgaaaaatagattaatctgatattttagagtaaatttcatattaaaagttttcgcacaaaacacacatcgtttagtagtttaaaaaacatgtcacggaaatttttatctttatctaactctcgttggagaaatgaatgagactgtaatgatcgattccttgcgatttttgatgtagtaggtctcatcatgcagcataagattgaagcctagtatttccgttttctcttaaaactagaatataattattaatgtaacttttgattgtgtgtattcatttgtggttataaataatgaccgaactttcatccattatcttaaacaatactgccgcattctcacatcctttatccgctagacgattcatttctctagctaagctgttgatcaagtgactgattagcgcacctcaacaaccaccggtagctagttactccctccgttcaaaaaaagataaaccgcaggtttacgtaccaatgtttgattgtccgtcttatataatttttttttataattagtatttttattgttgttagatgataaaacatgatgaatactttatacgtgacttatctttttaattttttttataatttttttaaataagacggagagtcaaacattggacacggaaataaaggtttgtcttttttttttttaagtacgtctgtcactcactcgacctgtccgatccaaccggccgaacggacagacagccatccagccacccagccagctagctagccctctttctttcgatctttcttgtgcagcaacacggcaaaaatgcagccacgaataagatggcccggccagtcggtgcacacgccgactcatcggtcaagccaaccgctcaacttcatactccttcctaatccaaaataaaatcaattctagctattcatctgaatgtactaatgcatagctaaatatattcatatttaaaatgttactatattcgtcctaaaatataaacatttctagctataaagttaaacaattgtttatctagatttatagctagaaatgcttatatttgagatagagggagtttttttaaaggaaaaatatttatatttaaaaagttatcgagttgtacagttataaactttttcttcaaactttcaacttttccatcacatcaaaactttcctacacacaaacttctaacttttccatcacatcgtttcaatttcaaccgaacttccaattttaacgtgaactaaacacacccgatgtgtgttctggttacgtgtcagctgcttattgttgttggaacacatggttgtggttgctcttcaatgggaatggggttgcattgaacgttcaaaggcattattattagcacatgctgcacattcatatataggagatacatgcatcaagcaaacatgcataagtatgtggacaacaagggtaaagcaaatgtgtgtcgagatgttggtgcgatgcatctcgatccatgtgaaacgtcaccaccgtctagacggagtaacataggtagagagatccattacaatttcaggactcattcgggatgtaggattgaaaaaatataggaataagaaaaacatagaaatatgatagaaatgtaagtgtaaaacagagaatttgaaaacataggaatttcatgtgagtaggtgtttggatggagtaaaggaaaaacataggaatctttaagaaaataggtgcactattacaaaattatcacatgctactagtgaattaaacaacattaatcaacctaataatatgctttagttggttgatggcatgatttgcctcgttcccacgcagagggagagaaaaaagaggtcagcgtggatgtttttttcatgtgatcttccagtgatatggctagcgcaggaattttccctatgtatttcctacggatgttttcctgtgatccgaatgacgccacagtaaagtaatccataggaaccaaaaaccttcatttttcttgtgtttctcctccattccaaataagccctcaatggttaacagtatagttttggccggaggtataaacgagatatagtattttttttatgaataaagtccaatttacaccgttaactttgcgggaaaaaaataatttacctctcaactctttaataccatacgaattatcctctcctcccatccaaattcgaagcgattctaatcctatgtgatgcacaggacacatttgacatgtgtcgtcataatcagcttggtagaaatagacattatatcatctctctgcttaaatccacaccattgcccatcctttttctcctattgtacaggctagctcaagctctagttgtctttgtaggttgccatctacagcttgcacatagtcctgtttcttaagccatcactatttgttcagccttacttcttccgtttcacaatgtaagtccactataaaacggagagagtacttaagttgttgattggatggaggtcctcgtatcaaatggatatggaggctaagattgagtcatcatttttttatgtgaaaatgtgtcatcgggcttgttcactttgctaccatttttaaccttactttttttttggtaaagttaaaaaaaagtggctatatttagtttgttgccaaattttagtatgtacatataaaatgttgtcaaaatttgataaccttgtcaaaattttagtaaccttactaaaatttggcaatgccaaaacttggtaaggctaaaaatgatagcaaagtgaacaagcccatcatcggagggagtatgtggtggaggtggcaacttgatcttgatctagctattatgagcttgttgtcaatttgtcatcagatttgcgctagccgctgcctagtcatggctctaagcgtaagatctgaggccgccaccatcacagggatccaaaccaagattcattttattgtcgacttccttcaagctctaaagctatcttcagctatgggtctcatttaagctctagagccacttctagtggtacacttgtaagttactatagtcattttccaagccatccgagagcatctatatacaacatatacttcttccgtcccataaaaaaccaatctaatactgaatgtgacacatcctattactacgaatctggacagaggcatgtctatattcgttgtactagaatgcgtcacatccagtcctgagaaagaagagggagttgataataagaagatggataagagattgacacgtggggtaaaccacagttgctagctggattgcgaatagatgggaccaaaaccatactgcacagtactttgggggtaatttgtccagtgtaaaagaaattaagggtgaaggttatggaagtacagggtaaattaggcttttgtaaaagttgcgtactgtaaattggactttaaccaaatctttaagctgtgtttagttggatctaaagtttggattttggttgaaattggagatgatgtgactaaaaagttgtgtgtgtatgacaggttgatatgatggaaaaggactagtttagatccaaagaccttgtttagataggactaaaacttttaagtacctatcacatcggatgtttggacactaattataaatattaaacgtagactattaataaaacccatccataatcttagactaattcgcgagacgaatctattgagtctaattaatccatgattagcctatgtgatgctacagtaaacattctctaattataaattaattaggcttaaaaaatttatctcgcaaattagcttttatttatgtaattagttttataattagtctatatttaatattctaaattagtgtctaaatatagagattaaagttaagtccctggatccaaacaccacctagccacaaccttattcgcccgaaaaggaaacagtactacaacacttggcctgcaaattctgcactcgatgggtccgattgctctgatgaagcatgcatggggagaagaataatgcagctagtagtacttgtcgctgccagggttgtttttaccattgtgtttgtgtcatctgttgtttggttgttcgcagaattccaagggaaagcgtcaaacagccggattttgggcagctttcttcctgcgagattgatgattttttatctacttgtacagttctactcctactaggttgatagggttggtagcagggtgtcagctgaagtagtagtatgcttttggttttggaccatctaattaaacatttttatactccttctttgtttgatccttaaacaggatgcaataatgctaacaaggttggaccatgttatacagattttggccttagatggggtttctgtgatgttgatgttatgtcattattgtcagtatatacttaagcttacctaccaccttgattacttaagcagaaaaagatcaatattaccctgaacatgaactctccaattgtcaaaatcgcctaattatacacataccaaggttaaacaaactgagggctcacaaataaagtgtaatccggttcgaatttttggaccggatcaaaaaacacaaaccacttaatttttcgtcatttttttaaaaaaatcaaactgaaattttaatttttaacaaaatttattcagaatttattggtttttgtcgatttattaatggattatgcgaaatccaatgatacagcttgcaagcaaattttgattcagtatcgggactgtgaaccctaaacatagaatactaaagagaaacgtagcatcgcgtatcaatatcaagaaacaagttgaacacatcgggaacgatccaacacggaccgtctagcagcacgacggctactctcgccatctgcactatacacagcctcatactctcatccataaaataaaaaccttggttacgtcagattgcactcgagaaagatcacacaccttgcaaagtaaaaaatggaccagagggaaaaaaggaaaacttccagcacagtggctttgtgcctttgttcttcttaaagagctaggagctcatcttcctagggattgcaattttgcccatgggtccgggtatccgcgatacccgacccaatgggcacgggcgtaggtgtgatattttacccgtgggcacgcccgcccgagacccgtagatatcgtgggcaacaactgggtttcattttttacctgtgggtaacccatgcccgacccgatacatatgtattagctaattttgacttatctcttaattcttatactcctttctcatggttcatttgtgatactaattagtaataagttgtgatgtaattcaaattattgtcgataactgataatttagtaaattgttgattttatttctctttgttaaattatatatctttcgagttattattcatgtgtgatccattgggtacccaccgggtatacccgtgcccgtcgggcatgggtacgggtatagagttttgcccgctaaccctagtgggtagggtttgggtgagcgacgacgagcatggggtcaggcatggttttgctctacccgtgcccgacccgacccgttgccattcctgcatcttccacatacgtaaaacggaacgacttattagtacataattaattaacttttttagaaataaattaatgtaattttaaaatcaacttttctatagaaatttttgcaaagaacataagctctgttcggcaacaatactctgcagctgtaaccaggtgcgttgtatagccggtgtatatattttctttaccatgcactgtagcggttgctgctgtacagctgcagtttagctatattgaacagacccatacttcctccatcccaaaatataagaatctagtattggatgagacgttttcaagtacatagtatttggacagggagtccgtctagatacgttatactaagaaacgttttaacttgtcctagattcttatatttggggatagaggtagtaccgtttaacagtatgaaaaaacgtgtgaaaaatgagtgagataaagttgagaacacgtaggaaagaacacatcctgagtcagtcagcaagtgcggtgttcttttattttcgttaaagaaagaaaaaaaagaaaaattgcgcggatcaaacccatctcctctccacaatccacatgcgcgcagccgcgcgtggcgtggcgtccggcttgcgaccgcacgccaggaatcccgcggtctcgatccaccaccaattcaccgtcttccaccggcacacgcaccccgcgacgcgatccatcccaattttttttttttggcaccgggatctcaccctcgcaaaaccccgcgcggcggccacgcgcgcgcgcgcggggaggcgtggcgtgccggccgcggccaccgttttttgctgtcgcgctccacggtttcctccgctcggcgtgcgcgacgcggtgttggggttgtgttgccgcccgcccgcgccgcgacgacagaatcattggcggatgcacacacacatgcataaaaatgccggagcgtatgattgcatcttgaccagtaaacgggcaagcgtccaaatccacggaatattacgtactttgttcctgatgctggaactttacttaactaaccagatcagaacaaccctacttcttccgtcccaaaaatacccaaccttgcactagaacataataatacattagacataatcttgtatttagattcgttgtgctatagtatatcacatctagtattggattaccttctctaggacgtagggagtacttctcagccaaaaaaaggaagatcctcatgagcaatatatagcatacacttcgttgcataataaatcaatttttatagaagaaatctgaacataaattatactcccttcgttctataatataagaatttttgactttttacttgcactgtttgaccacccgtcttattcaaaaaatttatgcaaatataaaaaataaaaagttgtgcttaaagtattttggataataaagtaaatcacaaataaaataaataataatttcaaaaatttttaataagacgaatgatcaaacagtgcaattaaaaagtcaaaatttcttatattatgaggggaggggggaggggtattcagattcgtatatgaaaaataatttattttcgagagagcaaattcttgtaccaaatcagcctttagaaaattgtgggattgtaggactggttgctcttgttgttggccaaaaaccgatcacgattggttgacatttgcgagcaaaatttggtcatttggtgcatctaaataaacatttcttacgcaacctcgtaccaaaatggatggaggtggcaatctgctcacaccctttttcaaaagataatacccccaaaatcgaacctaattatccaattatgctacattgagatggatggatataggcacatcgcgacagtgctctatcaggcttaactctgtcacatacatatgaccacctgtcaggctgtcacggccccagcattgacatttggatgctctcgaccaaaccttttggcgtctgctttgccacattagtccattattatgaagaaaaagaaagggaggattagtgcaaaggaattctttttatcaggtcaacatcattaggccgatgagtaggacccctagaatgagattatactagtatgctattagagtattagtgctatactgctactaattgtactcctgcgtcggtgtcgcgcaaatttatgagatttcgacttctggtcataaatttcgccaaatcatgtgacatcagagggtaatcagcatttgaaatggcgctccctccgtggaagtaaatgagttcataccataggaatgcacaatgaagtgaggttgataattggaagctttggagcaataaatttggagttatttaacgcactagcactgcagccagtatattgatttatttctactattactcaaggatttaccaaaccgttttggatatggttcccgtcacctcagtttgactggttatcggataccaaacacgatgttatcgcgaggcatatcatggtttcaaaaactgtattatttaccaaaccgttttggatgtggttctcgtcacctcacagtttaacggttatcggatatcacgaaaaacacgtattaccgcgagtcacatcgtggtttaaccatgcgaaaagttaccgcccgagataaccgtgaggttttgtaaacctgctcttactatagatcttcaaacattgcgtagctggagcctggacaagaactgaaaaaaaaaaaactctgccagatttacaattactactaatctgtactccagtagtcaaaagttttactaatttttaacctaccaccacccaggcaagcaggcacccacccaccatctgctgatcttgatggttgaatcaaatgcgttcctacaggacgcaagaacaaaccttttgatcgatccagggtactaggtttttgaattttggggggaattgaaacatgaagagaatgtttgatctcttgcaagttgcaacaagctgatgaacaggttctaatctttgcagttttttttttgcatttgcatttgcgaagaactgaatcaagaacagaggggagaggagaggagagatctatctatgtctggatcagtggggttcttggctcgagctgagggaggcaaccttggtcgccggcggcgaggtcagaagatgtcgaggacgtcgaggatggcggcgttgcagagcgggcagcggccgcggccggcgaggagctcgcgggcgcaggtgcggcagaaggtgtggccgcacgggatgaaggcggcgcccttggcccgcgccatgcacacgcagcagcagccgccgcccgccgcccccttccccgcctccgcctccgcctcgtcctccgccgccgccgataccgatgccgatgcggcggcggagggagacgcgagatgctgctgcacggtcgcgcccgagccggcgctccactgccgctccgtctgctccagcagcgccatcagggacaccctctccccctgctcctcctcctcctcctcccccaccgtcggcggcgacacagacggcagctgtcgcggcggcgtctccggcggcggcggcggaggaggaggagtcgccgtaaccggagcaggcagggagaccgcgcggcggacgagggggtcaccaccttccccaccaccaccggaagacgacgggagctggtcatcccggatgatatccagcaaggtgcgcgccgccgccgccgccgcggcagccgaggacgcaggcgccaccgtcaacctctcggccgccatggccgacgcgagggtgaccgcggcgcggcggcccgcggcgaggtcgtcctcgtcgcggagcttgaggaggtcgcggaggttgcaggaccccgcggcggcggtggcggcggccgtccccgcgggccccacggcggccagctggtccgccagcgtgacactccgccgcagcaccctcccttccatggatggatcgagctcactctctcgttcttgctgcggccaagcctgcctcgccgcgtgtgtccggacaaggcgagggggagagagagaagcagctgctgctgctgctgctttgggttaataaaagcaaaggaggaaagggagggaggagtggtcgcttggatctcggcgaggtgggggatttttcttcattttgcgggggtttttgtttgtcaatgtgtgcgccggtgcacggcacggttgcgtttggcgtaaccggttttggtttggtttggcaggtggtgggggtggtggtaatggagggacggatggggtgcggccgtgcgtgcgtgcgtgcggtcggaggcgtcggccggagacggtttctgcgtgccaatttggcccaaatggcacgaaaccagcgtgccaatttggcggtgtactgggctgtatgcccgtagcccactttgttggtcgtggaacatgacggcgatgatgatactgctgcattgtctgcccagtgttcaaaaaaaaaatcgctaggtcccggtttataaaaaccgatcaatattaaccttttttaatacattaaacaaaatttataagtttttattggtttttggttggtttacggtaaactgatgaggggcagttttcatttaaaagttttttttaaaaaaaatatcgccaagtcccggtttataaaaactaatcgaaattaactgtattctactacgttaaacaaaagtcaccactttttattggtttctggttggttttcggtaatacaatgaggagtggttttcatttaaaaacggaaaggtaaacccttctcctgactctcatcagtgagagtttcaatgcgagctgcagtatccagtagacatcagaattgattgaaaaaatgaaagaaaacgattagaatctgccgccgaatccgcgaggacagaatcgaagttgctatcctgtattgattgatgcatcagaacaccgaaattctaggagagttccaaagcagcaaacgagcaagtactactcaaagcatgctgcacattctccatcaaggaaacaagaggcctgaaacaatgttgcttagcttgcacatccaaaaatacttgggggaccaaagctcaagacatatcaagtagtaatatcgttgtattttctacctagtgtaaagcattaccaagcattagtacagtcctgtgttcttcttcattcttttccagggaagaagaacacgttcctcatgagaaaaaaaaaggagattacgaatgtgatcagactagctgattaagaacaccggccaccatctattcagctgggcaggaacgtattacagtcaatttgcaggtcctacaatgactcagccaaagcaaacaaaattggacttgatcacgacgtctactgaatggatccttgtccatccaaagaatgcttgctaatctaacaaatttacttccttcgacgttagcctccaattctctcatagaagaaaagagaggcctcgcacttgagaacttcttctagagatacttgtctgatgtcggtatcacttgcacgataccaaggggaagtgccaccgtcaggctgctcttgatttggtctcacgtaagcaaccatgtgccctgaactggtgctggggccaatgtgttcaatgacaccgactaggtgatagctggaattgtctttgtcctcagaactgaaggttacagaaaaacaaaagcaatcaaactagatgttaggcatggttattttgatctcatatcctcaatgctgcatattgctaacaagaatctcatatcctcaaacatttaacgaataaaggccctttaatgaatttcaacatgccattaaaacatgttggtgcgaaggctgggatatttatttcagtacctaaaaaatctatataattatacccttctaatgccaaatactaaaaccagaataaggccaaactaatatttttgaaaaaatgcatttggaggcacctaatcacctacaaacaaaaaggcagtcatctctaaaacataataattctgattttctaatgagatgtatcagtaaagctagtcaaaatatacaaacaagaaaaattgcttactgtgaatcataaatttattggaactgccacatgcttatatagatattgccatgcagaaatgctaatatgcaatacctggggtccatgaactgtcctacatcaaggatctcctcaaagttcacgtgtcctctaactttaccagtctccttggatctcttcagatgaatggccaatacaggtggcagcttgttaataacacgagtttgaatcccaccttgattcctattttcccgctctttttgttttgcatccacttggtctgcactatgatccacctttacttgtttccacttaccctgatctagactgctggtattttcctggccactcaacaggtcgtccggttcctcagctggaaggcaactagatacagcttcttgaacacgttcatggcaatcagtttttttgttggctatgttatcagaggccaagtcttgttcaccatggatcatcccagaagtgattttgttatggcttggtggtcgacctcggctgcgcaatgagtatgtgtgcttgacaggaggtagtgtgttgattccttcagtaatgctgtccattgcgagcatagctttacgttctgaatcagaaccatgtggttgcttacttgaagtgcattctagtgccaaactttccaaatttttagattgctcgctctggcgtgctaccttgtccaactgcacagtctgatctctgtcaattattgtgttttcgttggtgcttgccattatctgttcaccatctttactaccagtggtgctcagatggtgagaaactccagaacagttatcacatctccattccagcagctcttctttaaaaaatagtgctaggcactcttcaatcgatgcaagagagtcgttatcctttgccttgccataagccatattgctaaactgagctttccccttgtcttctgaagcaccttctacagagcaagcatttttcttggcttctatactaacttggggctcaccggacgtattctcaaaaccagcattgtcattttgccctaaatcatcagccttacttggcgagcgctgttccacttcaacagaatctgcagaatcaagcatatataaggctataatttatctgcatcagcaacaacacacaaccatcaacctccattctctacgatctgaagctgcctttcttcgagaatcaccatacttgattaagtaaaccaaccttctagagcaaaattttatgtatgaagacaaggacttaacaaataaacagtcttccactctaaggtcttaactgctagactacgacaaacaactctgccatgctaacagtgctcaaatatcatacttcttttatgtagccatcctgaaggtttactagatatttcttcagtccatgtgttagtaagtccttacaaatttttctctgtttgactagaattggagctccattccgaaaaaagtgcccgttttctcgttatgatgagaaaaacaatggtggtgtgactacaatactcctctgtttctttcatttattcctcaaaagatgtacatggtctgggaaaccctctatacctgcatatctgttcaaaaatgttctctctccttttatttagaaacacaatgcataaacttaccaccatccaaaggctcagatgttttctctttgtccacatctcccagttctaaactagcgatatgagaaacactgccttcagcaattgctttgacaatttcggtgttactcgtgtcaacctctgggaatagtttgataccagtcttctctcgagacatgcaacttatgtcccttggtggcgatgcaatactttttggcggaggcctctctgatggcagtggaactgagagctcatacattacttcatgggaaactgaattatatgagcaatggctgcaggaaatggtagcagacagttgaacacgaaaaatggaatcaacaactgtaggagatactggaggcaccattgacttctcctccttatccaattcattgagtaaaaagcaaagcaattcatggctatcttgcatatcactgcttatgaaccgtgcatccaaaacacgaatacaagcaaagaacttcgtggggttcagttggagttgtgcgttatcaacgttgtttacctcctgaaagagctctttcagttcataaccaaggatatacgaaggagcatctggtgctaacatccttgcccgcagcttgccaagcacaaataggcactgcaacaacgcattgatgtagcaagtgtttccaagattcggcatccctctgataacacagccatgccccttcactaatccagattcttgaccaaataattccttgccaaacaccatcccctgctcaacagtcggtgcactgagggtcaagtcaaattcacatttgaagcagtaccccttatatggatcactgtaccacaaaccaacccaatggtgttcaaacttccgcgcatgcagccgggcatgtccatgcggttttttcttggcctcagctctagtgcagaaatgcttgttgcatcccgtgcacaccatgatacgggtcctcccattgatcttacacccgggatgttggcacgccggaatgttcttggaggtggtgacctctgacacaatcagagtaacgtcttcctcgtccaataagtgtctgcattccgttctgtcgctttctgattccgtgtcatcgacctccatattcagacaacgttcacaaatgaagcagtacagagtgtccggtttactgaacaatgcagcgacacaatgctgctccagatcggcgtgccaccgggcgtgtccctgcggcttgtccatggtcccgtccccaatgcagaaaggcaagctgcaatcgatgcacaccaagatactgctcttttccaccttgttctcacacaggtaatgctcacacctcgcggcgaacttggaggacctgagctttgatatgaactgtaccatgtcttcctcaaaacgtacgaagtgggcacataactcctcatcggtgttgctggtcgtcgccgccgccttctctcccggcttgctcgcccccggcaaagccaggtcgccgcatccgggatcgggtacggccggagcaagcaggttcaggtccaggtccaggcggggggctttgagcggcctccccttgctcgccttctcttccggcttgctcgcctccggcgaagccgtgtcgcccgcatccgggatcgggcacggccgcagcaaacagatccaggttcaggtccaaatccaggcagggggcattgagcggcctccccttgctcgccttctcctcgtccatcccgcctaggggagcaagaaccacaagaaagaatcgagttaatccatccataaaatccacaacgaatcaacacaagccatacgaagattagcatgaaacaagaaggctaaacgatacaggcaaatcatcaaacaggttggccgttaggcgaggacgaccaatccaattccaacaacctcgacgccacgaaccgtagtcatactagggtgaactacgagagctcaacaagcgggaaaaccacgaagaacattccggcgaggaaccacgaacgccgcgccgccgcggattccggcaccaagtaaaacccccaccccaacccccaccgccaccgccacaactaccaccatcaccaacaacaacaaccgagcgatcggccccgcgtcggcgacgaacagagggatttgggggggaagaaatggaggggaaaactcaccggaggatgcgaggaggggcacggaatcggccggcgcgcgagccgcggcgtcctgcgacgacgacgacgacgacgaggccgaggagttgggagggagacggtgacgtggcgttgggcgggttgggtggtggtgggcttttgggcgtgtgaatgcttctgatccatttggcttaaatagccaggaggggaaatcaaggcccggcccagtaggtgtcaaccctctaacaggctgggctgatccaaaccaaggtcctgagtaacacgaccttaagttctaagtttagaagtgaatttcaaattagattatttataagaggctaagttcctaatttaaaagattcattaggttgtttgatgggctaagttcccgatttaagactatatatttaaatggatatagaggccggataaaaaatactcttctccacaaaaaaaaaaaaaagagaaatagccactatcctgctgctgatggtttgctctcacacaagcaacggagagctcaatatccactgtggtcagttatatataaacttcaatgaattgagtctggcaaccgtgaatcgtgatgggtgatatcatataaaaacgaaccaagagttgctctactgatgtagactgactctaagctataacgggttaagaagagcataacatacacaaggcccaagttggagggatgcagtttatctactgcagctttagaatgcctattcactttactgcccatgatattacagtcacacttgcctcaaggctaattatgcagctcctccaaacaaatgttttgatcatagatagaacatggggtttttttttgtttctatttcattaacctaaaccatgctattctgccagaaagaagcaaagggcagttcttcatggcaacagagaattgtccctacggcgagctgctatggcgctccagggccccctcgtgcgtccgcttcttcatgtggattgcgctgaaagatcggtgcctcactgctgacaactttgaccgacccggcaaaaaaagaaaaaagaagaaaagaaaaggagagcaaagggcaggacagcgctatcataagtcgaaaacatgtttctatgctaaagaaaacaagcaaaccatgccaggaaaattcatttgtgcaccactgtggaagcatggttactttgatttactggtttatttcgacaaacaaaaacaaatgtgcacacagtatgcaataattcacatgctcaatgcattcaggttttatattggctatgctgcaaggtactcctaccacaactcatccctaaagtgtatcctttggtatctgtgtccactgcgggtttctgttcaaaatcgctggatagctcacattgtgggatctggcccggtttctgcggaatctagcccaaatcggagaggccagaggctggaggtcccaaagtggagatgcaaataaacacattacaagtatccaccgtccagaacaccgtccagactggagaggatttgttcaccagagattccagtcatcctttcttgtttgatccatcagaacaccagaaactgtaggggacttccaaagcagcaagcaagcaagtactcaaagcatgctgcacatggtccatctaggaaattatatgcctgaaaccatgtcgcttagcttgcacatccaaaaaaattgggggactaaagctcaagatatatcaagtaatatcgttctgtattttagacctattgtaaagcattatcaatcattagtacagtcctgctcatttacaaatggcacatgtcctattccttcattcttattccaggaaaagaagtacgttcctcatgaacaaaaaggagattatgaatgcgatctatttgcagtcctacaatgactcagccaaagcaacaaaattggacttgatcatgacgtctactgaatggatctttgtccatccaaagaatgtttgctaatctaaccaatttacttccttggacgttagcctccaatcctctcgtagaagaaaagggaggcctcgcacttgagaacttcttctagagatacttgtctgatgtttgtatcacttgcacaataccatggagaagggccaccgtgaggttgctcttgattcggtctcacgtaagcaaccatgtgccctgatctggtgctggggccaatgtgttcaatgacacctacaaggtgatagctggaattgtctttgtcctcagaactgaaggttacagaaaacaaaagcaatcaaacaatactctcagatataaacaaatacgattaatcaaaactgcataatagtgcaaggataaaacatttaacgaatgaaggcccttcaatgaatttcaacataccactgaaagatgtaaggattatctatacgattatatgcatttgccagtgcaaaggctgggatatttattcagtatctaaaagctttatatgattataacccttataataacaaaagtactaaaatcagaaaaagccaaaccaatatatttcaacaaattcatttggaggcacttaaccacctacaaacataatggcagtgatatctaaagcataataaaattctgattttctaacaaaatgtattagtaaagctagtcaaaatatacaaacaagaaaaaaactacttgcttactgtgaatcataaatttattggaactggcacatgcttatatagatattgtcatgcataaatgccaatagtcaatacctggggtccatgaactgtcctacatcaaggatctcctcaaagctcacgtgtcctctaactttaccagtcagctgggatcttttcagatgaatggcaaacacaggtggcagcttgttaataaaacgagtttgaatcccaccttgatacctatcctcccgctccttttggtttggacccacttggtctgcactatgatctagctttacttgatctagagagctggcattttgaccctggccactcaactggttggccagttcctcagctgcaaggcagctaggtacaacttcttgaacaccttcatggcattcattttttttgttggctgtgttatcagaggccaagtcttgttcaccactgtccaaattgctagattgctcgctttggcatgctatcttgtccgactgctcagtttgatctccatcaactattttattctcactggtgcttgccatcatctgttcactatctttaccactagtggtgctcctacggcgagcaatttcagaacagttctcacatttccattccaccatctcagcttcaaaatgcagttctaggcactcctcaatcgatgcaagagagttgttatccttcgccttgccataagccatattgctaaactgagctttccccttgtcttctgcagaaccttctacagagcaaacgtttttcttggcttctatactaacttctggctcactgggcgtatactcaagaccagcattgtaatttttccctaaatcatcagccttagttggcgcctgaataatctcccctgggacctcatccttctgaatttgggaaggaacatgtacaccatccttgctttgcgagtgctgttccacttcaacagaatctgcagaatcaagcatatataaggctataatttatctgcatcagcaacaacatacaaccatcaaccttcattctctacgatctgaagctgcatttcttcgagaatctccgtacttgattaagtaaaccaaccttctagagcaaaattttgtgtatgaagacaaggactcaacaaataaacaatcttccactccaagctcttaattgctacactacgacaaacaactcttccatgctaacactgctcaaacgtcatgcttcttttatgtagccatcctgaaggttttccatatatttcttcactccatgtgtttagcaagccctcacaactttttctgtctaactagaattggggatccattccaaaaaaaatgtatgttttctctttatgatgagaaaaataatggtggtgtgattacaatattccttagtttcttgcattcaatcctcaaaagatgtatatggtctgcacaatcctctatacctgcatatctgtttaaaaatgttctctcttcttttatttagaaacaggatgcatgaacttaccaacttccaaaggctcagatggtttttctttgtccacatctcccagatctaaaccagtgatatgagaatcacgtccttcagcaattgcatgaacaatttcggtgttactcatgtcaacctttgggaatagtttgataccaatcttctctcgagacatgcaacttatgttccttgatggcagtggaactgatagatcatacattacttcatgagaaactgaattatatgagcaacgcctgcaggatatggtagcagatagctgaacacgaaaaatggaatcaacaactgtagtagacactgcaggaatcattgacttctcctccttttccaattgattctgtacaaagcaaagcaattcatagctatcttccatatcactgcctgcaaattgtgcattcaacatacgaacacgatccaagaacttcgtcgggttcagtgggcgttgtgcattattcacactgtttacctcctgaaagagctcttttagtgcgctacccacgaacccagaaggagcatctgatgctaacatccttgcccgcagtttttcaagcacaaagaggcactgcaataacgcattcacgtagcaagtgttcccaagattcggaatccctctgataacacagccatgcctctttgctaatccagattcttgatcaaatgcctccttgccaaacaccatccccctctcagcattcggtgcacctaggatccattcgaattcacatttgaagcagtaccccatatatggattactgtaccacaaaccaacccaatggtgttcacacttctgggcatgcagacgggcatgtccatacggttttttcatggcctcagctctagtgcagaaatgcttgttgcatcctgtgcaaaccatgatatgggtattcccagtgatcgtacacccgggatgttggcacgccggaacgttcttggaggcgaagatctctgacacgatcagagtgatttcttcctcatccaatacaaagtgttcgcatcccacttggtcgctgctgctgtcactttctgcctccatgtcactcatctccaagttcagacaacgttcacaaatgaagcagtacagagtatccggtttactgaacaacgcagcaacacaatgcttctccagatgagcgtagaattgggcgtgttcctgggcgtgtccctgcggcttgttcatggtcccgtccccaatgcagaaaggcaagctgcagtcgatgcacaccatgatactgctcttgtccaccttgctatcgcacatgagacgctgacaactcggggtgaacttggaggccatgagccttgatacgaacattgccatgtcttcctcgaaacgttctaagtgggggcataacccttcctcggtgttgctggtcggcgccgccgccttctccttaggcttgctcacctccggcggagccgtctcgccgcatccgggatcgggcgtggccgcagccagcgggtccaggtccttgcggggggatttgagcggcctccccttgctcgccttgtcgtcgtccatcacgcctggggacgcaagaacaacaagaaagaatcgagttaatccataaaatccccatcgaatcaaacaaagccatacgaaaaaaacagcacaaaccaagcatgaaacaacaaggctaaacggaacaagcaaatcatcaaacaggttggccgccgttaggcgagggacgaccaaaatccaactccaacaacaaaccacgccacgcacgaacccgtactcaggctagggcaaaccacgagagctccacaagcggggaaaccacggaaattccggcgaggaaccacgaacgcggcggattccagcaccaagcaaaaccccaaccccaacccctacccccactaccaccaccaccaccaccaccaccccaaccacaaccaacaacaacaaaaaacagagcgatcaaccccgcgtcggcgacgaacagggggatttggggggagaaatggaggggaaatctcaccgggaagacgcgaggagggcgccgaatcgatcgggcgcgcgagccgcgggcgtctcgcgacgacgaggtcgaggaggagttggagaggagaaggggagggaccgagggagggagggagggagagctggtttggtggagagggtggcgttgggcggttacttggcgtggtgatgggctttggagttgggaggcgtagcgcgtaagcgggcgtgtcgtgtgaatgcatctttctgccttgatggggcgtgaatagccagggcccaggggaaaggaaatcaaggcccggcccagtaggcgtcaaccctccaatgtgctctctgaataaatctaccttctcctcttctttctatactttttgccaataaagtttgctcctgcttttattactactatactgctccttataattttataattatatgagagctgaggcaagcctcctgccctttcttgtttacaggagcaaatccatcaaccgttcaacatcgaccacacagatcaagatacagagctgttgagcactggaaaaaataatgcacaaggtattgttcttttcaatcaacgatggtgcatttttttgtaataactttctctatcaacattttttagaatattatttaaatcgactttttcaacttttaagttttaacggttaatttaaccgtccatgtcctcaattattatcaagaactcagtttcatccatcatccgacaccactttagcaagccatgatctttacccagagagtcaaaaggcagtaggttggcaatgcagtatctgaaattctgaatcatgttgcagcatataacagtggtatagattgtccatcacagaagaaaaaaatctggagtaaagctcatcgaatcaagtacgatctcacagagtgtgcgcacttagaagtacaatctcacagaaccgtaccaatgctgatatgatatacacaactttctcacttcattactcctgctttgtttttaagtttttctttttcgttcaaaaaaaccctaatatattcctcatggacaaaggaaaaaaaagaatgtgaatgactgtaaccagatcaaatgatcaagaacaccagctaatatccccaactaggtacgtacatgttggcaaagccctgcaaggactaaatatcattcagccacaacgacaaaactggacctgatcacgaacccacgtcagtatatacaatgattgggtcactgtccatccaaataaaccttgatactctcaaatatctgcttcatttgtgattgctcttcggattctttggtgtgtatagaattcaagacatgtcttacagtcttagcagcccattctctcatagaaaagaaggtaagcctcgcacttgagaacttcttctaaagagatttctttgatgtcgtcatcggttgcacaataccatgaggaagagccactgccctgctgctgattgtttgctctcacataagcaacgcactgcccaatatgaatgctgaggccacggttctcaatgacaccaactaaacgatagcgggaactgaatttgtcctcagaactgaagattagagaaagttaaaaaaatactatcaaaccagatacaaggaactaactcatcataggttgatgtcaacaacttgtctttgttgatcttatatcttaggaactgaatattgttaaaaagaaatctataccttatctaaaaaatacacctctattagatatgagtgaaagactggtatagatcatgttgaatgaataaccatgtaatgtgtttaaacatcgaccagctatttaaacagaacattggatatagattcacatatatccatggtagttaaaagcttcctttatctaaaaaaatatccatcatagcacttgcacttaaaaaccatgaaaatatatcaaacaagttggattcaaggtacgcatcacctaaaatagaaaagcagaaagcaatcatatactagttcagattatttctaatggtatgccacagtggtcaattataaactgctacaacgaattgagtttggcagccatgatgggtgatttcatataaacaaaccaagagttactctaaagatgtaacctgactctaaagggttagaaaaagcataacacacaaggcccgaggggatgcagtttcatctgtagcatctttagaatgcctattcactcactataaagccaagcaattcagtccacttgcatcaaaactaattacaaagctctctaaaacaaatggctccatgatgactggaaaatgagttctgttagtttctaattctgtaacctaaatcatgctagtctgcaagaaagaaacaaggccagtgctatcctaagtcgcaacctgtttctacacctaagaaaactagctcacagtgccaggaaaaatcattttaacatggctacaggaagcatgcttattttgccttaccggttcaattggaaaaacaataaataaaagtacatacagtatacagtgatccacaaactcttaaaaaggtcacagaaaaaaaaataaacagacaaaattactcagtacctggggtccatgaatggctccacatcaaggatctccttaaagctcacatgtccactcactttaagaggccccaaagatctgttgagttgaatgactaatacgggtggcagcttgctaataagacatgttagaatcgcaccttcattcctatcttgctgatcatattggttttcttccagttggtgtgcattatgacccagatttacttgattccccctttcctgatcttctatgctgatattttgacactggacactcaacaggttggcctgcttctcagtcagacggcagctagatgcatcttcttgagcacctccaaggcattcaggttttttattggctatgctgcaagaggacgagtctttttcaacagagctcatccctgaagtctctccacaagtttttatgtccactgcaggcatatcatgattttgtacaccagaaccatgtggctggctacttgaagaactgcattctacagaaagtctgatcaaatcgctagatagctccctttggcatgttttcctgtctgactgttcagcctggtctccataaaccgtcctattcacattggtacttgccatcatctgttcaccgtctttaccacttatagtgcttgccttctgggcaaccttggaacagttctcacaggtccactctatcatctctgattcaatatgcaacttcaagcactcctcaattgacacaagagagttgatatcctctgcctcatcataaataatatcaagacttcgagctttccccttgttttctgaattaatttctgctgaggaaatgaccatcttggcttctgtactaacttttagcccactgaacgcattatcaagaacagcagtgtcagttttctctacatcactgactgatgctatccatgtattctctttcattgttggggactgcaaaggacaatgtacagcgtccttgctttgcacgatctgttccaatttattagaatctgcaaaataaagcatataatttttagttatgtcctcatcagcaacttcacgaaaccagtactcatcattctctacatggtttcagaatatgtatccgctacatttgataattaggagcttcttttcttcaaggacctcagcatgtacttaagttaaccaacaatatggagaaaattttattagatgaggacaaggaggactcaacactctgagatatcttccagtggcaatagtaactgctacagagctttgccaagttaaatctgctgaactatcatgtttgtttaatacgtttgtgtagatatcctgaaggttttgttgtttctgcaattaatatatgaatcaaatccttagacattttctctatttagctagtacaagaccctgctctgatagttaccattttccaatgctgagcaaaacaataacagataatagtgctgctatcacagtttgattcattcacgaaaagttccattttctgatacaccatgcaagtttggagccctgcttaaatcactttcatttcctttagttaggcacacaagcacataaacttaccaacttccaaaggatctgatgttttcaccatgactgtatcttccaattctgaagcaggaatctgagaatcaccgccttcagaaagtacacaaatcttacattgagatataggtctttcattctgtggtggtgatgcaacactattggatggagcaccctttggtggcaatggcactgagagatcatagaatacatcacaggaataagacttaaacgagcaacgtttgcaagaggtggtaacagacagctcactaccaaatatggaatcaatgacggtaggagccacagaactaggagcaccctgttgcttgtttggaggccttattatcttatcctcctcattcaatctattgcgcaaacagcaaagtaattcatggctgtcatgaattgaagtgcctatcaaccatgagtcgaaccttcgtacacaagccaagagcaacgcccggttcagcgggcctggtgcatgcctcacgctgtttgcatcaacaaagagaccacgcagtattgtaccaaggatccccaatggagcattcggtccaaacatccttgcccgcagctttccaagaacaaggaggcaccgcaacaatgcattcaagcaagtgtttccttgattcgatatccctctgataacacagccatgcccgtcagaagacccagatgcatgagaacctgcctctgcgttgactgccaatccctccttgccctcctcaccacctatgaccaaggaatcttcacattcaaagcagtaaccaacatacagatcattgtgccacactgcaacccaatgctcctgaagcaatgcatgctcccggatgtgcccttgcggcttagccttggtggctggctcaatgcagaaataccctttgcattctgagcacaccatcatgtggtgctccccggtggttaggcacgtttcattatcacacattgggtcacccttttcagattcaacgaaatccttgatgataacaatgttctccgtgtcaaacgaatgatgatggcacacgacagcattcttggaggagctgacatctgactcgatcctatcaatttcttccttgccacatgagaagtctccacgctgcatgttgctgacatccaagtccagaagacgttcacagatgaagaagtacagagtttccggctcaccgagcaaagcaccaacacaatgctcctccagatcggcatgccaccgggcatgtccctgcggcttgttcatggtcccgtccccaatgcagaaatgcaagtcgcagtcgatgcaaaccaggatactgctcttttccaccttgttctcgcacaggtaatggtcacacctcggggcgcaatcgtaggagtaggacctgagctccgagatgaacttgagcacgccgtcctggaaagggtcgaagtgggggcataccctcccctcggtgttgctggtcgacgccgccgccgccttctgttccgggctgctcacctcatccggcggcgcagtgtcgccgcatccagattcgggcgccaccgcatactgcgggctcatcccctttcctgtctccatcgcgctcttctcctcttccatcacgcctggggcgcaagacctgaaacatgcgaatccataaatccccaaagaatcaaacaagatatacgaagaagaatacgaactgctactactgctgctgctgctgctgctaccagggatgaaccatccaaggagccttaagaagacagcggactatggcggtgaaattgaccgaaaggcgagggttccatgaattgtacggactatggcggtgaaccatgaaagctaaacgaagcggaaaaccaagagatctctactaataggacaaggcgaaaccgaccaaattccggcgaggaccacgaacagcggccgccgcggatacgggtaccgcaaaaccaccaaccgatcgagtgaatccataaattcccatcaaatcaaacaagctagacgaagaacagtacgaacaagggatgaaccgagaagggctaaacaaggcaagcaaatcatcaaacaggttggccgttaggcgcgacgaccaatccaacccaaccacaaaaccacgccacgaactctagttagccaggctcaacaagcggggccaggcaaacccagagagatcacaacattcccggcgacgaaccacgaacgcggcggcgccgccgcggattccggcaccaagcaaaaccccccacccccaccctcccacaccaccaccacccaccaccaaaccgagcgatcaaccccgcggcggcgaagaacagcgggatttggggaagaaatggaggggagaactcaccgggaaacgcgaggaggaccccgaatcgatcgccccgcgagccgcggcgtcccgcgacgccgaggccgagccgccgaggtgggtgggaggagagagagagagagagagagagaggttggggaagaagcgcgcgtgcgaagagagagaggcggagatggtgcgcgtgctttgctacttaacccggccctgtttggatgggccgtaatgggcccatgagggtggccgactggtaaatgggccgtaaataaacaagagtcctaccgggcagtggccgttcttctcagaaagctattttcgttcttgtgttcttcctagatcaacttgttctagtttttcgcttttttgatgatttttatttctttacccatcatatgtaggcaaacttgctcgctggaaattggcaggtcccggagaaaaatgttgccaacaaaaacacatgtggataattgcaagcaatttatacacttatcatcatccatgcagaacattgaaagcaagaggctcaaagaagtaggatctcattgcatgttataacacggtccatacaggaaagcaatggaagaaagaaagaaaaaagctctttagaattttttgacagaaaaaaagctctttagattgatacttcaaggtgtatatctcaatcatcttgccaccagaaaaatatacaggcaaagctgaaagtttcaaacattatgttcgaaaaatttccatggtactgtaaagcaatttcaaaatagtactccctccatcccaaaatgtttaacgccgttgacttttttaaaaatgtttgaccgttcgtcttattcaaaaaatttaagtaattattaattcttttcctatcatttgatttattgttaaatatacttttaattatacatatagttttatacatttcacaaaagtttttgaataagacgaacggtcaaacatgtttaaaaaagtcaacggcgtcaaacatttagaggagggagtaccatccaacagatgtacagtaactgaactgtaccaatgcctatacaatcacctcggtcaattctctaatggcacatgtcctactatgctgttttttttttctaaatgaattcctaattatccattcctcatggaccaaaaaaaatggatacgatcagttggtcaagaataaccgaaatttctcaattggtatgtacatgttgcggtcgaattgaagtcctgcactgactcagccaaaggccaaagcaacaaaattcaactagatcacgagcctacgttggtatctacatactacactgattaaattggatcgttggccgtctaaagaatgcttgacaatctgacatatctgcttcctttgtgattgctattcggattagctgaattccaggcatcttagccttccatccgctcatagaaaagaatgtaagcctcgcactttagtacttcttctaaagagacttctctgatgtcggtgtcacttgcccaaaaccatgaggaagagccattagtctgctgcggaggacttggtctcacataagcaacataatgccctgaatacatgctatggcccaggtgctcaacaacaccaactagacgatagctggaattatctttgtcctcagaactgaagattagaggaaacaaaaaaggaccaaagcagatgtaaggctgtaactcattatagctctatgtaaacaacatcatgaatttcttgatattatttaatacatatcttatgaacaggatattgttaacaagaaatatctatctcatctcacaaaaaatatatcagtttaagtaaaatactactccctcaattccaaattgatctacatatttcataggtacaccaagaccaagaaaagctaataactctctcatactatatttattctagcaacaaactctatgcatgcaccattcccaatatttcctagccaatagcaaatcaagatattacatgtgggttataaatacttgtgtgcatggatgcatgcatcaatgtctatttactccaatgcacaaataacgaatagacttaataaataaacacaaatatgtaaatcatttaggaataacctcaaaaaaaactatatgtagatcaatttggaatggagggagtagtataaatcatcctaagcgaataacaatgtaaagttttaaaaaataaaaaaaatcatctgaaaactatttatacatacccaacatgtactaaaaatattaaaaaaacacaaatatatcaaacaagtcatattttaagaaataaaaaaggttggcaggttaggcatttcaaggtacacatcacctacaaatagaaaagcaaaaagcaatcatacatactaactcggatatttttaacgggatgtcattttcataaaaaaaaagaaaataaaataaaaaggaggataaccacaagggttactctagagttactctatggatgtagcctgattctaaagggttagaaagagcataatatacacaaggcccatgttggaggggatgcagtttcatctgcggcagctttagaatgtctgttcacacactattacagttaacttgcctcaacagccaacacacattacggagctcctccaaaaaaatgtttcaatgataaggtttcttttgtttttgttcctttagcctgccagaaagaaactaaagcaatgctatcctaagtcgtaacctgtttctatactaaacaaaactagctcaccaagtcaccatgccaggtaaattcatttttacatatcgatggctgcatgcttgttttgcttttctggttcaattcgataaacaaaaacaaatgcgcacacagtatacggtagcccacatgctcataacaagagtgcaacaaaaaaggacagactaaattactcagtacctggggtgcaggaacagtcccacatcaaggatctccttgaagctcacgtgtcgcctcactttaataggccccgtatttctcttgagctggatgactaacacaggtggcagcttgctaataagagatgtcttaatcgcaccttcgttcctatcttgctgatcatattggttttcttccacttggtgtagatttacttgcttcctccttccctgatcttcagtgttggcattttggcactggccactcgacaggttgactggcttctcacctagatggcagtcaggtacatcttcttgggcacactcaagacattcaggtttttgattgactatgctgaaagaggatgagtctttttcaccgtgactcatccctgaaatgtctcctttggtcatagtgtcctctgttggcataacttgatgctgtgcatcagcaacatgtggctgcctacttgaagaactgcattccccatccaatctgaccaaatcgctagattgctcactttggcatgttttcctctctgactgttcagcctggtctccatcaactgtcctattcacattggtacatgccaccgtctgttcaccatctttaccacttatagggcttgccttctgagcgacattggaacagttctcacacctcttttctaccatctctttgaaatgcaatcccaataactcctcaattgacgcaagagagttgatatcatctgcctcatcataaactacatcacaatttcgatctttccccttgtcttctgtagtaacttctcctgacaaagtgtccatcttggcttctatactatcttctggcttgatgctatcaagaatagcactcttagttctctctaattcacggtctgatgttatcagcacattctccttccttattggactctgcaaaggacaatgtacatcatccttgctttgtgcgatctggtccaatgggttagaatctgcagaatcaagcatataagttttaggtattctcctcatcaataacttcatgaaaccagcaaccattgttctctacatggtttgagaatctttatcccctacatttgattatttgaaagactattttcttcaaggatctctgcatgtacttaagctaaccaacaattcggagtaaaattaattatatgacaaggattcaacaccctgagctattgatgaaacactgtagcaaactgtttgccatgctgaaactgctggaacatcctgtttgtataatgctgacattctgaaggttctggtatttctgcagtccatgcatgaatcataccttaagcaattttctctatttagctaccaaaagagtgctgctcctaaaatatcctttttctcatgttgagcaacaaaataacaaacaatagtggtagtatcacagtttgccgcaaccatcaacaaaatgttccgtcttccaattcacacgcacgttttcaggcctgttcaacatcattttcctttatttagttaggtacaggaacacataaacttaccaactaccaaaggctctgatgttttcaccatgaccatatctcccaattctgaagcgggaacctgaggatcactgcctccagaaattgcatgaatcttttcggtgttagtcttgtcaattgttggaaattgttcgatggcaatcttctgttgagatatgcatctttcattctgtagtggtaatgccacacagagatcatagaatgcatcctgtgaaccctgtgaaactgactcaaatgagcaatatttgcacagagtggtaacaaacagctgaccacgaaatatggaatcaataactgtaggaaccacagcactaggagcatcctgttgcatgttatcaggcctcgttttactttcctcctcaatcaaactatcacgcaaacagcaaagcaattcatggctgtcttgcatagtattgccttggaactctgatttatagtggcgcacacaacccaagagcatcactgggtccagcaggtctcgtgtatagctcacactttctgtagcaacaaagagatcatgcagtattataccaagcatccccgatggaggcggagcgtccggtccagacatccttgcccgcagctttccaagcacaaggaggcactgcaacaccgcattcaagtagcaagtgtttccaaaattcggtatccctctgatggcacagccatgcccactaccagacccagatgcgccgatgacacagccatgcccactatcagacccagatgcgcgacagccttcctcgcctttgaccttcattcccttatcaccctcctcaccaccaatggtcaagggatcctcacactcaaagcagtaaccagtatacggatcttcgtaccacagcgcaaccggatgcccatcgtcgaacgcatgctcctcgatgtgtcctcgcggcttagacttcttggcaaaccttccaatgcagaaatgcatatcgcattccacgcacaccatcatgaggtgcctctcggtgcacatacaggtttcatcctggcacaccgggtcgccccaggacgcaatcttggacacgatttccgcaacgtcatgctcgctgcaggtcatgtgctcgcaccgctcgccgccgccgccggcgccgcctctggttgccaccgccgcggcctccctgtacacctccagcgaggcatcgccgccccatccagaatcatccgcatccagcggctcgatccgcggggctttccctttccgcgggctcctgacgatagccctatccctttccgccgcccttgccctcttctcctcttccatcgcgcctggaaccgaaacaaccacaagaaatcagcacgaatccgtcaataaaatcccccccaaatgctgtgcgcggggattacggaacaagcgaagaaccaccagaaaataaaaaaaaattgcaagaatccggtaataaaccctagcccaccgcgcggattagggatgagagacaagaacgagaaatcgggcatttccggcgaggagcgaccaaaccaaaaccgaagcgatcagcgggtgggggattgctgggagaaaacgcgcgaggggggactcaccggaatacgcggggatggctccgaatcggcgagggcgcgatcggcgacgagtcatcgacgctgcggcgcccgcgacgacaacgccgacgagatcacgagaggtttttggaggaagaagaagaagcggcttcgctggccggagcgagttgaggtgaaggagagaggaggcggttgctactttgcctgggcttatacggatgggccaaacgtgggtgggctggtatgggctcataagcatggatgatgggccaagagttgggccgtgcatgaactggaggcctagcggccgtgcttttccaatacttttcgtttggaataaggcccacttatgtccctcgtctttacatcgagtttaattgatgtcgctaaaccacaataccggaaatcgattgatcatttcaaaacagtgagtcaggtcctaaaatagtatcgatgtctattttagctaacatagcatcctagtcaataaaataaaaagattcacaagtaagtgggcttccacggttctacctctccccatctctcccctttctttcccatctctccgtactctatatgtgtctggtcgaagaacgagacatgtggggacacggcgagagcttcgcgacgtgcgtcggtacggcgagctcgagggagaggtcggcagccggaacccaccgccgccatcaccgtcaattaaatacgaataataagaaaaataaaacaaatgcataatcagtctttctcctagcttttcatacgaaattaaataataaacaatactcaaaagatttctctacgactagattatattatttgttcattaaagttaatcgacactatatgatcatactattactagtcgttaaatttagaaaaccattaaatagtctttactcttttttttgttagaactagtagtaataatagtcttcattcattcactatttaggaagcactaaatagcaaatactccatcctttccaaattgatcatcatatatatttatgcaccaagaccaaggataatttaaatcacatcaatcaagacatcatgcacacattctctcacaatgcatgcatcgattaaaacaacatgccaattacatcttagcatgcacacattctcccatgctgtattaattatattatgataaaatacgtgtccatgcggttatatgatgatcaatttgagaaattttgaattttattatatgatgatcaatttgggaagtagggagtaaaacccacgcgttggcacgtccattagttttgaataaatacggccattaaataggcccaatcttaatccggcaccgtagaaaagccagggccggccctgagattttggtggcccagggcgaaactataaacggggcccttaatatcacatacaaaaaataaataatatagatatacatatatgaatatattgcttgtaaatatttaaagttcatccaaaagcaatatttatatgaagaacctcacaaatatttcattgcaaatttcttgagatatttttagacgcgaattcattggtgatagtaatctcatctagcaattcgcttttcataaaaacatctaacgattccttctcatttaatcatttattttcgaggcgacataatgtgaagaatggactaagaattgtaaaaataatgtattagtgttcgaactcatatagattatacaacttaaattattagcaccgattaatccaaacaaatattttcttttctcaagcaccaagaggattgcacgttaatgttaatatattactagaagaaagcaatcaacaacactaaaattgccaatcagctagctagaagcccttgcagagaagagataagaaatcgggatcagctggaatcaggaataatatagttatctacacgtgctgttgcctttggcttttgcgtacagcgtagcgctaatctctagtctaattgcatgatcgcatccctaatcacagaggggtaggtggagggccccaccattttggggggccagtgcgcggctgccccgctgaaaagcgatacgtatatatatctcacactcgccgccactgatcaaaaccctaattaaacccgtcgttaattagcattctttcgctaagccggcaaactcaaactcttaaaccctaaaccccccgccgcgagcagctcagcatcttgccgcgtcggagatttgagcggcggccggtcatcatccaagctccgcccccgtctccaaatcctggtatgtatatatccatctttctcgcccctttagatcggcctctgttatgatggtctccaattctttctaaaccctagctgatgccgattctctctttctttcctctctctccctctcttttctctcgatgtgatttcgaatcctagatcctatatatatatatatatatagagagagagagagagagaaagaggtaaattaactggtgctacatgaatatgcatgctccaagattcaaattgagtatatacccaattttaatgggtatgaaattttttaaaatatttagatataaacattaacttctttactaacaagttcaagtttgaactttctttttgttagattttggttctaagtatataatatccaaacatataattagttaggtatgtaataatgaattgtgaaataaagttgagtttgagttgttttgttgttaggtatttgtatgaatcaaattcatatacctaggtatatactcacaatttgaacatttttaaaaatttgagagaatttgtgtgttttataccttggagcctaggcaccatggagtcccatatgggtatcctatatatatatatgtgtgtgtgtgtttatatatatgtttatatgtagatttggatccgagaaaactaatgccccatttatttcggtttaagattataataatatagattattgagacatattactgtaagctggattataataagtcgacattgaataagatgttcgctgcttgtttctctgatagatagctcttagccacctaataatctaaaaaatatttttagagtggattaattaccagattatagtaatttggcttatagattgtaatgatctattataataaactatctgtttgtttcagcttacttctaataatctacattataataattctaagctttcagtgcctaaatggaaaggtatagatttgtgcgatccgagaatgagggcaagcctgttggccttgcttgccacgaggcgtattcttgttcgattgctctgtataacttcgctctactgacgtggattcccttaccactgataacaccccgatttgtgactgagcaagaggtgaaatattccatcatcgcattcgtagaacataagatcaaagatcttgaaaaaggttggagctcaaatttcgattatctgtatgaggccgagaaagaatgcaaatgtcttgtgcatgctcttccaggtggacttcagatctgtccagctcttgacaggtgcagatatatatgcagtttctgtagattttgtcgtctttgtatttccttttaattgtcttgattcaagttgtgctatttttttctttctttttttagcatcacatcgttcaagacaaatggtggacacaacttatttagtttgctggagatccgaatggtgcacggttggttagctaatcccgaggataacatctatgagacggtcaggtccttctcttgcgatgatctggagtcacacatttctgatgctctgaatgataattctgaagctgcacagaggaatagggatgcaagcaaaagtaagattgtatcatcaaacatgttactcaataaatcccacgatttgatttttttttgttctactaatttttgtgtttattcttattgcaagatttattgggtgcaaagaatcagattacaagttatgggtatatatgttggtctcactagggactactatacacttttatttgatgaacactgcaattcactcatttaatacattatcatctggactacacagatatcagtctttgtgccaaggattactgaaggatgaatatgctatcctttatcgggggagtgacaccttcaatcttattcgcgaggtattaaccctatagatagctataacgtcggtcatcttattatttgaaaatatgatgacgttttgttttaataagctgtccctctaaattgttgatgatattaccgcagaaagatggatccattttgatcctggaaacagacaaatatattagatgcttacccccaagcaaggtggaggattctggaagagataaggatatcctacaacttccttaactctaatgatacaaaactctccaatctactaattttcctatgtaacaggcggatgaggaaccaatttacttgaattgcaaatacattccacttaagaatcaaccccacatcgctaaagtaagttgtagacttgagaatgtactcccaactcaccaatttcatgctaactctcttgcacttaaaaaaattataaataacaagtcatttgatacttattgtctgacaggcaaaactatggtactatgagaagttgaattcaagaaatgaatatgctccaagaaatgtaacaaaggatgaagcttctattcagaagccaacaggaagtgagggaaaactctcaaatcaggaagcaatattgcaaacgaaacaggcttctgatgagacactgcactatagagttgttcagttcaagcatgagaacttgcttactagcattatttgccacaagggatattcactttggactgctctctataaccatttagttttgaatagagctctcgcagtgaaaccatcggaagtaaaactccaatttctgcctgagagagaggtgaaagacgcgatcattgcacatctcaaacttgtacttggtgagatagaaaaaagcgagaaatcaaaacatgaaaagctgtataactgtgagtttatctggaaatgtttcatacgttctacagcagatactcatcagatctatcctgttcttgacaggtgcaaatagttactgtagattgcttgtcattacttctgtatctttgtatttctttttaattgttttgattcatgccgtgctatatttcattgcagcttcacatcattcaaggattcttttggacgtagcttaatttgtgtgctggggatcgaattggtgcatggttgggtagctaatcccgaggataacatctatgagacggtcaagtccttctcttctgatgacctggaatcacacatttcatcccttgatgctcggagtgataattctgaagctgcacagagggatagggatgcaagcaaaagtaagattgtaatatcatcaaacattttactcaataaatcccatgatttgattttttttttattttactatttgttatgtttgatttcttattgcaagatttgttggctgcaaggaatcagtttacaagttatgggtatgttggacactagggactatacttttattttatttgatgaacactgcaattcactcatttaatacattatcatctcaactacacagatatcagtctttatgccaaggattagggaaggatgaatatgctattctttaccggggcgatgacatattcaatcttattcgcgaggtattaaccctatagctataatgccggccatctttttatttgaaaatattttgtttcaatattttatttaatacgctgccccctttaaattgttgatgacactaccgcagaaagatggatccattttgatcctggaaacagacacagatatattagatgcttaccccaaagcaaggtggaggattctggaagaggttaggataccctacgatttccttaactctaatgatataaaactctccaatcaacttattttcctatgtaacaggtggacgaggaaccaatttacttgaattgcaattacattccacttaagaatcaaccccacatcgctaaagtaagttgtagacttgagaatgtactcttaactcaccaatttcatgccaggctctcttacacttgcaaaatttataaagaacaagtcatttgatacttgtctgacaggtaaaacgatggtacttggagatgaagtcaaagaagaaaattaatgaggcttcaagcaacgaaggtgctggtcagaagcagtgttatcgagacacgcgtgtcagtgtgtcgactcgtgtcaggcgtggcaagacacagctgtagtgacaatgctgaacttggagagactagagagaagagagggatgagatagaaaatgcatgcagctaacatggtagcacccctcgagatgaaagagagtggcaatgcacttttttttttttttgatagatccactctcttgtctcctccagttttctttattgtcctttttatcttgtactactattctttactatggtagataaaaggacacatgcaaccgtcatcgtgtacagctgcaaacaaaaatatatgatcttttatgcaaattaatgccccattcacttattaagagaccccaaatttctcttgagatggagggctaacacaggtggcaacttgctaaaaagacatgttttaattgcaccttgacacaagaaaaatagaggcaaagtgaagcggataatatactattcgaactttccacagcactgtaaagcaattgcagataacagatcatccgacaaaactatatcgatggctaaacaatcaccagctcaagtctctagtttgtttttttcaacgaatgcaaaattctcaaggtgtatctcaatcatcttgcatacaatgtctctttgccataaaaaaatattgaggcaaaactcaacatggcgaatgatattttccacagtactttagtgtaaactaattacaggtaacagtaacaatcgacaaaactgtaccggtgcttctacttcaaaaagaagaaaaaaaacctgtgcatgtgcctacataatgattttgcttacttcaaaaagaagaagaaaacctgtccatgtgcctacataatgattttgctcaaattctctaatgcaaaatgtccaactatgccgtttgttttcaaataaattattaatacactcatggacaaaaaagggatatcagctggtcaagaacaaccgaattctctcaactggtatgtacatgttgcggtcaaattggagtcctgcaatgactaagccaacgcaacaagattcaacttgatcacgaacctacgtcagtatatgtacactgattaaaattgaatcattggtcgtccaaagaatgcttgttaatctgataacatatgcttcctttgtgattgctactctgtaggatccagacatcttagccttcaatcctctcatagaaaagaaggtaagcttcgcacttgagaacttcttctaaagagacttctctgatgtcggcatcacttgcacaaaaccataaggaagagccattggtctgctgcgggcaacttggtctcacataagcaacaaaatgccctgcatccatgcaaaggcccaggtgctcaacaacaccaactagacggtagctggaattatctttgtcttcagaactgaagattagagaaaacaaaaacgatcaaaacagatataagactgtacttcattatggctcaatgtaaacaacagcatgtcttattttatcttatatagttactccctccatctcaaaatagaagggcttttgcccggatgtgacacatcctactaatgtgtaacatccaaacaaaaacccttatatttggggacggagggagtatatcttatgaacagaatattattaacaagaaatcagtatctcatctcatgaaaaaaaatctgtcagatctaagtaaaagactggtataaatcatcctaagagaataaacatgtaaagtataaacaagtaaatcccctacaaactatttcaacatatcactttatatatatccatcatatattaaaatattaaaaaatacataagtatatcaaacaaatcaaattctaagaaataaaaaaggttcaacaggttaggcatttcatggtacacatcacctacaaataaaaaatcaaaaagcaattatatataccatttcagattttctttaatgggatgtcattttccaaaaaatatccagtggtcaatgatgaactactacagtgattgagtttgtccttcaagatgggtgatatcatattaacgaccatagagttactctactgggtgtaacctgactctatagggttagaaaaagcaataatatacacaagtcccatgttggaggggacgcagttccatagccttagaatgcctattcactttacagtccacttgcctcaacgcaaactacggagctcttccaaacgaatgttgcaatgataactacaagatcggttttgtttgcgtctatttctttgtcttaaatcatgttagcctgccagaaataggacagagcagtgctatcctaagtcgtaacctatttctgtgccaaagaaaactagctgaccatgcaagcgaaattcatttttagtttttaccacagctacggaaacatgcatattttgctttttctggttttcaattggacaaacagaaacaaatgtgtgcaaggtatacggttatcaacatgctcataacaacagcacacaaaaaaatggacagactaaattactcagtacctggggtgcatgaacaatttcacatcaagggtctccttaaagctcacatgtccactcactttaagtttaagaggccataaatttctcttgagatggagggctaacacaggtggcaacttgctaaaaagacatgttttaattgcacctttgttcctatctggccgatcatattggttttcttccacttgatgtgcactatgacccatatttacttgcttcccccttccctgatcttgttcatcctggtctccatcaactgtcccattcacattggtacatgccactggctgttcaccatgtttaccacttatagggcttgccttctgatcagcattggaacagttttcacacctcttttctatcatctctgcttttaaatgcaattccaatatttcctcgattgaagcaagagagttgatatcatctgccttatcataaactgcatcacgatttcgatctttccccttgtcttctgtagcaacttctgctgacaaagtgtccatcttggcttctatactatcttctggcttgatgctatcaagaacagcactgacagttctctctacaccatggcctgatgctatcaacgtgttctcttcccttgttggagcctgcaaaggaccatgtacatcacccttgctttgcgaaatctgttccaagtgattagaatctgcagaatcaagcatataagttttaggttttgtcgtcataagtaacttcatgaaaccaggaaccgttgtacattgtttgagaatcttgaacctctacatttgattgtttgaagcttattttcttcatggaccatgtacttaagttaaccaacaaagctgagtaacatttattatacgagcacaaggactcagcaaaaactgctggaacatcccgtttgtataatgctgtcatcctgaaggttctgacatttgtgcagtccatgtatgaaccataccaaagaaatattctctatttagctactagaagggctcttctctgaaaaatgtccttgtcatgtcaagcaacaaaataacaaacaatagttgtactatcatggtctgctccattcaatcattcattaatgaaaaattcatcttctgtttcaccttgcgtgcttgaaggcccgttcaacgttgttttccattatttagttaggcacaggaacacataaacttaccaacttccaaaggctctgatgttttcaccataaccatatgttccgattctgaagcgggaacctgagcatcaccgccttcagaaattgcatgaatcttttcggtgttagtcttgttgattgctggaaacagttccatatgagtcttctgttgagatatgcatcttccattccgtggtggtgatgcaacacttctggctggagtcccctttggtggtaatggcattgagagatcatggaatacctcctctgaatctgacttaaacgagcaacatttgcaagacaaggtaacagacagctgaccagcaaatatggaatcaataaccgtaggagccacagcactaggagcaccttgttgcatcttaccagccctccatttcctttcatcctcatccaaaccatcgcgcaaacagcaaagcaattcatgacagtcctgcatagcaatgcctcggaactgcgggtaacgaaagcgcacacaacgcaagagcatcgccgggtccagcaggcgtcgagcgtagctcggaccatttgtaccaacaaagagatcatgcagcaagtcaccaaggacacccgacggagcgcccggccccaagatcctcgcccgcagcttcccgagcacaaggaggcactgcagcagcgcgttcaggtagcaggtgttcccaagattcggcatccctgtgacaacacatccatacccttcctcgccgcctccggcgccatcatcggccaccatctggctctcaattgccaatgaatcctcacactcgaagcagtaaccctcacacggatcctcgcagcgcagcgcgacccaatgcgccctccggtaggcatgctccctgatgtgccccagcggcttggccctgtgggctagccctccgacgcagaagcaccagccgcattcggggcacaccatcatgaggttgctcccggtggccaggcacgtctcgtgctcgcacatcgggtcgccgcgggcggccatgcccatctcgatgtcagcgatctcgtccatgtcgcagctgaagtggccgcagtcctcgccgtcggtgtccctgatggccaccgcctcgcaatcccccggatccttcaagggattccgtgacggaacgcagccgccgcgtgaaggaccggcctccgccgccgccgccgccgccatcgcgcgtggcggtgtcggcggcggctccaggcatggggccttccccttccgccgtctctcggcagcatcccgatctccatccccatccctcgcccttgccttcttcttctccgaatacatcgccgtctggactctggaacaggaagaaaaaatcgcaagaatccgataataaacattccggatgaacatgaaccaagaaaggcgaaagaaagatgagaacaagagaggaaatcgagacaatccgggtgaggaccaaccaatggatcaagcgcgcatcgggcaacgccgcaacgtgcagcgggatttggtttgggggagaaatgcgcgacgagggctcggaatcgacgagaacgatgccgagaggttttggaggagggagggaggcggtggcgttccggctcgtgttgggtttggaggacactggagtcgggcagagttggggttggaaagagagattgagatttgagaaaatcccagaaagagagactgagagttgaggttggtaattaataagcatccaatttcaaaaatattagtattgagttgcatgcaagtgtggaatagaaatgggcagcaacttttatttaattgcgcgacagccagatttgaactcgagacatctggctctaataccatattgagttgtatgcaccgaccagttcaacccaaaaatttaagctgatgagaaaaggcgggcaattcactttatattccaacaaatatcatggataaatacaagtttgatgtaatatcaatatacaagagattttgtctctaaaatatcatcgttgttagggttccgttagcatccttccattaagtgctatagaataaacaatgcatttaacggcgtaggatggacgaaaccttaacggcaatggcatttctgatactaaatcatttgtacgaatattttgtggaaactcggactcgtcaatagcatgttttagatttgggtgtttgtcaatggtatttcttggattttctcttgagataataggtgggtccatggttcatcgggttcacaatgacaaacacacgtttctttgaaggtagaggtgcctaatcccgaaagaaagagggagtggattttaaactctcgagaaggcatatctctattgtttgcatgctatctaaataattataaaaaattaagaagtatatgtgatatatcactgttaaaatttaacttctacaaattaaaaaaaacaaattaaattataaattgttaatgtatattaacagtaaaaatagtttttttggcaatatgtaaaagttaaattaagaatgttcgtattaatttatcttgttaaaaaaattaaaaaaaatttaaatagtttcctgttagagaggtggtcatgtgcgtggatcgcatggttgctacctaaccctgctttgttttggatgaacgccaatataatggaaggagtacatggaggggtggaattgaggaatagcggcagttcttttgtgttttgttttgtttttttgtttgttttttttttgaaaagttcactcaactgcaaaatcgaatatagagtacaactaaggtataaaactagtgcaaattaagttccccttggtcgctggttttggttaaactacttacgtggtgcattgatctggtctatcgtcctacgtggcgtagaaagaaactagtactatttatgttttaaaataattataattttatattgttttagcatatatcttgaagaagcaattgcttcttgatacaactggagtactagcaagtttttacccaaatgactgctttgcttttgagcatgccagtatggaatggaattactatgaattagagggtgaattatttacatgatgcataatcaattaatcagtctgcaatctggattgtctgtccgtacatgcatcgatccgtcgtactagtatcatgcatgatgagtattaatactactggtgtttgatggtacaagcagcgtcttgttcctgtaggcgtacgagcgggcgaagcagaggaacatcgcgagtgcgacggcgctgacgccggcgagcagccagtagaagtagtcgaggtggccgcggtcgaggtcgtcggcgaaccacccctcgccgccgtccctcctggtgacgccatccagcgccgcgatgagcgcggcgctgacgaagccgccgatgcccacggcgccgcagtagagcgccagcccgacgctgcgccgcccctccggcatctcgccgtggaagaactcctgcatccccaccgccgccagcacgtcggccacccccatcgacgcgtactgcggcaccagccacgcccagctcatcgccggccgccgccccgcccgcgccgcccccagccggcgcccctccaccgccgccagcgacgtcgccagccccgcccccgtccgctgcagcgtcgtcagcccgctcgggttgcccgtcgcgcgccgcagcgccggcaccaccgcgcggtcgtagatgggcacgaacagcacgatggtcgccggcccgatcgtctggagcgcggcgggcggcagctccacgccgccgatgcggcggtccagcatccgcccctgcttgttgaacagcgtcatgatctgcgcgtccgccacgccgtacgccacgcacgccgcccatatcggaagcaggcgccgcagcgcgccacgcgcatcctcctccgacgacgacgatcgcttgccatccatggcggtgtcgggacggggcggcgcgtagaggcggtaggtgggggtgccgaggaggaagacggcggaggcgcaggacacgacggcgaaggggacgccccagccgacgttctcctggacgtagctgacggcggcgatggcgacggcgacgccgacggccatggagaagaaccaccagttgaagagggagctgcgggcggcgctctccctggggtggcccgggtcgaattgctcggcgccgaacgccaacccgcatggcttgtcgaatccctgagcgaaggcgacgaggtagagcgaaacgtagacgaagatcacctgtgccatggaaggacggcaggcggcggcggcggcggcggtggcggcgcacgccggcagcgaggacgccacagtcagcatgccaagcccctgcaatcatgcgcccatgcgcgtgaaatccaatcaattttgtatttatccgttctaaaatatttgtagtaataagtttttacctttaaaatttatcataaaatataactcctttgtacgtagttatatatatatatatatatatatatatatatatatatatcattttttcaaccaataataatcttccgccgttcaagtttccctacctaataactcctcttctcaaaacctttgtccatttaattctacttaagatatagatttttcttagcattttttaaattgttaaaatggtgtattctttgtaaaaaaaatttatataaagttgcttgaaatatcaaattaatttatttttaaaatttgtatttgaatttttcggagaagggtactgatcactctcgaacggacgtacgcacgttcatttcaattaaatcacatttgttgtttattttaagaatgcacgcatattagtgagtaagattaatactctaccagtgggagtaacatttttaagataggattaagataaggtggagcagggagatggtgacagtgtttgatttgatcgctcagttgcgaaagggtcagatatataagtacttagtccatgtttgtttcagcttaaaattattataatctagattatagaactagattattataagctggattataataagccgatatagaataagctgctagttgtttgtttctctggattattatctgtttgttagttgttagtcatccaataatctaaaataagcatctttagagtggcttaccaaattatagtaatctggcttatatattataataatctattataataagctatctgtttgttttagcttactcataataatctagattataataattataagctgaatcaaacagggcttaattaattggatggaccaaatgtgtgagcagagagttttcttcttttgacagtgcttgtactaattaatacgcgtcatccacgtctttgttgcttgcagatgcagatcgatatgcacatttctatcttttccattatatttttgtcctgatgatgattactagtactgtactatcaattactaattgtgttcgtacgttaatgggcaatataacaagtggtcagaggagtattagtagaagtaacacgaatttcatggcagacatgctggcatatacggggtgctactccattattattcatcgaggagtggtaagtactaaattaacattgacaaaattgaataaaccaccaaattatcacttctgttttgaatttaccctcaaaagctgatttgttacaaaggccaatcacccaaacccttttttgataaatacttatcattatggagccaatcagccaacgtgtacccatagtactacctttatcctaaattacttctctttagaatagtactacctttatcctaaattacttctttttagaatttaaattttgttccaaaatacttatcattacggagtgttagttgtcttattcaaaaccttttcaattttatccttaataataatttcacttcttataatgcattattcaataagaaggaaagagcatgaccgtagttgattgtcactactcatcggctcatcgccgttgccttcaaccctcaagttattcaagttcatctttctgctttaaactacaccctccgtctaaaaaaattaaatattcagaatcatagctagaatttatattttttttaagacagagagtacaacaggtatcgagctggctgatctagcctttgtttatttgcgtgcacggatggatttggtgggtcagcctttgcagcaaattgactttgggtgggagttggaaaaaacaagagtgaccagttttatttacaatcttaacaataaataataacaaatggatggaggaatatatagtaaataataaataaaatattaccatgacgtagagggtgcaggcgaggaggatgaatgggtagcggccgagaaggagtcggcgaggacggcgccgaggagagggagcatgcgcgccgtccccgaccacgcgttcgccgccgacgcgttcgattgccccagcggccccgtcaggtagctgatcaggttcgccgacacgccgtagtaggagaagctgcagcccatctccaacactgcaacaattcattaatcaattaatctctcatgaaatctaatcaaactttgcaaattaaggaacaaaattaaccaaaccgaacaaacatcggtatacgcagtacacgctcactggcgacgaacagtgcggagcgccagccgcctgaggtggcgcggtagaccggccgccctcggaagtcggacacgccggcgagcggcggctccggcggctgcggcggcggctcgtcaccctcattcggaataagcaagggacggcgactgtccatcggatcggatcactcgttggtcgctttgggtgtgctagtgctagtaggatttataggagagcactgagcactctctccaattgagaagaatcagaaaatgctgctgctgttattgccctcgtctcctcctgctgctgctgttcttgttcatgtcgagtgaggcagagaggccactaactatggcacaattatccccgaaaaaaaaacaaaaaacaaaaaacaaaaacaaactattgcatgatttgcaaaagatagcgaaatccaaaccgtccatctccttaacccgtgatatatatgggcatgttcactttgctgccaaaaaaaaaccttatcaaattttggcattttggcatggtaacttgccaaaattttggcaagatttcttatatagttaccaaaatttagcagcaaactaaatgtagccacttttttggcaactttactaaaatttagtaaggttgaaaatgacaccaaagtgaacaggccctatatttcgaagatatttaagagcaccacgaacgaatcgacgacaaaggagtgaaggactgagtagtgagtacctaggatgtcctactggactatagcaaattaaaggagacgacaagtagcattaactgggccttctccccaccgataattcaaccacagcaaattaaagctgatgcaggggtgttaggttcatggccacattttgccacactacattttttattgccacagtttattagatatgtgtttagttcactgtcacagttgtgactcgccacactttttcaacagcatgtcctatatgtcatagacttaattttcttaccaattttaccacactctgtggctagcaatttattcaccacacttttgtgactaccataacttgcctaacgttagttgtggactatagcaaattaaaggagacgacaagtagcattaactgggccttctccccaccgataattcaaccacagaaccaacatctttaacttttaaagctgatgcaggggtgttaggttcattgccacattttgccaaactacattttttattgacacagtttgttagatatgtgtttagttaactgtcacagttgtgactcgccacactttttcaacagcatgtcctatatgtcatagacttaattttcttaccaattttaccacactctgtggctagcaatttattcaccacacttttgtgactaccataacttgcctaacgttagttgtggactatagcaaattaaatgagacgacaagtagcattaactgggccttctccccaccgataattcaaccacagaaccagcatctttaacttttaaagttgatgcaggggtgttaggttcatggccacattttgccacactacattttttattgccacagtttgttagatatgtgtttagttcactgtcacagttgtgactcgccacactttttcaacagcatgtcatatatgtcatagacttaattttcttaccaattttaccatactctgtggctagcaatttattcaccacacttttgtgactaccataacttgcctacaaccaaacacacccttaaaatccatagatagtttcggatggtgctttttgatgattaacgtgacacccacatggtgtattgaaccggttgtcatctcctacgtgacgtctattggatgaatacaattagaaagaaaatagtgggaccaatatgtcattaacatctcttcctcctcctctacccttggtggacgcagatgaatagcgattggcttaagcagccacgttagctcgagctccttgtctccccttcccctagcatcatgatccgtttcctctactctatctctagcatcccaggcagaattaaatcgggccacatcgtgattttgcaacttgacttacactggtttagacttatactagttttaacagtttaacgacaattgatatctgattttgcgattgagaaatatgaatggaacatataaaatggacccccttttttttttgttctttcctctacccatatggggcctgttagggagaaaatattttttgctaacacagcacatgtctctcatcatcaatggagaat

SEQ ID NO: 4403 - DNA, 7787 bp, Oryza sativa
caccaatttctttaaacaattttacaagtgccacatattctcatacaaatattgctagacctatttttaatggacatattgcatttgctagtgattattcaaataattattcgagatctttgaattacgaaaataatatgtcactgcctatgcaaagtaattcacatactttaaaattcagtaatgctagtaatatacaatatatacacacaccttttaattcatcggcgattatttcacaacctactgttacacaacaaattttgccgatgaaagatatgtatggccatgacaatattaattatccagttgattcttttaattcattgcatggcatgccaagtatcggtcagtcacatctcagtcttatgggtcaccttatatagtatctagtggaaataattcggcttcatatgctagtagcgattatagccgaattaatagtagttccactagtgattttgtacccccacatagtttgccatcttcaaaatgtcaatcaaatagtactatgtatatggtcaaacacgcagagttcaaattgtgtaaattcggttgggggcaaactgaaatacctatgtcaaaaattgccaacattgatcaagagcacaatttcgatctcgacaataacactgtcacactagacgatttatctgagggccaacggtgtgagttagagcaggaagtcgaggtagaaattgcagagctaagggaacataaactcatacgcttgcagaaaacaaagaatagtgttattgcgaaacagcaaaagccgataaatttagaattatcggctaatgaaaaggaggtagctatgcttgatttatctggaaacataggaccttttgttttgccagctgaatttcgtgccaaggaagtggatgaacatctagacgatggatcacgaaatcgcgacgacaaggcggaaatattggagagccatcaatgaacgaacttagacatcattcaagtgaaaaaatcagaatgcttctccaacacattagataaggtaacgtttacaggtaatttgcttatttctcaatttgatcatgcttctgaaaataatccatacattaataatgtcaccatgaataattctaacagatcgattggggagattaatattcttgttggcaataataaagtgtttaaattttctatttcatcattgacaaagtttatgtctacatggtttgcttatgatcaatctagagctagaagcacaaaattaaaattggtgctgatatagcagatagttctaaatcattggacaagggaaatataagcgacaatgtagccgaatgggtagatagtaaatctgaaccatttgtttgcttagctttaaaaccgtctccacaaaagtgtcggttaaaggaaaagaagtatacttttgattggagtatgtgtgatcatatttttgatgatttgctaaagaatgattatattaaattgccggatcatcatgtcatgccatcgcttcaagatttagaagaacaaatttattgtaagtggcataattcatttgatcattgcactagtgattgtaatatttttcgtcagaaaatacaatcagctattaatgaaggtcgattgcatgttgcaactccagaaaagtcacatgccatggataaccgatttgataagagaaatcggtctaggtggtctagtagaaagaagtcttcggtacaggtgggaggtagttcaacaaggaagcaaatctaggtgccgaagtctagagttcaagaaaagagcttagctgctggtgcatgtgtgagtgtacaaaaggctttagtttagaaaaaaggttattgaacctggggggcatgcacgtgtacaacagctagaaaatgtacatcatgtgagtatgaagtgagagacatcttcggcagagttagtaacaaatcaggatccgccgaagagctcggggggcaatggcagccaattgagacattcacacagcttgtcgaattggcagaagaagcagctccacaagctaagtgtagaaaagctgagggagaaaggtatgtcatggcttcctaaaggaagtgttcaggtgcagaataaaacagatgttaaagttaaagtggaggcaaagaatgagaaggtagataggaggtgtgtgccaaatcaacggtttgcatcagatcatcaggttcttttgccaccatattatatatattcttcacctatgcaaccgatgcatatgtcttggaatcaattctcaggtatgtaaggttatccttcatggtcttattatgattcttggatatcatatgagtctatattatggagggatgttaccatatagttttgtatatttactaataattgtagatgttgttatcaatttttagagaccgaaatatttgggagctagaaataactgtgatttttttattttttttataatttatttcggtcatattttgtgcaagtcggcaagatgttggtactgttttagttttgccaaatagtatttgcttatgagacatcggtttatttggaatacccttacactttagaccgaatacaaggctttgttattcggtttggaaatttagttaatattggtgtgaggatgtagatgctttgggtgatttgctgctagtagtccaccaatttagttggggagtttaggattcactggtgaagaaaccatctttggtcggtcagccaaaaaccacaatagtcccggttgcaataaaaaccgggttatagctacttttttatcttttgttccggttggtgttctcaaccgggactaaagatcaatttttagtcccggttgataataccaaccgagactagagatacctattatctttagtcccggttggtggatctatttgtagtcccgattggtagcctaaactggaacaaaatatcaccatgcgcgcatgcgtggcggagaggacgaggcatgcgcgagatggaggagttaataaattctattccttatctcttccctaaccttatctcttgctcctcccatctcttcctcttcctcctcctcctctccccattctattcctcccctctcttctctttcgtcagcggccaagcggcggcggcggccggatagaggcgcaggcggtctcgcgccatggcggccagccgggcggcagcggcggggccctcgcgcggcagggcggaggtggcctcgcgccgcgtgtcacgcccggaatttctatccaaaattccaaacgcttacatgtgtgtgaaccctcgtccaggaatcagccgaggcacacaataacaaattgataatagagtacaaatattactctaattaataagcgaataaaatgtcattacagaggtagatacttcctctcaatcaataaagatctaagcagcggaaagaaagataaacggcgcagacggctccactccacaggcagcttgaccaaggctacacctaatcctccacaccatcagcctcattgaagaactcttcctctgatgaatgattgcaaggtgagtatatgacatactcagcaagccacgcagcaaatatgcaagtgcacaggataacaaaggatggcatagtagggtttcatttgcaaaagcagcatttaacaaacttttgagaatttaataaaacagttaagtaataattaaacaatattaaatcaacgctatacaacataccctgttgcataggcccaaccattctgaacaaccaccccggctgcacagttctatctccaaaccaggaatataccattccaaaccaggagctaatcaaattattaccagttatagcatcattaactatggtgagaagtgtgaaactaatcacgaaagacattgttagacccgcccataaccgcgggcacggctattcgaatagttttactatgatcagaggtgtaccactgtacccacaagacacaaccccacatcatgtcaccatgtgcctcaataccaccacggtacctcggaaaggagttgtgacaatacccctcgcataacacaatccaccgcagcgcaccttcctggatcataatcacccccttataaacaaggcatggactccccagcgacccccgtgggcttatctccgccacttctcagtctggtgccccgcaatgaaccatgctatacaaaagataaagccgttgcccacgctggcttgtggttggcacgattaatgtttcacaaccgaaactcgtgaaccggtccttaattgtcatgagcacgaccatcaaaaccatgtgctcacaacccaccattatcaggttttagttggcacattaattaattaactaatcacgattgtccatcgtgaactatcattaagccatcattaaataatagtgagtcataagttatcccaatagtgagctaatgtttctaagcatggctaagcaattatatctaatgtctaattgaacccatataaataaagctcaactagtcaaattataataacccaagggatcaaggaataaagtaatcaagaacaaaaagggctataacaatgaataggttaattccacccaatgacattcgaaaataaatgcaatagttgaaaagaaacaatagctttaaacaggatcaacatgctcaaagggttgtttgggatctgtgtgacttgccttgctggccttggaactcttcaaactcttctccggcgaaaacggactctccggaaacgacggaatctaagcagaaaagagcaaaatcaccaaaacagcacataaacaagcataaacagtacatgtggatatttttaatatgtagatctcaattttagaaaaatttagagacttgaaccaactaaatcggagctaagatgaattagttatgaatttttgaagattaaatcggattaaaacacttaaattgattttaattgaattatgacgcaataatgaattatttttgaaaaggaaaaggaggattattgcgtcagcgggctagggtttcggtggaccgggcgcacggcggcggttcacgcgaacggacggccgagatcgactcgatccaaaacggacggccgagatcgatcggtccacgaccggctcacggcggacagccacgatgacgtcagcgatgatgtcaccaccggcggcggcggctcggcggctcgggcttgcatgctcgccggcgaacgacggcacggcggcgcgaacggaaggcaccaacgggtagcggacggcacggcgaactcaccggcgaccaaagcgacggcggaagaggaacggacggcgacggcgacgaagaagaagcggcgacgctcttcggcttgacgacggcgacggtgctccggcggtctacagcgacagcgaaggggcggacgaggacggcgacgacttggcgaccacgacggcggtcttcccgagcgacgacgacgtctggaacggcggcggcgcacggctggagcgacggcgacgacggcggcgctagggcacacggcgctagggcgtttccgacgacgagaggcgaaggcgaaggtggcagcgggtagaggagacaccggggaaccttttaaaggggctaggagacgacgacgaaggcccacggcggccggcgacgagaaggaaagttcgggaaaatcgaatccgaaacaaactcgaatccacgaatttccaaacgattttagccctctattgattcggccggagaaggaaaggatcggccgaattggaaagcggcggcggcggcgcggtgctagggtttcggccggaggaagacgacgacctgacaggcgggccccacctgtcagcgggcggacgcgcgggcgcgggcggctgcggactgggccggctgggccgaggagagagagaagggttttgggccgactttcggcccaaagccaaaagagactttttaaaacctttttcaatttaaattatttcttaaatgcaattccatttattaaaaatacttccttgctcaaataaatcccagaaaaatctaggaattatagaattaagcaaagtatttaatgaaattttatctggccccattttatattggaatttattaattaaaattagatcttctcttctaggcttttacaataaattctaaaaattccatttaaacaacaatttatatattttgaattttcagggtgtgacaaacctaccccccttaaacagaatctcgtcctcgagattcggaagaactggcgaacagatgcggatgagctgacttcaattcatcttctcgttcccaagttgattcttcttccgagtgattactccattggactttgcaaaagcggataactcgattcctggttcttctctcatctgtttccaaaatacggattggtttctcaacataggacagatcctcttggacttctatctgttcgagattagcttcttcggtaggtacccttaaacactttttcaattgcgacacatggaacacattatggactcctgccaaagattgaggtaactccaactgataagcaacctctcctcttttactgacaatcttataaggtcccacaaaacgcggtgccaattttcctttggtgtggaaacgatgaactcctctaagaggcgtgacacgaagatacacataatctccttcaaaacttagatctctgcggcgattgtcggcataactcttatgacgagattgagccactcgcaatctttcttgaatgatctttaccttttcttctgcttcccttaggatatccgtcccgaaaacctgacgttctcccgtttgatcccacaaaagcggagtgcgacacttccgaccatacagtgcttcgtaaggagccatctgaagactagcttgataactgttgttgtacgaaaattctgcataaggtagattcttatcccaacttccatcgaaatctaaagcacaagctctcaacatgtcttctaaaatctgattcaccctttcggtttgtccgtctgtctacggatgataagcagtactaaagttcagcttagaacccatctcttcctgaagtttcttccaaaaatttgaggtaaactgactgcctcgatcagacactattttcttagggacgccatgcaaacacacaatccttgccatgtacaattccgctaagcgacttccggaataggttgtctttaccggaatgaaatgagctactttggtaagtctgtcgactatcacccaaatagagtcatgacctgatgacgttctgggtaaaccagtgataaaatccataccgatttcttcccacttccattcaggaatcttcaaagcctgcaacaaaccggcgggtttctgatgttctgccttgactcgctgacaaacatcacatactgctacgtattctgcgatttcacgcttcatacttgcccaccaaaatctttccttgagatcctggtacatcttagtactaccagggtgaatggagtataaagtatcatgagcttctttcagaattgcatcttttaaatctttgttgtcggggacacagattctctcacccaaccatacagttccgtgctcatcctccaagaaaccgatagcttttcctcttctcatattcttcttgatctcttgaatatcaggatcattaatttgggcttctctaacttgatcaattagagtgggcttcgcttctaaggctgcaacgaaacctctactgacaattcccaaatttaatctttcaaattccttgcataattccaatggcagctgtcgtccttccgtagcattgcaatagccttttctactaagagcgtctgctacaacattagcctttcccgggtgataatgaattcctatgtcataatccttaattagttccaaccatctccgttgtctcatgttca

SEQ ID NO: 4404 - DNA, 974 bp, Oryza sativa
ttctttggttcgagagtagataagaatgtcatcaataaagaccgccacaacttgtctaggtattccataaacaccttattcatcaagttcatgaagaaagcgggggcattggtaagtccaaaagacataacagtacattcgaacaacccatacctagtggtaaaagctgtcttaggtatatcttcctctttgattcttaactggtgataccctgatcgaagatctatcttggagaaaacagtagcacctttaagctgatcaaacaaatcatcaattctgggtagtggatacttattcttgatagtcacatcatttagtgcacgatagtccacacacattctctgggtatggtctttcttttccacaaaaataaccggagctccccatggtgatgaactcggtctgatgtatcctttctgaagcaaatcatctacttgcctcttgacttctgccaactcattggctgccattctataaggtctcttatggatcggagttgttccaggtaccaaatctattctgaactctatatcccttttgggcggcataccaggtaaatcatatgggaacacatcgggatactcccggactatagaaatctcttccaaagttatctggttcagtcttgaccttaaagactcagaagacaatgcatgaacagttacaactcgaccatcattgctggtgagagttacttttctgttagcacagtctatcacacctttatgtctggctaaccagtccatccctaggatgacatcaaggtctttggattctaacaagataagattggccaggaatggtactccttgaatttctattctgacagaggggctacgttgcaaagagagtgcttgattacttggggtactaaccatcaaaggacgtctaagatcttctacttccatcccatgatttcccgcaaaactcatagataagaatgaatgtgtagcaccagaatcgaaaagcactgt

SEQ ID NO: 4405 - DNA, 2272 bp, Oryza sativa
gcagtgcatctcaacacatgtgctagggctatgaatgaaaggttcaacagtactctcacgggtgagcaaattaagaatcatttgaagacatggcaaagaaagtttacaaagataaataggcttaggaaagtgagtgctgctggttgggatgagaaaattttcatcattactcttgatgatgagcactacaatggctatattgaggtaaatgtcttgactcttgacctagtggtttattccattcatatttttattgcaattacttaaacaaaaattttgtttcactgaatgatcacaaggctgatgctgattattttaacaaacctcttgcgtactatggtgagatgcttacaatatttcgtagcaccatggctacaggaaagtatgcaaaagactcaagttcagtcctaggaacagaagatgtccaaactgaaaatgatgaagaggaaaatgatggccctgccactactgatgatcgtgcggaggcatcatctgcaagcaagccaaagaaagctagaacacaagaaattgaagatgatgggctgattggtgcattcaccagtgttggtgacaagttagcttctgctaactaaaggtcgctgagccagacaataaactgccagatggtttatttgaaaccttgaaaagccttcctgggtttgaggagatccatgtatctgtttactatgctcatttggttgccaaccctcacattgctagagcttttgacggacttcctttcgaaaagaagatgcattgggtccacttgttcattaatgagaagtttcctagatcaatgtagagttgttggatgagttgggtagttcttttggtattatgtgttgccggtggggccatggtcatgtatgacttgtactgccaatatgtttaaggcagtgaactctctagtaggtgtaagacttaaatttgctattatgtgtaagaccttaatttgctattatgtgcacgacttggaacttcttattatgtttggcttggactctatgtatgggttgaaatgggatcagatgtgagctaattatgtgtgattgttttttgaggggttgattatggaactactagtattgttcatcatttggtagcttgtccaatatgctgaaatcctaaagcttccactgttcttggctgtagtaatgaagctgctggagcttattttcaattatagtgatatgaaaggtattttatttttgtgatatatagtgtggtcatcatgtagaaatattatttcgtagtttgtagactatgagaggtaacttcaccaactaatgtgtggaggtaattgtatccaagaaaacaaaagataggatcattccaacccatcatatccctcaaaccaaataaaaaacaggatccgttccatcccttcaaccaaacaaaaaaacataaccatcccattccaaaaagggtaaaaaaacagggatggaaccaacccatcctatcccatccccaaaccaaacacagcctaatgatgcagccatgcaggacactgagctgagttccgttgtccaatccagtgctgcaggcctagaacaagattacaaggaggcatcaggaaacccaaggtatatatagatggtactgtgcgatactcctgctttacttctgcaggtgagccgagcaatttggaggaagcactaggaaacaaacagtggaaagatgcaatggatgcagagtactcagcattaatgaagaatagaacctggcaccttgttccttatcaagaaggtaaatatcattgattgtaaatgggtatataaggttaaaagaaaggctgatggaagcctagacaggtataaaactagactagtagcaaaaggttttaaacaacggtatggcatagattatgaagatacttttagtcctgttgttaaagctgctactatcaaaactgtcatgtctatagctgtgtccaggggttggagtctacaacaactggatgttcagaatgccttcttgtatggagtgatagaggaggaggtgtacatgagacaacccccagggtatgaaaattcttctaaaccaaactttatttgcaagttggataaagccttgtatggtttaaaacaagcaccaagggcttggtatgcaaggttaagtggaaaattgcaacagttaggctttaagccatctaaagcagatacatctttattctcttcaacaaaggcagtataaccatgtttatcttgatatatgtggatgatattatagttgctagttctactaaggatgcagtgtcagctcttctttgtga

SEQ ID NO: 4406 - DNA, 1768 bp, Oryza sativa
atattatagttgctagttctactaaggatgcagtgtcagctcttctttgtgatctgaatgaagatttcgcgctgaaagatcttggagagcttcattatttccttggcattgaggttaacaaggtaaacaatggtctaatattgtcacagggcaagtatatatctgatttgttgaagagaacaaatatggttgattgcaaaccggtaaatacacctctgtcaactacagaaaaattgtctttgcatgaaggtgatcaattaggacctaatgatgctactcagtatagaagtatagcaggagctttgcagtatttgactttgactagaccagatatatcctttgctgttaataaggtttgtcaatttcttcagacacctaaaattgttcactgggcagcagtcaaaagaattttgagatatttgaaatacacagcaagtctgggtataaattttgatagatcagtatctacacttgttagtgcctttacagatgcaaattgggctaggtgtcttgatgaccggcggtccactggagggtttgctgtttatcttggctccaatcttgtgtcatggagtgcaaggaaacaagctacagtctccaggtccagtacagaagcagaatataaggctttagcaaatgctacaactgaggtaatgtggattcagacattgttggatgaactcgatgtccatgcaccgagatcagcaaagatttggtgtgacaatattaaagccaagcatttgtctgctaatccagtttttcatgctcgcactaagcatattgaagtggactaccactttgtcagagaacgggttctgaacaagtttacttgaggttgaatatatttcttctggagatcaggtagctgatggatttaccaagcctcttggagtgaaacagttagagatgtttagaaacaatctaaacttgagaagttcagattgagggggagtgttagagtatatccctgtgtaatccgtgtgctttggattaggatggccagtagattaagctatagattagctgaggttgttgtgatcacatgtaattaggatccggccgttctatccatagcgcatgcctatatgtatcttctccatcgccgttttgtgcgataggttaacacacatcgtcgacccgagtgcaaagggcgacgttcccatccatcctattttcccacagatttctcttcattttattcttggatccaatttttgttgccataaacttgtttttttgcccaatttatttacaagataggtttagtttgaggaacttttgggttggatctaatgtgttcatgtttccgattcggttggcttctcgagttgaggcggagggcaacgggaaacggaggcttgcaatcgcaatggacaaaagcggattatgacgaacgaaggcataatgtgacgaaaggaaaaatactaatcttttaattaagttaagattaagatatgctaggattctcccctactctcgccccttcttaccgcagagaagccacgtatccgtatcggatacgcgaacggaacgtatcggatatggcccgatacgtatcccgtacgtacctggccgcaatgaagcagagcgtgcaagctacagggtcgtcgctaatgggtgcagcagctagcgctcagcacctccgccgccaggaccagggggtccaggaccaccgccgcccccacatagtgcctccgtctccaggcacaacaattttctttcgttccatgtgtcacatcaagtgctaccatggattttggaactggaa

SEQ ID NO: 4407 - DNA, 9448 bp, Oryza sativa
cgcccgcgcgagctccgcgtcgatggcgtccatggcgacggcgcgggggagaggcggttagggtttggggtggagagattgcacgaggcgagaatgggggaggattgagttgtggttcaagataaaacttcgtgacacgttgtcacgttgatgcgtcatcgggcacgttcggagtaagtcccgggtccacgatacatatgtacgagtttgatacatggcacgtttcggcagagattgtatctatccatctttctaaagatttatacgttgatatcacacacagatttttaatttttagattaaaatctaatagacacaggataaaaaacaaaaaacaattaagaaaaaccataatggacactaattaccatatattcatgaaaaaaaccaaatccaatataaatttcaaattatatgcgattcaaaattacaccatctcttataaaagttatgatgtaagtttcatgaaaatattacaagaaaatatactgtaattttgagtgagacaattgaatgagagataagaaaaaaaaatcttttaagtgagatatagaaaaatcgttttggatatgcatcattctttaaaaaccggtttcactgtaatatcatttttaaacgcgagcattcgctataatattgttttctttttttattgcatttgcaaacatttttgtccaaagcatatgcaatctctctctgaccacgtactcatgatcgagaccgagccgagcgagaggagagaaaggcgagggaagggacgaccacattagtatcgtcactcactagacacgttgccaccttcccccactatccacgaaagatgtggtgaaaggaggcaggagatattgctcgagtaggttgctgcttcttgctgctcctacctctcttgtctcatggcgtggcatgccactgggcttctccctctcgccaaagaaacagacgttgtggtcgtctcccaacaaaaccttctccatctctttcacgatgactctaatggcaccacagatgacgagggagggggcgcagtcaagtaagacggcggagcaggttgtgggcaacgccgacgaggttggggagggagaagtggcagggatggtaagggaaggtggctagggctataagtgggtcagccgcgaacccacttataggtcaaaataagcggtttcgcgacttattttagcctataagtgggtttcgcgggttagccacttatacccctaaaggtggcagcgcagaagacaaatgaggtagcgcgactcagttggggaaggaagtgacgcgctcggttgggtaatgcggcggagttggtgtaatcaccccttcattcagccttctatcctagtattgctcagctcggtctcgatcgtgggtgcatggtagggctgtcaacgagccgagctcgagcgagctcgtctgcccaagctcgagctcgacacaagctcgagccgagccattgcaccttcgagcttttaggcaagctcggttcgagctcgagctcggtgccgagctcggccataagtagtataatatatattttaataataatctcttgataagtataattattttctagttaatcacactaataaaagagtagaaaatgattaaaataaatatattgtgctaacacatgctaatttattgtgtaaatagatacaaatatatatatttatctattagtttattatattaataaggtgaacatgcaatataaactatacacagccaagcttggtcaggctcggacgctcggtagaagctcgagctcggctcggttaagctcgcgagcttttgctcagactcgagttcagctcgtttggagctcgagccgagctcgaatcaagcctaggacgagtcaagctcgagctgctcgtgagtctcgagcttttttgacagccctagtgcgtggtccaaagagagagattgcatatgtggtttggttcaacaacagtaaggggcaaaaacgtccgatgaaaaaatatttgaatgaaaaatattttgtaagtaaaaaaaacaacgaaaatagcattgtgtcgaatgcttacaattaagactgacatctaagcgaatcacacgcaaaattcttaggcactaatgtgggaacgcgaagtaactaactggttaatttagtacataggagtatttaggatggattactattaaatccccaaaaccccgcaccaccgcgtctcaaaaaaaaaaaaaacgcaccaccggcgcggtcggcctcgccgatagaaaggccgcgcgcggaaggccaaatgtggaagaagatcgcggccggcgcggcggagggggagacatggaaggcgctcgcgaccggcgcggcgaaggggtggcacggtctgctgccgaagacggcgtccgccaccaccaagctcgtgcccgattcttctccaaagtcggcgacgccgaccgcggcgctcaacctcgtcgccgacgcggtggcggcgtggcgccgctggcttcgctctccatcagcgagtcccaccgcgaggtgtgtataccctcctcatcagctgccgtggagggcaccgccggagaaacaagcccccccgtctccgacgcagcgttggaggtgtggcgtcgttggctacgcgcgtcgacgcggcgctcgctctcctcgttcatggatcaagcttcgtcggagactcacgcgcccccaccaactccacggccgtctccaccacgtgttctcccgcctcctccattgtctgctgcacggagggcgaaggggtgtcgcactgctgcttcgtcggcatctctgtcacgcaactactcgacgtcgtcgacgaactcgcagtcccctccggagccccgcgacaggttaactcttcagaacttatataaatgatgcttcctctagcgatattttctctcatgtcctttttaatttgtactctccaaattgccccacatggttcatggcccatgtccaaatctgtggtgcaaagtcagacgggatagactaggcacccattatatgatctgatccgcaagcttccctccattgatgccctcccggagctgaacgaaggaggaaggaggaaggacgatgccgttggtgttggtgttcagagtatctctgactaaatcgcttatctctgaacaagggaaggaggaaggacgagtattgtggatttcctttgggttgggaatgggttgaatccatttttctgcacttggtttgggtttgctctgtgagtggattggattggtttggtttctgcaagctatgaattggattggaatggtttagaagtgtactgtagagacaagtggtctggggcggttctggtctggatctcagtccattagcaggcttattatcatgggtattcagttgaatgcaattatttttctgcttgatgaatcagtggtggacgcaggaaacaactgttgagtcaacagcccaggattttgttcaacattaaattccaatagagacagctagtgttaaaagagttttttctccaatatgtcctaacttaattattggtttgcagctgcagagacgacagatcattggacatatggtatactgctaaagaatttgtcaagaagtatccagttgtactctttgctcagcctacagatacacactctcagttccacagatgggtataccaggagtggttcaaacccacggtaagaagcttgcttaagtgtgtcagtgatcaccatgcttccaatttggagtttcaggagattactacggagaatgtcaagatattttgcaatgctgatgctcctcaatttattccccgaatcaaaatctactgtgagaccagaaaagcgacttatgaagggagaaagcagaattttgtgcagacaggggaactgataacagagttgataaaatcttctgtggacaatccaactgaggttttggacctgctctctgaggacataaaagataagctcagtatgttgaaaaatcctgacctgtctcatgatgctgatccacggcagtgtggagtttatatccttgtgaatcatccgtccatgctacgaagggagatgcaatctccgttttaccttgcctgttatgatttgctaatgagtgtggataaaagaattgcaaacagggcattcaggaaactgccttataagaactggcagtcaagagccctgcaacaccccctgctcaaagatcatctcatcaatagacggtctagctatggcagagacaagtatcaccaagcaagatatcatcggaatgtggcaagtcacaaaacatcatggaaatccaagtacaaagctgaagaggtcgacgagattatccaccaccactttccgatgattttaacacgtctgatgaaggtcctgtcaaagatgaagttgctgatacgccttaccctccacaacttctttggataaagaatgctgtagtgaatctactgcagtagcaaagctcaacttcttcatgtaggaaaggccatagtgatgcaactttttaacaaagctgaatctgcagataccccatgacttcttcggctaaggaaggccactgtcaagctattgctgtaacaaatctgaatctcttataccagaactggtgttgtctgccgcaccctcacaacttcttggagtggggccgaaacaaatgcaaaagcacttcatgcttattacgagtaggttttgtctcattaactttttgttctttaggccccagttatatccaattgtctgaatccctatgcaggttaatttcctgggttcatgtaacaatgcaaacccatgattttgcttcatatcaacatagctaaacatgatatttttctgtcgacatttcttctgatatgccagaaatatatatttttcttttgacttgatacaattaattttccctaggcatgtttgcaaagccttcctgtccgtgtccaagaaagactcgcattttatctaaccactgtacttacacaacggaggtctgcacctgaggtgcattaatcgctagaattactgaatgaactacggtatacagcataagacctttgttacattgtaagatctgatagcgtgacaaatgtttgtgtaaccttataatacagctaaatctttcatttaggctgatgactatgtggaacgcgtcgaatcttcaggtaccaaacttgactgcgcctggagatgagccctcaaaaacaattggtaggtacccagtagctgcgagaatggattctaatccctcgggtttaagttaatctggaaaacacaacatgatagtatctgtgttagagtgacatgccatgaacgtacaaacattacaaggaatcgcaactaacctggcaaaccgaatcacaactaacccggcaaatcattgcaagaagtttgttagcttctccacaagcaggtgtcatttggcccattacccagcaaggtgctccaacaatgcgattctcaacctgcatagttgtcaccaatggatgactcactttaatagtagaagattaagttatggacataagacataacacagtatgaagctacatccattcatttgttaatagtttacctattgacagagtaagggggtcacagagtatagcaatatatcttggagcagtatttaaaactacaggcaagaaaagaacatgaattgatgtcaactagcatgcccagttaagttaaatatgtaacagcgaggtagctgctgcagaacttgaaatctattatattattaaaggaatagaaaaaggagcctccacgttcgctctcaaggcctataaattctcacattaatcggagaaaaagaaaaaacagtgtccatatagaaatacaatttagaaatagctgaaattcagaattaaaaaataaggaatattagaaaaggagactagagtccatatagaaatacaatttagaaatagttgaaattcggaattaaaaaataaggaatattagaagaggagactagagtccatatagaaatacaattaggaaagaactaaaattcggaattaaaaataaggaatattagaagtagagcatagagtccatatagaaatacaattagaaaataatagaaattcagaattaaaaataagaaatattagaagtagagtatagagtcatatagaaatataattaagaaaaaaaatagaaattcagaattaaaaaataaggaatattagaagaggtgactagagtccatatagaaatacaattaggaaataactgaaatttggaattaaaaattaaaaataaggaatattagaagtagagtatagagttcgtataggaatttaaaactaactaaaattcggaataaaaaggagcctccacgttcgctctcatgacctaaaagttctcccattaatcggagaaaaagaaaaaatagagtccatatagaaatacaatttagaaatagctaaaattcggaattaaaaaataaggaatattagaagaggagactagagtccatatagaaatacaatttagaaatagttgaaaatcggaattaaaaaataaggaatattagaagaggagactagagtacatatagaaatacaattaggaaagaactgaaaatcggaattaaaaataaggaatattagaagtagagtatagagttcatatagaaatacaataatagaaattcggaattaaaaataaggaatattaaaagtatagtatatagtccacatagaaatacaattaataaaaaaaaagaaatttggaattaaaaaatattataagtagagtataaagtgcatataggaatttaaaactaactaaaatccgaaataaacataataaaatcaaaagtagagtttagagtccgtataaaaatacaatttacaaacaactaaaattcgaaattaagaaaaacatgggaagaagagtttaaagtcaatataggaattcaatttagaagtaactaaaatttgaaattaaaaattaaagaatattgaaagatgagtttagaatccacatagaaatacaattagaaataataaacattcagaattaaaaaaagaaatattaaaagacgagtctagagtccatataggaatatatataatttacaaataactaaattttgatattaaaaataattaataactaacacgtatataaaatacaatatgaatattacacattagtagtttcgtaaagttattgcaaaatttaaaattatgttatcattgtaatatattttaataatataatgagaaaacatatatgctattatatgagagaaaatataatgatgctagccgcgcaatttgcgcaggccaccatactagtttacctaaaagaaacaaaattagtgatataacatagatttttaagtcaatcattcgcagcagcaatagcagatacactggcaacctccactgatgcagtgccgaagaggctgatcaattaacacgtggaaggaaattgtgtgaaagactttgttcttgtttgtgattatcaaacaatcaattgcccaaatgtttgtgattaacatggtggcatgtctggctacaaagaaatgccaagattttcagacatcaacaaccgaacacacatcgagcagcccaacagattaatgaagacattcaagaatatgaattcgtgttccagcctccctgatgtagtctgcttttctgcttttttctctttctccacttctgtctaccatctatctccctcccccattttcgctttcttctcgcttgctgaaggcggctcttttacgtctgtactaatacgctgctaatcgatttgtagaccctttctccctctctaatatattgggcaatactcttgccgctttcaccttaaaaaaaagcccaaatgagccgtgaagcatccaactaaatataggttatattttttgttatcaatgagctatgaaagagtgataaatacagaagccgtaagaaatcataacattgcaataaaaggaaaatgaggtttggtcataaacaacatacagttttgtaactacgacgctgctccaacttcaacatatgctaattgcctcgcctatatatgctactccctccgtttcacaatataagtcgttctagcatcaatatgaatgtgggaaaacatcaatatgaatatggaaaatgctagaatgacttacattgtaaaacggaggaagtaccatagcttctgcttgatattaagagctaaattgcatatgccaaaataaactattactttatttcccgagaacgccgtcgccggggatggccagccgcttccatttgctcttaagatccaatgttttgacgcgccggtgcctgttaagggaggcattatagacattatatttttcttggtggctgactgggctgaaaatgagaggctatctttaatgggccgggtccacttcgttcacaaaggcgctgggcctaaaacgcgtgcagcccaagaaaacggcccactaccctcaccatctccccccaaccctcgaccgatgtggtgaagtcccaaatttctccgaacattccccacctcaccgcccaaaacccgcgcccattccaaaaccctccgccgccgccgccgccgccgcggccgccggcgaggcctccatggccaccaccacccccgccgcccgcaaaatagccggcaccgaggtccccatcccgggctcggacagggtgcggtggatcgagctcaccgtcccctccaccccgtccccctcaccggagggcgattccgatcccttcgtcctagtgcccccgcgcgccgcctcggggttccacgtcgtctcctccggcgactcgcagtgctatctcgcctggtacgccggtgtcgcctccccctcactgactcgagctccgttggcgttgggttttctcaggaattaatgctgtgttagagctagtggtagggctgagatagctggagtactatggagttttgtgcagtggagttgattttggtcttattcatctggtactttgtgggaatacactgcacactctgtattgcggtggttaactggttgctgtgatgctccgaggaacactaagtctgtgatagcttcagctaagcagtcagttagttgatttgtgcaaattcaatcctgtattatcctgcattgtaccgtcgcactgtagttgagggtaagctctagtgcatttcatcgaaaatatacatgacaccacagggcagtgagccagtgacatactggcatggtgacaaattataactggtacaaccatgatattcaggaatgttatcatctgacagaaacttatgtgctgttatcatctgacagaaagttatgtgctaatagttcagtagagttccttaacgattcaatttttagggacattttgacaaaagaaagtcctatactgtcatggttgatgagacctagacactaaatttctagggacatctgttaaactccttgcaagtacatgagttcatacatttcctacactgttgtctccaccgatgaaaaatgttgaacaaaataccttgtcagatgaccttctat

SEQ ID NO: 4408 - DNA, 5519 bp, Oryza sativa
caaattgaaacagcaaatctctacgcggcagccgccgccggcagcacggctgtgcacctcctgggagcgggcgccggcgcacgcctcggccgctcgcgcacggcgcgcccgcagccgccgccgcctcgcgcacggcacgctcgcgtccgccgacgccgcctcgcgcgtgcgcccatggccgccgcctccgcgccgcgcgcgcgcactcgtcgccgccaccgcgtcgcacgccctcgccgccgccgcctcgtgcgcgcccacggccgccacctccgcgccgcgccgccctcgccgcccttgccgcagccgccggcgcccccggcctgcaaagtgacgcacggggtgggagactcactcaactggtcaaccatatccattccctcaagggtacaaaggtaatatcacaattcctaaaaccttttttttatttcctttagtatttctttaacgcacaacatgggacccaccaaacggttgtcacaagtgagggtagacggctgcttcagatttcaaaacgtgagggtaaaactgcaaaccctaaaaaaatagggtgaaggaattctccctcttaaagctaagaagacaaagtgtttaatcttaagaggcactttactttgccacacatcctgcatttctgcatcaataacccctccaaaacttaacaatctactagtagtagcatgcctgtgacatttacatagaagcatacatgacagatgaatgatatcaagaaacatatatatgacttaccattgcctctaaattataaattatatattcaagaaaataaatgtaggcaaaatatataaatagtagatttattatttgattaataaaaaacatccttaaaatgtcttatcatttccgtggtacgaacacatctctatatgctacaacacgccacacactgagcctagcattgcttcggttctccttaaaggcactaagcaaacataatattagggcatccaagaagtgctcgcaaaaagtaggtcacaagatcgttaactcttatctcgcatggaggcttagaatatagagaaaatcccttgtatacccctggaaattaagctaatcccttctatacccctgaatttcacttacttccttgtatacacctaaaatttgattttgatcccttctatacccctcccgtcagttgaccgttagttgaccgtctaatttctataaaaatgaccattttacccttcggatgaatatataaatttatgaattacattattaaaaatataaaagtttcccgcatgagactattaatagttatgagtttgttgtgcgatgtattatttatccccaaaattatttttatataatgaaataaaaaatatgtatttatttttaaaaaaaatcataaaaaatgaggagcattcatacaaatataggaccaatgttcacaataatggttttatgaatgctcccgataaaaaaaatccattgtcctattaaaatttcaaataaaaacttcaatttattacttttgttttattttcaaaatttatgtcaaaattttctgcactaattatttagtctcattagtttcataaaatgcacatactgcgcactcaaacaaaatttttaattgtttttgaaggttatattcaaacctaaagcatcaagggaaaaaaggtcatttgtaactaaacgtaatagtgaaatgatggaaaatgtaacggtaggggcatggaagggatcaagttgaaatttcaagggtatagaagggattagctaaagaaagtattgagtgagttttcacacagggaatttactctagaatatacaattcgtttgaaatattcagtgaaaccttagatatttttttctcttcaataacaatttgtttggtcagtgtacctctacgactgcaagttcatatatagattatctctaattcctgcacacggccagaattgaatttctgaaccaatgcatcaccctcaacaaaattgtatcaaagtatttcggtgtattgcatgtgcatagatgtaaaaacacaaacaggtatgtgcatgtgctacacagataattgcataaagtgtccaaacttaactttacacttcacaaataattgccttttttttacagcaaataaacataccataatgtctttcacggctaagaactaaagatatcataaataaatccaaattaaaggtcaccatacatgacagctgcacgtaaacatatggtgtagtccaaatatatcttctagattaatctcaatgaagtcctaagcatatatcttctcccactgacaccacaagtggaatccagtagaaagttagtttcatgctgtcaatgtgaaataaaatgaaaatgttacaattccaacacatcatgaacagtggacgaggaaaacaagggcaaagttcatcagttcaattactcacacctttaaacagaagcaaaaccagatgaaggaaagcatagataaaagcaaatcgattagttaagatagtacagtacctaattacctgatcaagagggcaatttgaaagaggattggacaatgagcaagaagaaccatcgctgtagcagagcccctataggtggtacccatcacatctaacagagcttgtcacggtgaagcagaaggcaacacaacagtagagatttagggcccgtttggtttccagggacttattccaaatccatgtcacatcggatgtttggatactaatttggagtattaaacatacactaattacaaaacacattccatatccttggactaattcacgagacgaatcttttgagtctaattatgtcatgattttgacaatgtgatgctacagtaaactttttataattatagattaattaggcttaaaaaattcgtctcgcggattagctctcatttatgaaattagtttttttattagtctatgtttaatactccaaattagcgtccaaacatccgatgtgacatgggctaaaaagttttagccccatctaaacacccccttaaacctttgagattcatagttcctccgcttcctgatatcacgtgccttcttgtttctatctttcttttgatctttggccaatgatgcgtaccactccctagcacgcttcctttttagttcagccgcacttagttttgtaacatcttcaagagtgcctgcacacaaaaactgtgcttaatacaaaaggcttaaaaagaaacgaaatatataatatggtgctacgcccaacctatagagtccaagttgttgtgttgacaattctcatgatcttttggcatattagttccatttttattaatagcgggatggttgttcgtcaaattagcatcaattacattagttatatcagcaaaaggacctgagagaggagtgattgtaaaattagcaagcaataatatatcaattgaccgatgaatataacattagctggatggatgaaactgtcagaacaaacaatcttaacttggaaattggaagaaaatctgaggattatgcacccagtgtattttggtcagattgtaagtttaacggtagaatgatcgtaagttttgctagagtagcaggctaagttagtgccagatggaatgcaaaaggcaaatttgagatttttttctaccaaaaatgtaaatccgcaacagttaatctacaaattcatgtgacttagactctcagtcttgtagtgtgcccgatttccttagtgatcaaagtaggaaatcgcattctttcatactacaaatatgtacatacaacacctgagcaatccaaattttgaatcctcaaacagaataagatactttaaaactgtccaggaatctttaaattcaacacaaaggtctgatcatccccaatttcgtactatattaaaagggctgtgagcatatgatacttacacgcaaggatcctgtattgcttaattagatcagttgtcaacctgcgtccgcctcaatagttggaatattctgaaatatacaggtattaaataatgtatgcgagcaaatcgaccattataaacaattatcaactgaatgtaataactgcatttgaaataagtagaatatttatcaaagttcattttaagattacttatgcaactgttctttacagtctacgaatagaatatcccacaaatggaacggtttcattaaattaaaattgcaaggaccatcagattcaattggtaaaaatatatagaccgttggatcacaggagaatcatgaatgacagcgaaatccattagatcaatcatgaagcttccagacaaaatgccctttggcagagaactcatatgttcctagacaaaatagcctactcaaataaaatacatattttttcataaacataatactactacacaatatataaatatagatggagagtaccagcagctcgtctcagtgacccgcaacgatagaactccatccctcgtagtgccaattttattactcccttcatctcaaaatataaataactttaatatataaaatttagcgtactttacatattccttcatctcaaccaactacaaccattttctatttaagaactccatccatcgtagtgccaattttattactcccttcatctcaaaatataaatacctttaatatataaaatttagcgtactttacatattccttcatctcaaccaactactaccattttctatttaatttcttcatatgcttctttatctcaatcaatcataaccttaacattttctatcaaaaacaaaaataaaacacaaccctgccatttaactttattgccctctccttaatccctttaaaataacataaaggtagctactctctatctacaaatataagcattgcaaatgtttagaatttattaaaaaaatataaggatttatagaataacttaccttcaatctcacctcccattcaaatttctttttatctgactctaaactattttctcaactcctatcattcctcggtaaagggatacaaagttttatatgatcgaacataatctttgttaaacaatatggaaatcattatatatgagaatagagagaataatctcacaaaaattatcccataattatcaagatcggtctatttgagaacatagaggtaattttgctttggtaaaaatttaatcagtatctacctaaatgaaatgaaaccaaattagcgagagagttttaaaaataaaataccgctggccttctacatgcaataataagggccacagcaaaacaaacttcgttcagtttggatgttttcattagtaaattcacaactcggacactactgcaaacttactatttctttaatttacttagtgaaaaaaagtggaaatggaaaaacataaatgatgcctatatgattttttgttgattctctcggatgaggacatacgttttgatcaatccactcatccagcaacaaaaacacaacaagaagaagaagaagcagggaaagtatagataaaagacctagctaccacaagctaccacataaaacataaaagagatcagagaagaggaaggtgggagcgacataaaagatc

SEQ ID NO: 4409 - DNA, 4538 bp, Oryza sativa
cggaaaataaataaacggcgcagacggctccactccacaggcagcttgaccaaggctacacctaatcctccacaccatcagcctcattgtagaactcttcctctgatgaatgattgcaaggtgagtatatgacatactcagcaagccacgcagcaaatatgcaagtgcacaggataacaaaggatggcataatagggttgcatttgcaaaagcagcatttagcaaacatttgagaatttaataaaacagttaagtaattaaacaatattaatccaacgctatacaacataccctgttgtataggcccaaccattctgaacaaccatcccggctgcacagttctatctccaaaccaggaatgtaccattccaaaccaggagctaatcaaattattaccagtttaagcatcttttacaatgatgagaggtgtgagactaatcacgaaagacattgttagacccgcccataaccgcgggcacggctattcgaatagttttactctgatcagaggtgtaccactgtacccacaagacacaaccccacatcatgtcaccatgtgcctcaataccaccacggtacctcggaaaggagttgtgacaataccccttgcataacacaatccaccgcagcgcaccttcctggatcataatcacccccttataaacaaggcatggactccccagcgacccccgtgggcttatctccgccacttctcagtctggtgccccgcaatgaaccatgctatacaaaagataaagccgttgcccacgctggcttgtggttggcacgattaatgtttcacaaccgaaactcgtgaaccggtccttaattgtcatgagcacgaccatcaaaaccatgtgctcacaacccaccattatcaggttttagttggcacattaattaattaactgtcacaccctgaaaattttttaaaatttataaattgttgtttaaatggaatttctagaaataattttaaaagtcttgaagagaagatcttgttttaattaataaattccaatataaaatggggccagataaaatttcattaaatactttgcttaattctataattcctagatttttctgggatttatttgagctaaggaagtatttttaataaatggaattgcatttaagaaataatttaaattgaaaaaggttttaaaaagtcttcttttggctttgggccgaaagtcggcccaaaacctctcttctctctcctcggcccaagccggcccagtccgccgcccgcgcgcgcgccctcgctcgctgacaggtggggcccacctgttagtcgtcgtctaccttcggccgccgccgccgaaaccctagtttcgcgccgccgccgtttcctttccaaatccggccgttcctttccttctccggccgaattgaaagaggggaaatgatccttgggatctcctctaccttttctcctttggaatctttggctaaatcgttttggaaagagttggattcgagttcgtctcggatttgttcttcccgagctttccttcgccgttgccgtcgccgtgggccttcgccgccgcctccgagcccctttaaaaggacccccggtgtctcctctacccgtcgccacccttgccttcgcttctagtcgtcggaatcgctctagcgccgtgtgccctagcttcgccgtcgccgccgccgctccagccgtgcgccgccgtcgtttcagccgtcgccgtcgctcgggaaaaccaccgtcgtgctcgccaagtcgtcgccgtcctcgtccgccccttcgccgtcgccggagatcaccggagcagcttcgccgtcgtcgacccgaaggttcccgccgcttcctcctcgtcgccgtcgccgtctgttggtcttccgccgccgtttaggtcaccggtgagttcgccgtgttgtcctctacatcttggtgccctccgtttgcgtcctagcgccgccgtttgccggtgagtgtgcgccgcccgagccgtccgctccgccgagccgccgccgctgtcggtgacgtcaccgctgacgtcatcggggtcgtccgccgtgagccgccgtggacccgatcgatctcggccgtccgttttggatggatcgatctcggccgtccgttcgcgtgaaccgtcgcccgtgcgcccggtccaccaaaccctagcccgctgacgcaataattctcttttccttttcaaaaataattcattattgcgtcataattcaattttaaccgatataagtgttttaatccgatttaatctttaaaaattcataactaattcatcttagctccgatttagttggttcaagtctctaaattcttctaaaattgagatttacacattaaaaatatccacatgtactgttcatgcttgtttatgtgctgttttggtgattttgctcttttctgcttagattccgtcgtttccggagagtccgttttcgcagaagaagagtttgaagagttccaaggccagcaaggcaagtcacacagatcccaaacaaccctttgagcatgttgatcctatttaaagctattgtttctattcaactattgcatctattttcgaatgtcattgggtggaattgacctattctttgttatggcccttttgtatttgattaccttattccttgataccttgggttattacaatttgactagttgagctttatttatattggttcaactagatattagatataattgcttagccctgcttagaaacattagtacacattcgggataactaatgactcactattatttaatgatggtttcatgatagttcacgatggtcaatcgtgattagttaattaattaatgtgccaactaaaacctggtaatggtgggttgtgagcacatggttttgttggtcgtgctcatgacaattaaggaccggttcacgagtttcggttgtgaaacattaaccgtgccaaccacaagccagcatgggcaacgactttatcttttgtatagcatggttcattgcggggcaccagactgagaagtggcggagataagcccacgggggtcgctggggagtccatgccttgtttataagggggtgattatgatccaggaaggtgcgctgcagtggattgtgttatgcgaggggtattgtcacaactcctttccgagataccgtggtggtattgaggcacatggtgacatgatgtggggttgtgtcttgtgggtacagtggtacacctctgatcagagtaaaactattcgaatagccgtgcccgcggttatgggcgggtctaacaatgtctttcgtgattagtctcacacctctcatcattgtaaaagatgcttaaactggtaataatttgattagctcctggtttggaatggtacattcctggtttggagatagaactgtgcagccgggatggttgttcagaatggttgggcctatacaacagggtatgttgtatagcgttggattaatattgtttaattattacttaactgttttattaaattctcaaatgtttgctaaatgctgcttttgcaaatgcaaccctattatgccatcctttgttatcctgtgcacttgcatatttgctgcgtggcttgctgagtatgtcatatactcaccttgcaatcattcatcagaggaagagttctacaatgaggctgatggtgtggaggattaggtgtagccttggtcaagctgcctgtggagtggagccgtctgcgccgtttatttattttccgctgcttagatctttattgattgagaggaactatctacctctgtaatgacattttattcgcttattaattagagtaatatttgtactctattatcaatttgttattgtgtgcctcggctgattcctggacgagggttcacacacatgtaagcgtttggaattttggatagaaattccgggcgtgacattaactaatcacgattgtccatcgtgaactatcattaagccatcattaaataatagtgagtcataagttatcccaatagtgagctaatgtttctaagcatggctaagcaattatatctaatgtctaattgaacccatataaataaagctcaactagtcaaattataataacccaagggatcaaggaataaagtaatcaagaacaaaaagggctataacaatgaataggttaattccacccaatgacattcgaaaataaatgcaatagttgaaaagaaacaatagctttaaacatgatcaacatgctcaaagggttgtttgggatctgtgtgacttgccttgctggccttggaactcttcaaactcttctccggcaaaaacggactctccggaaacgacggaatctaagcagaaaagagcaaaatcaccaaggcagcacataaacaagcataaacagtacatgtggatatttttaatatgtagatctcaattttagaaaaatttagagacttgaaccaactaaatcggagctaagatgaattagttatgaatttttgaagattaaatcggattaaaacacttaaattgattttaattgaattatgacgcaataatgaattatttttgaaaaggaaaaggat

SEQ ID NO: 4410 - DNA, 3806 bp, Oryza sativa
cagttcgccaacttgaattatctagagaggagaattggagaagattgataaggaatcggatgcaaagaatgctatgctatggattactccctccgtacttgtaaagaaagtcatttaggatagcgacacggtctccaaacacaactttgacttcttgtttctataaaaatatttattgaaaagtgatatatgtatatttttatgaaagtatttttcaagacaaatctattcatataatttttatattttcaaactcaacaacttgagagttattcatgatttatatacccaaggtttgacttaaacattgtcctaaacgacttcctttacgagtacggagggagtatttccttacaacacttcactatttatatatttttaatctctactattataaaaattggagatgtttttgccggtactttggtacgtcatccgtgcatgagtcggtttttaagttcgttcgcttttagaaatatagatccgtatttaagtcaggttttaaattcgttcgcttttggaatacagaagtagtcgtataagaaatctctttaaaataaactcgcatgttaacttgacatgattttctagaaaaaatatatatccaagcgagttatcacaatgaatttcaatagcctttaccgattgcaacgtacgggtatttttttctagtattatatataagtgtatccctgtgttgacgcttttttgtggccaacacaacattacctaacaatttgcagtgtaaacaatagagtcgccaaaatcaatagatcaaaatcggctagtggaaccgatttcaagattaattcactttcgcggaatcacacgactaatttataaggaaattagcaaagagggtaaatatcagcaaactagcaaaggataatctcctcgctttcgtggtgaagcacgaccgtttttcagcgcaaaacggcaaatattaactaaattctagggttaccagaactcagctatgaaaacaaaatagaaaataataggaaagtaaataacaagaaaatagtagattgatatttttttttgggggggttcctcaaaactaacctaatacactaatatttataggagcacctgaaccctagccgcaccacttgagcgtacatggaaactccaataaattagctaacagaatccgactccatctaaatattaacaaacaaaaaataaatagttcgcatgcaatctaatgccagtcttccagcctgatcactgtcacccttcggtctatgtggcacgggtcccgtgcggcaacagcagcacagctcggcaaattaatcatcaatcaagcactgatccccgtcgcaaatctctcctaggctgcatgcatgtgacaagtccaaaccaaataaattgctgctgcacccagcattatacacagatcatccaagcagggcatcacaaattcctgcacacatatatgtttcaaaactctcgagcaaacgtctagataaatgtaccaactactctcaataatttggcctgcccaaataaactaattttaagccaaattatggtacaaacacatacccctgttttcagtataagaatcataacttttttttaccgaaaacactataaaaattaaccactaatatgatatttgtcctaaaccaatccacagtcatcttcttagaacgatactttgaacacggtatcagttctgagcccatccatagtcgtcctctcaaaatgatactcaaataggtatccgttttaagcctatccacagtcgttctctcaaaacaatactcaaataagcattcgtattgagacaatcaaacctcctacaaataccttctcaaatattttccatttagtacaaattttactactaattcggtcatcactaatgtccacctaaccgaattaacctatcctccaattctggctatgatactacactatctgtagctattaaccaccaggtactagctcagccacaacgacaagacgtacaagcccctgtctccattgtattcagctagccgaaccatcatactccaatgaggcatgtacactactaccagaacgtacacgtacgcatacacctcattagcaccgaaaccacatgcatgtactgtgtacccctatcagaattcagaactacccggcaccagcactactgcatgtattcaccaaagtgttactactagataaatcggcttgcactaaattgccatgcaaactaacactacaatttgagccgattcattcagtagcagttaacaagaagacttgcgtcaagtaatttgctttgctatcttccttcctcaatatatgacgaacagtaaaggtatcaagcggtttgattaaaactaaacatcgatccatataacaatttagcaatcactggtggagaaacgatttttagttccggttaggaactcctctatagtcccagtttttcaaccgggagtaacaatccgggactaaagatatctttagtcccgggtatatctttagtcccggttcaaatacccgggactaaagatcgatcgggactaaagatgtggtcccggttggagggttttttcttttttttttttcttttctctcttcctttttcactgttcttttgctatttgaccaaatcatctcagatcaaacattcacagcattatctcagatcaaacattcacagcacacagcaatatagttcatccaaatcattcacagcaatagttcatcccaaatcatccacacaatagtttatccccaaatcattcacaacaacaacacagatcaaatcacacattcaactcaatcaacacacagatcgaatcgcacattaaggaaaaaaagaaaaaaaatccaagctccagcttccaccgcctgccgctgcaccagccgccgccaggcgcggccctctgcgcgtgaccgccgcccagccgcctcccctccggatccgccgccgcccggctgccgcggtgtcacaccctgaaaattcaaaatatataaattgttgtttaaatggaatttttagaatttattgtaaaagcctagaagagaagatctaattttaattaataaattccaatataaaatggggccagataaaatttcattaaatactttgcttaattctataattcctagatttttctgggatttatttgagctaaggaagtatttttaataaatggaattgcatttaagaaataatttaaattgaaaaaggttttaaaaagtctcttttggctttgggccgaaagtcggcccaaaacccttctctctctcctcggcccagccgacccagtccgcagccgccggcgcccgcgcgtccgcccgctgacaggtggggcccgcctgtcaggtcgtcgtcttcctccggccgaaacccaagcgccgcgccgccgccgccgctttccaattcggccgatcctttccttctccggccgaatcaatagaggagaaatgatcctcgagatctcctctaccttttctcctttggaaacaccggctaaaatcgtttggaaattcgtggattcgagtttgtttcggattcgattttcccgaactttccttctcgtcgccagccgccgtgggccttcgtcgtcgtctcctagcccctttaaaaggttccccggtgtctcctctacccgccgccaccttcgccttcgcctctcgtcgtcggaaacgccctagcgccgtgtgccctagcgccgccgtcgtcgccgtcgctccagccgtgcgccgccgccgttccagacgtcgcggtcgctcgggaagaccgccgtcgtggtcgccaagtcgtcgccgtcctcgtccgccccttcgctgtcgct

SEQ ID NO: 4411 - DNA, 8154 bp, Oryza sativa
gaatttttccaagattgctaagcccatgacacgactgcttcagaaagatgtgaagtacaagtggtcggaagaatgtgagcagagttttcaagagttgaaaagtcgcttgatatcagctcctattttgattttacctgatccaaagaagggtttccaagtgtattgcgatgcatccaaacttgggttaggttgtcttctaatgcaagatggaaaggtggttgcctatgcatctcgtcagttacgtccgcatgagaagaactaccctactcatgatcttgagttagctgtagtagttcatgcgttgaaaatttggcgtcattatcttttcggtactcgtacagaggtatataccgatcacaagagtttaaagtatatctttactcagccggatctgaacatgagacaacggagatggttggaactaattaaggattatgacataggaattcattatcacccgggaaaggctaatgttgtagcagacgctcttagtagaaaaggctattgcaatgctacggaaggacgacagctgccattggaattatgcaaggaatttgaaagattaaatttgggaattgtcagtagaggtttcgttgcagccttagaagcgaagcccactctaattgatcaagttagagaagcccaaattaatgatcctgatattcaagagatcaagaaaaatatgagaagaggaaaagctatcggtttcttggaggatgagcacggaactgtatggttgggtgagagaatctgtgtccccgacaacaaagatttaaaagatgcaattctgaaagaagctcatgatactttatactccattcaccctggtagtactaagatgtaccaggatctcaaggaaagattttggtgggcaagtatgaagcgtgaaatcgcagaatacgtagcagtatgtgatgtttgtcagcgagtcaaggcagaacatcagaaacccgccggtttgttgcagcctttgaagattcctgaatggaagtgggaagaaatcggtatggattttatcactggtttacccagaacgtcatcaggtcatgactctatttgggtgatagtcgacagacttaccaaagtagctcatttcattccggtaaagacaacctattccggaagtcgcttagcggaattgtacatggcaaggattgtgtgtttgcatggcgtccctaagaaaatagtgtctgatcgaggcagtcagtttacctcaaatttttggaagaaacttcaggaagagatgggttctaagctgaactttagtactgcttatcatccgcagacagacggacaaaccgaaagggtgaatcagattttagaagacatgttgagagcttgtgctttagatttcgatggaagttgggataagaatctaccttatgcagaattttcgtacaacaacagttatcaagctagtcttcagatggctccttacgaagcactgtatggtcggaagtgtcgcactccgcttttgtgggatcaaacgggagaacgtcaggttttcgggacggatatcctaagggaagcagaagaaaaggtaaagatcattcaagaaagattgcgagtggctcaatctcgtcataagagttatgccgacaatcgccgcagagatctaagttttgaaggagattatgtgtatcttcgtgtcacgcctcttagaggagttcatcgtttccacaccaaaggaaaattggcaccgcgttttgtgggaccttataagattgtcagtaaaagaggagaggttgcttatcagttggagttacctcaatctttggcaggagtccataatgtgttccatgtgtcgcaattgaaaaagtgtttaagggtacctaccgaagaagctaatctcgaacagatagaagtccaagaggatctgacctatgttgagaaaccaatccgtattttggaaacagatgagagaagaaccaggaatcgagttatccgcttttgcaaagtccaatggagtaatcactcggaagaagaatcaacttgggaacgagaagatgaattgaagtcagctcatccgcatctgttcgccagttcttccgaatctcgaggacgagattctgtttaaggggggtaggtttgtcacaccctgaaaattcaaaatatataaattgttgtttaaatggaatttttagaatttattgtaaaagcctagaagagaagatctaattttaattaataaattccaatataaaatggggccagataaaatttcattaaatactttgcttaattctataattcctagatttttctgggatttatttgagctaaggaagtatttttaataaatggaattgcatttaagaaataatttaaattgaaaaaggttttaaaaagtctcttttggctttgggccgaaagtcggcccaaaacccttctctctctcctcggcccagccggcccagtccgcagccgcccgcgcccgcgcgttcgcccgctgacaggtggggcccgcctgtcaggtcgtcgtcttcctccggccgaaaccctagcaccgcgccgccgccgccgctttccaattcggccgatcctttccttctccggccgaatcaatagaggagaaatgatcctcgagatctcctctaccttttctcctttggaaacaccggctaaaatcgtttggaaattcgtggattcgagtttgtttcggattcgattttcccgaactttccttctcgtcgccggccgccgtgggccttcgtcgtcgtctcctagcccctttaaaaggttccccggtgtctcctctacccgctgccaccttcgccttcgcctctcgtcgtcggaaacgccctagcgccgtgtgccctagcgccgccgtcgtcgccgtcgctccagccgtgcgccgccgccgttccagacgtcgccgtcgctcgggaagaccgccgtcgtggtcgccaagtcgtcgccgtcctcgtccgccccttcgctgtcgctgtagaccgccggagcaccgtcgccgtcgtcaagccgaagagcgtcgccgcttcttcttcgtcgccgtcgccgtccgttcctcttccgccgtcgctttggtcgccggtgagttcgccgtgccgtccgctacccgttggtgccttccgttcgcgccgccgtgccgtcgttcgccggcgagcatgcaagcccgagccgccgagccgccgccgccggtggtgacgtcatcgctgacgtcatcgtggctgtccgccgtgagccggtcgtggaccgatcgatctcgaccgtccgttttggatcgagtcgatctcggccgtccgttcgcgtgaaccgccgccgtgcgcccggtccaccgaaaccctagcccgctgacgcaataatcctccttttccttttcaaaaataattcattattgcgtcataattcaattaaaatcaatttaagtgttttaatccgatttaatcttcaaaaattcataactaattcatcttagctccgatttagttggttcaagtctctaaatttttctaaaattgagatctacatattaaaaatatccacatgtactgtttatgcttgtttatgtgctgttttggtgattttgctcttttctgcttagattccgtcgtttccggagagtccgttttcgccggagaagagtttgaagagttccaaggccagcaaggcaagtcacacagatcccaaacaaccctttgagcatgttgatcctgtttaaagctattgtttcttttcaactattgcatttattttcgaatgtcattgggtggaattaacctattcattgttatagccctttttgttcttgattactttattccttgatcccttgggttattataatttgactagttgagctttatttatatgggttcaattagacattagatataattgcttagccatgcttagaaacattagctcactattgggataacttatgactcactattatttaatgatggcttaatgatagttcacgatggacaatcgtgattagttaattaattaatgtgccaactaaaacctgataatggtgggttgtgagcacatggttttgatggtcgtgctcatgacaattaaggaccggttcacgagtttcggttgtgaaacattaatcgtgccaaccacaagccagcgtgggcaacggctttatcttttgtatagcatggttcattgcggggcaccagactgagaagtggcggagataagcccacgggggtcgctggggagtccatgccttgtttataagggggtgattatgatccaggaaggtgcgctgcggtggattgtgttatgcaaggggtattgtcacaactcctttccgaggtaccgtggtggtattgaggcacatggtgacatgatgtggggttgtgtcttgtgggtacagtggtacacctctgatcatagtaaaactattcgaatagccgtgcccgcggttatgggcgggtctaacaatgtctttcgtgattagtttcacacttctcaccatagttaatgatgctataactggtaataatttgattagctcctggtttggaatggtatattcctggtttggagatagaactgtgcagccggggtggttgttcagaatggttgggcctatgcaacagggtatgttgtatagcgttgatttaatattgtttaattattacttaactgttttattaaattctcaaaagtttgttaaatgctgcttttgcaaatgaaaccctactatgccatcctttgttatcctgtgcacttgcatatttgctgcgtggcttgctgagtatgtcatatactcaccttgcaatcattcatcagaggaagagttcttcaatgaggctgatggtgtggaggattaggtgtagccttggtcaagctgcctgtggagtggagccgtctgcgccgtttatctttctttccgctgcttagatctttattgattgagaggaactatctacctctgtaatgacattttattcgcttattaattagagtaatatttgtactctattatcaatttgttattgtgtgcctcggctgattcctggacgagggttcacacacatgtaagcgtttggaattttggatagaaattccgggcgtgacaagttggtatcagagccccttgaccctaggttatgccaaacggttacccatagaagccctctaaaaatattggaaaagtagaactgttctcctccctttctcttttaaaccaaactaatggcacatgcacttcataatctcttttaatggttctcattaaaaatttattccagtgttattagtactgtacatctattactgtactaatggctcatttaccagcaaaagttttacaatattgctttatttaatcttgctgcaataaaataaatttagcatgttgattttataactttctttcatttcttttgaaacctgttattcaaaagtacaaaacttgtgacctcgtttccaactgtttcaacttatcttgcaagcttggtttactttgtttacttacctttttactttgattttctaactttattcaaattaatccaaaaacttttgctattaattggataaatgtcttaactccctcctttcacttgtctttagatgccgcgctacaagcctgagtacttgtttggtgttgagggttttgtccaggagttgcgtacaatgtcctttgtcattggatttgggactgcccctttttatgcccagattcctcatgatcgtcatgaagagaagtgccgagtcaaagtcaccttgaacagtaatagtgaagatatcccctcagtgatgttcaaagctggaggaagaaactacatccatgcatgtcaggaagtggcaaggatcgccataggagagcttcgcgatcgctacagtgatcaattggccgacactgagtatcgctaccatcctcgtcaaccacagggaagtgaccgtggcagttaccttgagactgaaggaattgagaatgatgctaccacaaggcatttggtggagatgctgtgggctatggatgaaagtcgtgcggagattgtgttagcagctcaagatcgtgaagaccggaatcgtggtaagatttgcaagctagaagacaaagtggatcgtttggagaaggaactagctgtattgaagggagaagcaccaccgcagaaggccaggattcgtctcaccgcaaggaagagagctctatttgtccctcgctatcaattggcgccaaaggttcgtgtggtggagaaagaagttgccccaaccctagcagatcctccggtcatcatcataagtgatgatgaagaagaagaatccaagcgcaaccattccaagattgagtgggtagcaactcaagatgatgaagacgagccgaacgagcctttaatcgacctccgatgctcggaagaactagagtgacttgttaagccgttgtcttagatcgttgtgttagcttgcttgttttaagtttgcttgtgtgtctcgcatgtgatttacatcagtagtgggatgtaagtgcatgcgtttgtttgcttttgagtgttaggaagttggtgagtttagtggtgtgagagtcttcagtttgtaataatgaaactcagttaagatcaataaaagttaaagtaattctctgtcctaagtagtttcccccggtttctcttcttgtgccctgtccatgccagatggtgaacactcgcagcaacgggaatggccccagtaacaataacaacggagagaatcccactcttgctcaagttcttgctcaacagacacagctaatgaacatgatgatgcagcaactccagaaccagcaaaaccaaggaaataaccatgcacctccccagaacaagttagcagaatttcttcgtgtgaggccgcctgttttctctagcaccactaatcctgttgaagctggtgattggctgcatgccatagagaagaagttggatttgcttcagtgcactgatcaggagaaggtctcatttgcatcacatcagttgcatggccctgcctctgaatggtgggatcacttccgtctgaacaggactactgctgaacctatcacttggcttgaattcaccgctgctttccggaagacgcatataccatcgggagtggtgtctctcaagaagaaggaattcaggtcgctcactcagggatctcgctctgttacggagtatttgcacgagttcaatcgtcttgctcgttatgctccggaagatgtgcgcaatgatgaagagcgccaggagaagttcttggaaggacttaatgatgagctttcttacccactcatgactggggattatcatgatttccagaagttagtggataaagctattcgccaggaggaaaagtacaatcgtatggagcaaaagaaacgccggattgctcaattcaagacacaacaggggaataatcagaagccgcgtcttactttaggaccccagtctatgccacagggaggttcttcgtctgttgttcgtccgcagcgtcagttcttcaacaacaatgctggcaacaacatccgtaatcaagctccacatcctgttgcagctccagcacagcaacaacctgccaagagggagcaaggcagcaagcccgtggtgtgtttcaactgtggagacccaggacattatgctaacaagtgtccgaagccccgacgcgtgaaagttgtccctgtccagagcaactctactgtaccagcatcaaaggcccgtgttaatcatgttgctgctgcagaagctcaagatgctccagatgtgattttgggtacgttccttgttaacttagttcctgcaacagtgcttttcgattctggtgctacacattcattcttatctatgagttttgcgggaaatcatgggatggaagtagaagatcttagacgtcctttgatggttagtaccccaagtaatcaagcactctctttgcaacgtagcccctctgtcagaatagaaattcaaggagtaccattcctggccaatcttatcttgttagaatccaaagaccttgatgtcatcctagggatggactggttagccagacataaaggtgtgatagactgtgctaacagaaaagtaactctcaccagcaatgatggtcgagttgtaactgttcatgcattgtcttctgagtctttaaggtcaagactgaaccagataactttggaagagatttctatagtccgggagtatcccgatgtgttcccatatgatt

SEQ ID NO: 4412 - DNA, 11487 bp, Oryza sativa
ttcctgcagcccaacttgagtcttttgcatactttcctgtagccatggtgctacgaaatattgtaagcatctcaccatagtacgcaagagtttgttaaaataatcagcatcagccttgtgatcattcagtgaaacaaaatttttgtttaagtaattgcaataaaaatatgaatggaataaaccactaggtcaagagtcaagacatttacctcaatatagccattgtagtgctcatcatcaagagtaatgatgaaaattttctcatcccaaccagcagcactcactttcctaagcctatttatctttgtaaactttctttgccatgtcttcaaatgattcttaatttgctcacccgtgagagtactgttgaacctttcattcatagccctagcacatgtgttgagatgcactgccttgaagtcagatgaggtccttgtgccaccggccacaagattagcaaggagtttcagcatgaaagatgacatagctgaggtccatgaagcatgggtgcttcctcctttgccactagtgttgtccatgtcctaccttctgtcaaatgaaccagaaattgatcattcagcaatatagtaaacagaaattgtccattaagcagcatattaacccagaaattaaacattcagcaatatgttaacccataaattcaccatttagcaaatactttgaacccagaaattcagtatatagcaatacatcaacccagaaattcaccattcagcaatacatcaacccataaattcagcattcatcaaaccataaattcagcatacaacaataaatttatccgtacaaatgaaatttagcaaatggagtacaacaagctgtccatacaaatgaaatacataaaaatgttcattgaatactaatgaaatatagtaaataaggtagaaatacaagtagcccagctacatattacattccatgatggctattacggtcagcccacatctgattagctaagccctgcctgaattgaaccatcaatgcatggtcattcgcttggccggttgattcatcaatgtcctcacttgaccaatcagacgaagctataagctcatcaattccgtcatttacgacccagttatgaataatacaacaagctacaacaatatctacttgagttcgaaatgggaagaatggagtggcatcatcaagcactttgaagcactttgaacctcctctttagtgacccaaatgcacgttcaaccatcacacggagggatgagtgtctaaggttgaacaactccttctcattttgtaccggattattcccccattcattcaggtggtaccggacagcacgaaaaggaggcaagaatccttgtttggctccatatccagcatcaactagatagtatttgcctattatatgatggacaagttggtcacattcctaaatatcaacatttgtcatggataatttgataaactatagtaatctattaccttgtgggacacggaggccattttcacgttccaaagcatctcttaaaactacagcatgatgtgctgtcccctcccaaccagccaagacataagtaaaccgaagatcaaaatctacggctgccattacattttgagtggcatgggacttcctaccacgaaaagaagactccacgttcttacgaaccgagactctaatatgtgtgccatcaaatagctccaatacaatcctattttgtgttcaacaacattaaaaattagggaccatatatcaatgttcacataaagataaatttagatagggatgaatctcagaccttaaagtaaggatctcttctagggtttcctgctattttagttggagtgtccaatgaggggggcctgattagttcatctcgtacctcaccgattgcatgaaggactttgttgaaataacggctaactgtttctccagacctatgaaaactagtgcgaactaatctatttctaaggttatgtcccactgtatgcaaaaacatagccacttgttcctcaatacacatgtggatggcatcttcaagtaaaccacgatccctaaaaagcttacagaaacgaaagaaacttgcccttctaagtctaaacatgttgatacaagttgtatcgttccaccaaatttttgtttctaggtagtcaattcttttcctatccctttcaaccaatgggccatatctaataccttatctccttgaacatctctttctttttctagacctaataatcatggccatcatcgacaacaataaatttgtagcagcaatacaaactaaaaccttggtcctcttgtccatctacaatacaacaaccaaaaaaacacatggccatcatctactgtcaagaaatttacaacagcgattgatatatgcacagatcttgaacagcagcaattgatttcacacattcttgaacaaaaacatatatgcacatatctgaaaacgaaatcctcatccaaggtttagggtctttttaccgtggtgaatgggaaccccgatgtgcagttggaggctacgaacggccctactcgtgcgccgcgtcgcccttcctcgagagccgccgcgccactgctcgcgcgccggctcgagcgtcgccagctcgaactcctgctagcgccgccgccgcctcgcctctgcgtgtgccgctgccgccttgcccctgctcgctgaccctttgctcgcgcaccgcctcgagctcccgctagcgccgctgccgcctcgcccccgcgcgcgccgtcgccgccttgcccctacgcgctgacgagagaccccgggcgtgccgcgccgcctcgcccctgcatgcgcaccggctggccccagcccacgctcgcgccgccgccacccgtgtgttgctaaccctaggaaggaagcgataagaacgggaagagataagaacgaaggggaaaaaagaggtgaagcgaaactttcggtcttaccgcgcgtgagtcgcgagtcacgggcatggggtgggatcgttttgtccgccagtttatcccagatggggttgtcccgaatattgaaggaatattcccttttggaaccatcctatccctccttgtccttcaactaaacagacctaaaaatgggacgatcccatcccatcccgggatatcctcccaaccaaacacatgcttagtgtcagctctcgtaccggtctcatcatggctcggcacagaagtggtctggtgcggcgccggacttggtaaagtaaacagcgacgtgttgccgcctgagtggagtggagcagccgcgccgtgcgtctgctgggccagtgtctgtgctgtctgccgtgtcgcgttaggctccgatccagaagcgatttctcctgcgccatgcgcttcaaacgccggtgttggtgatgctaggtccacaccttcatctgtacccgaatcatctgaattgctaccagaaaattcattagcagtattaggaaaatcaagaacatgatcactctgttgctcgcccccttgatcatgcgctacaaggtcagatggaagcaaagctatttctgctcttaggcgggcgcctgcatttgattttaattgagaaaatgggaagaccatttcaacaaagatcacgtcctgcgaaacataaactctcccagaaagcaacatcaaggcacttaaaccatttatgaagctggctgtaaccaaggaacacacattgcttggaccgcaattggagtttgtgattgttgtaggggcgcaaatgcagccagcaggcacacccaaaggttctaagagcagaataatcaggtttttgatggaacaggcgttcaaggggtgtttcaaaggaaataaccttgctaggaactcggttaataatatatgcggctgctaaaacggattcatcccaatattttagtggcatagatgcatgagctagaagagatagacctacttctactatatgacggtgtttacgttctactgccctgttctgctggtgagtatgcagacaggatacatgatgagagatgcctatttgccgaaagaaagaatggagtttctcacattctccaccccaatcggtttgcatagtgataattttccggccaaacattctctgaacaagagcttggaattcatggaagacctgaaaaaatctgattttgctttaagaaggtaaacccaggtaaacttactataatcatccacaaaactcacataatatttatgtctaccaacagaaataggagcaggtccgtagacatctgaggaaatgagttccaaaggaaattgagaaacactagtagatctattgtaaggaagttgatgactcttggccatctgacacacatcacacacagactctttactagccttgtcatgacaaggtagattatttgtgctaataactttagacgctataggacttgaaggatgacctagccgactatgccatcttgcaaaagatggcgccacaccgtaaacagcctttggagaggatgcaggagatgaaggaggaagcgggtagagtcccttgtatcgccgtccctcaagcattgttgccctcgtagcctgatccttgaccaaaaaatgttttccatgaagttcaacaaatatagcattatcggaggcaagttttgatgcataaactaaatttttggtggcatgtggaacatgtaaaacatttttgaggataagattgcgcataggggtttgcaatatagagcgaccaatgtgctcgattttcatacctgctccattggcagtgtgcacttgatcgttcgccttgtacttgtcgctaaccgtgagcttgtccagttcaccggtgatgtggtccgtggcgcctgagaccatgtaccgattggagtcgactccatttgtggagctgcatctgaaattgcaagtcacatctgcttcctttgcccctttgcccagcaattctggacgacgatcggcattgacccgcttattcaggatgttcgtcaactcggacgtctgcgccccaatggaaacctgcccgagctgcaccaccatgtcttctatcttctctgcttatgggcactatggaaccacagacacgacgttgttttccgcaacctggatgcttcagttccggcagcaattaggaaatgtgtggacgaatgttctctctggtctgaacgtcttaagcctcctgatagagttgtagtttcaatttggaaagggatcttctcctcccccttgcaatctcttcatgtcatgtaaactcagttgtaacccttactctatttatttaatgcaattcaggtggggaacctctcccctccggtgacttatctaaaaaaaataggcgtaggaggctgctgcagcaaggtgtcgctcatctggcacataagaatcatcatacctatgccagcaatctgctgcaacatgtccccgcttgtagcacaccagacacacgggtcgtgtgtcgttgccggagcgctgctgctgtccagcgccacgtcctccacagccggcgtttgtgccagcaccattgaagccgccgcgaccaccacgtccacggccggcaccaccccggttgctcggagcgttgccacggccgcgcccggctacattggccgtcatgttgccttctcgtcgtagattaagcctgttctcaaagttcaatagctgggcatatgtttctgatagagtaataggtttagttttggccgctaaagccgatacaacagaatcataatcatcatctaaaccatttaagataaaagcagtgagttcttcggcatcgacttgcttccctgacatcgctagttcatctgctaaggccttcatcttggcgaagtactctgagatggtctgggttcccttcctagtgctggtgagagatagcagcacgttgagggagcgcgcgcgagtcgccctggagttgaacatctcctggatcatcttccaggcatctgtcgctgtggtcgccgtggcaacctgggataatatattccgtgacagcgatgaaaagaggaagccgagaacctgttgatccgcggcaaaccactctttcgtacgctgggttgtcgatcatgatcttgatcttcgtcttgtcatcttctttcttttctgcttcgatgtgggcggcgggagtgacggtcttgcctttcagatgccccttgaggcgtgccccacgaatcgcagtcagcacttgtgcgcaccacagctgataattttgcttgctcaacttctcagaaacattgaagcagaacaaggaatttgtggaggtggaagaggaggagctagccatggtagatgggatctaacttcagcgctctgataccatgtgggaaaacaggatggatgggaacgtcgtcctttgcactcgggtcgacgatgcgtgttaacctatcgcacaaaacggcgatggagaagatacaaataggcatgcgctatggatagaacggccggatccttattacatgtgatcacaacaacctaagctaatctatagcttaatccaccggccatcctaatccaaagcacacggattacacagagatatactttaacaaaatcgagttgaagaaaagacagaaaatcaaatataaactcacagaatcgaagacaaatagtatctgatccagccaaggtggaaaatcgctctgcttctttcaagtgaggttgatgctggccgggagcggctgcgttgatccgcgtcacctgcgcccaatccatgccgggatggaggaagagagagcagagcgaggagaggaggacagggacctaccagggagctagccagcccatgcaagctcgatctgcgcggccacggacctggccggtccacgctggcgcgaatccgcaccatggattctaccggcggcaagctcttcgactccaggctccagggtccaacccccgcaagcgagaattttcagaatataacacccaatacgcactgctttcaggatttgtcacctaattcgcactactttcaaaatacaacactagagtgcaaattttctttgttccgtgctattccatcccctaccgtcagtcgcgccgtcgttctccatcctcccgacgtcgccgtcatcagtcagccaccgctcgcgcccgtgttagccgcgccgccgcccgcgtcagcccctccgtcgcccgcgtcagccccaccgccgcccgtcggcgtcgagctccggcgactgagctctataccagctcgaggccgcggtggcggaggttggactggcgacggcggctgagctcggggatgacacgagcgaaccgagccgccgtcgctccggtggtcgagctccggcggctgacctcctccaagccaccgtcgacggcgtcctccgcatccccatcgagtcgccctccgccgtcgcggcggctgcccgcggcgacgagcccaccgcgaagcggcgccgcaagctacagccgacgcgcgcggctgtcggcggcccggtggaggcgctggccacggctcctccccccgcgctacccccatcgtcgccgaccccctcctccaagccaacagtggcggctcgatctcaatatccggcacggcggcaagcaggcgatgtcaccggcgaccgtgtggatggtcccgcccagcagcgcaggcgctggtgtggggaggacaagctcgccggcgtgggggaggacgagctcgccggcggtgagggcaaacggggcgagaggaatgaactgacgacgcgcggttttgggatgacagagtgtcacggaacgaagaaaattcacactctagtggtgtattctgaaagtagtgtgaattgagtgacaaatattgaaagcagtgtgtattgagtgttatattctgaaaattctccccgcaagcagatgatgaggtccctggagaactcgttcgctcgtcggtggaagtgggaaagaaaggggaaaaactaatgaggagagagagggaacaattaagtggaaaataatgcagacaatgtagagaggctgagaaatgggccaacaaagttgcatttgcaattatattatttttatctaaggttactaaaatataataattactattttgagaaaaataataattgagaaaatataaggactaaaatattatagggttaattggatcataccactgcaactttggcaaattaaaatttccagtggcatacagcagatatgacgaatagtagttgcatttttttttcttaatttggcaaagttgtagtggcatggatccaattaacccagtataataagagcatggctaaaatacaaagaaatcctcctcattaaattataaaataaagtttaactaaaataaaaaataattatataaaaatattttaattggtgtgtttttgtccgtgttttcgtccgtcatcgcactaatttttcatctatccgtacgagtgcattcgatttccgatttgcgggaaaggccgctttcatccctcagtgcaccttagaaaaatcactaaatcatcagaatcggatacatggaaacacttcccaaaatcagcgcaacaaaatcggatgcacacaccacaaggaaaaaacaaaattcccacagctaggttgttccaaaatttcaaattcccaattcgaaattgaaattctaactaaaaggagaacttgtgaattcaaatcagactctaatccacccaaatagaatcagaaaagagatccacaggagaactctaatccaatgcatattcgatttggactcgaacagataaaaccaaccccataaatacttccacgggattgctacaaaaatcaatcggatctaacctgattttgcggaggtgactttgacttgcagttgtgagctccaagcgggagtgcacggcttcggcggacggtggaagctcagcgctttagtgaggaggcaaccgggctccgatttggcagggatgtcgaggaagcaggcggcggtgacagcttcaggaggcagagggattatgctcggaagtcggccactagaagccttgaacttagcagccggatcggctgcccactgcctcaccgccgctggcatgcttcccaacgccggatccaccacccaccatgctcgccactaccctcgaacctcccccaccgccccctagcctcgccgtcacccacgcgcctcccaacaccggatccatcgcccaccagcgtcgtcgccgcccgcgcgccttggccgtcttagctgctgcggagccgtcaccgctatggccgccttggccatcgccgccacggccgctgtcgctgtggctgccttggccattattgccgcggccaccgtcgctatggctgagagggagtagggagcaaagagaggaaacgaaggacaggaaaggagatcgatctgtgccagccgccacgaggggggagggattggcaccggcccactgcgcaagggagtcggagaggcgccgacgcaagcagaacatacttaggtgcttcgatgaatcatcgaggtcaaactttataaacctagccattatcttgtgcaacgcacggacattttgctagtttacacagatgacccctgctgcccaagtggagagcggcaaggtgtgcgtattttgcactgatatcccttaccaccctctacaagagctgcatgggggtaaatgtaatttttaccctgccaaaaatgcatttttcttttttttttcaacttgtccgtccctcacgtctctcaacttctgtaaatatttttaccagtacaatatttctgtaaatattaaaaaataaaaaatgaaaaatgaaaaaaattcgtctcgtgcccgtgcccttccgacggcggtggcttccaaagttccaacccgcatccggttcgctgagccatgggccgtgggctgtggcccaactatagcggctgtaagaaagagaatttttttcggttttagattttttttaatatttacagaaataatctatcgaccaaaaaaattgcagaaatagcccctgccgcccacctctggggcggcaagctgacgtggcaaacgggggaggaacgggcggtgacggagggagggttttttgcaggaaaacccttgccgccctctggtggggcggcaaggggcccgaatgcaaaaaagccagtcggggccggctattttgcaggcggccccttgccgccctctggccgggcggcaggcctcgctgcctataaaaggcctgctgcccagccctcagccctcattcttctctcctcaattccagtgaaaaaaaaagaagagaggggaggagaagagaagaaggggcgaagccctgccggattcagacgccgatttcaggtaatattcatagatcctatatgtgactattgagttaaatagtgtgtattctttaaaaatttgtttgaataaatgcattatatttttagggttttagttgtactaatctagaagtgcgtattgtagatatcggtaactacgtagatctgctagtttggaattaatacattaccgttgcattggcttacacaagaagatattacgttgtagatgtttattgcatgaaagagtaatatgatctagttatttcgttgacagatatgtcgaacaaacaaatattccaagtttaccatggaccaggaaacgtccgttacgggccaactggggtagatctgtcaaattttattgtatcagaaaggggaattgagagaccggctgagaggagtgtaccttctataaaaggatggttaatgaggggcttgagagttgatccacagacaagtgacataacagtcaatgttatagtaagtcgggcaactgagggtttttattgggaactaatgccagttcaaaactctcgagtgtggagatggtatttggaaaatgcattgcaacgcgggtggcctctagctttggttccgtttgttcacccgaaggatccaggtgtgcagatgaacatggatgatggcgagggaccaagtgctgaagtaaacgagacttctgtggaggaggtcaacgcacgagaggacgggggcgtagtagctccagtgggcattcaaccaggtggagtggctgacgagggggagactgtcggtgccattgtggatgaaatggagagggaggattctgacaacgagcgtgtagaggaaggtgattcgtcagatgataagacggatattaatccagcagaatgggctagtgaggatttttctgggctgatcgtctctgaagaggatagtgtgagatgggagtacaaagaaaatgaggttattcagggagcgatttatagtagagcagaagatatgaaggaggcggtaaaacattttgcagtgtcacttcatagagagttttgggttgccaagtcgaaccggtcgcaatatgaagttcggtgtgttaaggaaaaagatggttgtccctggagagtgcacgcgtataaggggaaatggaaggattattcagatgaacatggatgatggcgagggaccaagtgctgaagtaaacgagacttctgtggaggaggtcaacgcacgagaggacgggggcgtagtagctccagtgggcattcaaccaggtggagtggctgacgagggggagactgtcggtgccattgtggatgaaatggagagggcggattct

SEQ ID NO: 4413 - DNA, 15770 bp, Oryza sativa
cagttaatccttgtatgtccccatggagtatctcgaagtcctcaaaagatctgacaccaaaacaaaattatttgaatggacggggatatgataaagtgtgttattggataaagtacatgttattatgaggggaaaagaaaggatatggaaacttacgactctgcacttccattaacctcatgatatgttggtgctggacgaacaccgatttctttctcagacacagaataccagtcaggaattccgacatctctccctggagccctttgtagttgatatcctagcactatggcatcacgcaaacgtcttgctccgctcaactgtaattgtagagtagtgcaaatactaagtccagaagttgtgaaaaaaaaaactcttgtaactttaaaacttcataggttttcaagttccagagcagtagataaatcctctgttctgaattgggaattagcaactaggtggacagttccataaaaaaaatattcttgagcaaaagaattaataaaaacctccaggggtgaaatgattttaatgagtaacatgacaagaaaaggcagaagtgtttacttatgttcaacttatcactttatatgtgtagtatgaaagcaacaaaagttccatacgacaccaaatacagataactgaagatatcaaagtctcacttttatctgaaagtttcaaggtacaactgaacaataatgtatcaacaatttatgttagtaactcaccttgccagaaatatacttcttgccaacagcagtgtcctggaggatatgtgcagccacctgaacgaataattattagcttatcttgtattataaatgcaatcaagaaagtctgtgaatcacatctggtttgaggaaaacatgatgcaagtatccagttgactcttcatgacttacggaagaattgattcaggatgaacttcaacctatggctagtatggtatttcagttttaaaaatcagccatcataaaaaaaaaataaaatttacaagatggttactagcttgagttcccaaacaaccctcacagacccatatctgagaactgtaaggacattacctcaccaccatttattggaccatcatagcatggatgaagtgtcatagcacgttgcagataaggtttccagtgtccagtaagtaaatccctccgtaccatctcaacgccacattgataatgctgtttattaggaagaaaagaggatatagaacaggacatcaaggttcatgactgatgctctataagtacgaattcttaaaatgaaactatacttcgagatgtttcaacctcaagcatattcctcaaaaacggctcttcattgaaataatctctacgaacaaatacaaatggcagcttgtaagccaaagcctcactcacagtgccatatccaattttccctatgcaacaaccaacagaattgttacatttctagaaaagaaataaggcggtaaatagccctaacacagataatatagcactgtatttaccaagcatgcagtcagatgctgccatcaaatcaggtgtataggcgtcctttgcaagtttaatgaaatttggtggaagctcttgagtttcagatgcaccacatacctttatgaaaatagaatttggtcacaaatgttgtccagacattattaagagagagagaaagaagagagaagaaaacacgtagtttcaaagaaaatataccaaacagagccaaccatcaggcagccattctttcttcagtttccatcctgcaggctgaagaggaaaccatcacaatggcattgcatcagcaatacttgcataagatggtagcaaattcaactatggattgtactgactaccaataacagcagaaagacagaaaccttagctggtctaaaaggacatattgatttaacataaatatagccctttcaaaaaaaaatgatttaacagaaatatgcaactaacatccattaattgaacaaaatcgagcatctataaacgagaaagaacattcaggctatttaatggtttacctgtcctccaaagttgaaaatgaccaccttaacatcatctttaattcctaattccttcctcacctgatatatggagattttttaagtcatcaagaactgagaacatgggttgagtgttcagagcaaacattgtccagcagagttgtacgcacctcagatctagatttatgcaatcttctcaccacaagaggaacatcaatgacatcacggaaagcaggcactgcagaagatagaattaatcacgagtacttcaaaccaacatgcaggatctttggatatattattcattcagacatatagacgtactagggcagtatccagggagtcgtagtaagaattcacaatgtgaataatcttctgctatctgcagttgatgccaacataaatgcatggttattgaacgggctgaattagtctcaacttgcaactaaagaacgatattacagagaacagttttctcaaaaaaaaatcaagaaatttgaatccggtgtctaggtggctttaggaatttagtagttagcattagcaaaccaattagacaattttgcaccatttttgggaaatgaaatgacaggcacctgccacacaattgagcgatgatgatgtccagctactacgacatactctgcataaatgaagtcccagctgcaaatagaaggtgaaaattaaagaccgtgctttgattcaaaaataactactcaaaaaagaagcaagaaaaactgcaaataaaactatccatgtaaatttcttcaatagcccgaattataaaaataaatggagagaaaaaattatgtttacaactagtcaatttcgggtaaagccataactaaaatttattgttagcatcactcagagctgcagatttcttgtgggttagtagataacttttgtgttcagcgttagtactgattacatcaggaaatgaatgttagcaggcaaaacatataaaagtcaggtaactgtagcaactatgcactgatgaaacatataaccccaagcaaaatgttaacataaacttggaataatatgggaacccacaaaggctgtaactaataattctaaagctcactctacatcctcattgctccttttgacccctagcatgaagcaaccacagaaacactaacctgaaattggtgacgcacaccgatcgaatgccagcatccgcagccgccctgcacgcgacggggacgacatctgaaacctgaccaaagaccaacaacaccacatttgcttcagatgctgtaaagattcatggagaccccggataaaaacagattaaaaaaatcgagcaagtagttggtgttagcatcctcaggagcattaccactaggtcggccttgatcgtgttgagccattccacctcagtcctcagaatcgattcgcgtggcatcacggccgtctgatgatactgcattccgcaccacacaatcactcaatcagccacaaatccacaggcaaagcacagcacagcaagagcaagagtggtggatgttgtagcagtagcaggtagtagagtggagatattggagtatgtttctggaaccttctcgagggaggcgaggcgatcgacggtgagggcgtcggcctggacggcgccgcagtcgaggagcaccttgcggatgtggaggttgggcgagctgatctcggtggtgaagacgaactccggcgcgccggtgaccacgtgcacgtcgtgccccgccgcgatcaggtgcctcaccacctgcactaaccacaaaccaaaattccatcaccccaaataaaaattaaaaaaaaactcaaacagcagcgaatccatccatccagccacgaaaccaaaattccgcgcagaaaccaaaatttcatcgcacggagacaaacacgaatcaatcctccccaaaacgagaaaaaagagaagacgagacctcgagcgcgcgggtggcgtggccgaagccatggccggtgatgtagtacgcgaagaccagatgctgcggcggcgccgacaccaccgccatcgccgcctcctcctcatcacctccgccgtctccccgaatcctcatcgccgccgccgccccaaatctcccggaatttctcccggaacaacaaaaatcgacacttattatcagagactccacactccacactcctcctctcctctccctcttatataagtcagacgatcagcaattgattgattgggagacgagacgacgtggactcgttggttggtgttatccgaattaacgaactgccacgcctgaatttcttttgttgttttttttttgggttttttttgttgttggcgcgatgatttgttggtggtggatggtggtggtggctgccattcccgcgaatctctctatctcttggtgtcattgccgcgattcgcatggtgcctgcagaatcagggcgcaacaaaagagcagatggaagaagcaacagcaagtagtagctgggggagttaggtttttatcctatccaattccagtagcagccaggacgattcgcgtatatcctatccaattgttggattatgaatttatatccgattcgttgtccaactagtccaacctcctctgcaattgatcaaacaaaattaacctgtaaaggttaattggataggataaccttttacttaattggttaatactactagattttaaagtagaggctagaataaattctacgattggaaaaattcttatgctttctaccttttgtaggctttctatcatttagggaaggtttttttataattaagtaaagtgttaatagtgttaataaattaaccctttagttaatttgataacattcttttgataataaattatattataacaaaaaaatgctaattttatagtgcttcttaacggtttcctggaggtaacacattttctatgcctccggttacactaataattttgtatctttagttacatctcaagaactgtaaaattttgccaaaaagtatcatgcttagttactccctcttttactaaatgtttgacgccgttaactattttaaatatgtttgaccgttcgtcttattcaaaaaatttaagtaattattattttttcctatcatttgatttattgttaaatatacttttatgtatacatatagttttacatatttcacaaaagtttttgaataagacaaatggttaaacatgtttaaaaaagtcaacggcgtcaaaaattttgggatggagggagtatttggttaataactaaacataatataaaatgtggataaggataattaacgttgtagaggtatttagcatggcatgagcatgcatgtagatgactgaagatcataaggctataacaaaattggcatttttcaaaccaaactcaaggaagccatgaacatgttatgacatccttcaatttgacaccaaaactcaaaaagaaaggatcttgagaccaagacggaacatataacatcagtccaagtcatcaactcaacccatcgaaggggttgcgtctacgccatgaccttgacgtccatgaccagaacatggcatcgtgtaccgcttgtccctctgcttaatttggcacttttgagttttgacttcgatcaagggatttttttttctctctatgaattctattaacctctaattttttaataaacgacgacgttaacttttggacgcatattttagcatctgtcgtcatactttaaactggagtgagcaataatcaattccgttatcaactatgcaattttagaaaactgcaattttaatgacaaaaccaacattagcgacatgttttagtttactacaacaatagcgtgagaaattatcacaaaactgtaatttttacgttatatgctgctacagttgttacctatatgtactgtaacagcatatataacataaaagttacagttttgtgataattttccatgttattgttgcagcaaattgaaacatgtcgttcatgttgcagcaaactgatagttatggcactaaagttacagttttttaaatttactcatggatatattatcagcaatggttcagttggtcacaaactcacaatcgcaagatcacaaatgcagccagcagcaagtccaaacgcacaacaacaacaacgtcggctgctgcaaacctgtctgcaacgtcgctcagctcagaacacccagtgcagcgtctcgtcgtcgtccttcctcggccggccgcgccgccagctgctgcgtcgtctggcctcgcgcgtgacgaccgtctcggtggagagcacgtaccgcctcacggcgcgcctcgccatgcgcagcggcgccttgccgctcgccgacgcctccacctccactccggtcaccaccgcgaacctctccctcacctccgtctcctcctcctcctcctcgccggcggtggcggcggcattgaatccccagcgccgcgtcgtcgtcttcaatgaagccttcttgttggtatcgagtggtcgtcctcccacctcgacgcgcgtcgtctcgaacagctcggcgacgcacagcctgccgccaccgagctggacgaggtaggacgccaccggggccggccaatccttgtgcggcgggcggtacctccatgtgtggcgcagcgacgggggcgtggcggtgaggtcggaggcgcagaggtggccgtcgtggtgaggggagaagccgaaccagaggctgtgctccgggacgtgctcggcgcggccgcggaacgggagcgcccagtcgccggccttggaccacgcgccgctcgccgtgtcgaaggtgaacgtcccgtgccgctccgtggacacccagatttgggagtcgcggaccaccgcgtgggcggcgacgcgggcgggcccgtcgtcgccgtcggggtcgagaacgtagggcggcgccgtgagggagcgccagtgccagtcctcgatgatggtggcgccaccccgcggcggcgccggcgggaggccgtggacgagcgcctcgaagcagtgctccgccccgcgcatccgcgccggctccggcgccgccgcctccatgacgtagacgccgtcgccgacggtgaaggcgatggggcaccgcttggtcgcgcgcatgtgggggaggaggcggacggcgtgggcgccgcacttgaacaggatcagcaggaagctgcggtactcgccgtccacaccgaccaccttgtccttgccgccacctaggatcatcgcaccgcacctgccccagccgtggccctggggtctatagatggcctcgccggcgcgaggtagctgcgcgtccaccatcgctgccgccaccggcgccaggcgcgggcgatctgcggcggctgatccgtcgcccccgccggttggctttctcggcgggaagaagcgcgacatgtcgatgcggcggagcccgaactcctcgctgccccacggtgtgggtttcttcaccagcagatgcagaaaccggcggctcatcctacaactaccgatgaatttctcgacggcggcagcggcagcggcggcggggggcggcggtttcttcctttggccgtaccggttaaacccctagcttttcgcgcgtccgattttgtactgataacctaaaagatatccccttgtttggacaaaggtatcctaacagattggctgtgtttagttcacgctaaaattgaaagtttggttaaaattgaaacgatgtgacggaaaagttggaagtttatgtgagtaagaaagttttgatgtgacgaaaaagtttgaagtttagaaaaaaactttgaaactaaacaaggccgtagtttgagtaaaatttctcaaatttctgtttgaaatctacaggatacaaatatgtgcaatacaacataagaaaaggaacatatcaagaagatcacaaatgcggaagaggcgaagagcattgaggtggtaaatccaaaatgctagataaattaattggatgccaacatacaggcttgtgttttttgtaacaacaacagtgtacactctctactaaaacactaataatgggcaagatcaggactatttctaggtgtacactgaaacactgaatgggcaagatcagcactatgctagagggagctactatgcacataacaatcattttaccaattgatctaatgatcagcactatgcaccacatggcagccatttgaggtactagtcgtggatgctaactaactggaggatttcttcatccttcctgtaagtaaacagcagcagtcaattcacaacaatgacatctgaccgtcaccttgaccacataacaggtgctgaagggtttggtagcgacgatggggtcatgcagtgttgttgccactggtgaaggctttcgccatcgattgctgcgacatttgcttccggagattcctcaacgtccatagaatcgacttctgtctcatcagactccattggcacttcgaagaattctctcttttctgaatctgaagcagaccaattagataccgtggcaatttgtggtggtgtccaaggaactaaagccaagaagttgctgcacccaggagatttgtcctccagcccgtgaaagttcctttgcataaaagcctgatctgaaagatgagaaagaaaatggtgaggagcaatttcaaggtatggatgataatcctatcctgacatacaggacatgagtataacactagaaaatacatacacataaagtccggtgcgccatacaaacatgctaaagtagttcagcgggctttcttccttaaagttaatcatctaatgctcatcacttaaaacagaactcacacaaagaatgtcaccaagtataagtgtgctagaagtacagaggcattttaagacaaaagcaaatataaaatcaggagcaacgcgtgcagctaacaaacttgcatgctagcaacatagccttgaatatttgttctactactagccagttgccacaaaactaaacagtgagatctttgcaagataagttctgtgtatacttatttcaatatcaaccttggatgcatcacagatgtagtatgtaaaacactaaaacgcctaacacctaaagtagcaatagcatcttctcctatatatctatcccatttgacacacgctcgacatactgtaaaagtacaaaataaagtattgcaaacattcaaatattcagaagaatacaagagtaagttataataatacaaaatgttaagtaacttactctttagactacgtatcaagtctggactgattatgattgaagggttcgaggtcccaggaccaatgcatgcagtgttatctactgacttgtataaaacaagtgccttgtcctcacttgatggatgagattccatggcacctcccagcatgtcttctataatgggcatgctaacaacactgtggatttcctctcctagcatctcatgtccaaatggcatggaaggacctggcgtctcttcttccataataggtggaagcccaatatcctacaaacaatagtcgacatttattcagcaaaatgtgacggtgcagcaaatttattgaatatgtacttacagggaaagtaaaatattgaaaaccaaacaaatgctagaaacgatataatgcgcatttatatcctgaagcaactagccaactacaaatgaaacctagttttcttcaagcataacactcctactggttagtggtaacattgaatgaggtatcagaaccaaggtgaaatatggcaatacattgctcagtactgagaatatctcccactagaacactgagtggggatggtgatgtcataacaaaatcatgcatgccacgcccacaccaatggtggacatcttattaacaatgaaagaaaacaatgtcaagatgataaaaaaaaaagaaaagaagagatgatccattgaagtacagtgaaccacaagaaaggtttgctagtggttccatacagattttgacgaacagaaagatagagtcatttcattattaattaggaaccctctgtgataactgttactgctgagcaaactcatattggataatgctacaatgataaatttggagaggatttatggtgctgataaagcctatataatgctccctccaatcaaaattatagaactaagtttagttctccgaacgtcaaatattttgactggagggagtatctaaattataatccattgaacaactacatgaaagatagtttagggaaacagctggtactcaaatacatagtagtattagctatgctttcactcagctattttatttcgttgggaatccgttgttttctaaactccatcatgcgacacacagatgtaaccaagcaactccaaggtactgacaagcaagaaaatgaaatccggtaaacaaacatactgcaataacacggtagattcttggatgggaacagttgtcatggtaagcccaagatgacactttctcagtgcatttaccatttttttctcagcctctcttaataatctcattgcaaacacggcacccgcgcaaaatcagggcatccataagcatcccgaaatacaacctaaaaatgcaccaaactacctggtagatatcgcataatagtactccaactaacattaaaccaagcaagctcataacatgcatcaaactgctactagtaaccagtgggacgcctaatcatagctataaaagtaaaaaaaaaaaaatatgattccaggctccaagcatgaactacaatagaaatatccgacttagagccaagcacaaagctatgaaatctaacactcgtatcgaaacagtactagagcatgggggaagacagctcggctgctcagctacacagaccaaacgaagccgtagggacgaggagagcaaatggcggtggcgggagctcaccaatctgcggctcttggcggcggggccggagagggagaagtcggagaggccgtccaccacctggtccagctccttcctcttccccatgaaccccaccatcatccggcttcccccaagggaaatcaatcgtgctcgaatcccgcgggctcctcgcgagtcccgagctcgaatcgaggcgcggggatgctgggaatctgggactgggctgtggtgggattgccggccggcgggcggcggcgcggggagcggcgggtttcgcgggatcttggcagatggaaggggtggggtttcgcgtgtccgcgtggggtaattttgcgtgggtgggtgggtggtgcctcgcaccggatggatggttccagaagacgggtggggtcgtcaatggaaatcatccaattggattggtcttagggcattaacaatacgtcacactagttgagttgaggagcctcggggtgtcacataggatagggctagaggtctaaaatttggattcttcacggtgcaagtgtctctaggagtttatatttcagcccctaacattttttttagttcttatagtttctttaatttatgtgaagttccaaaatttacactatacaccctacaatctctactattataaaaattaaagatgtttttgttggtactttggtacatcatccgtgtatgagttgatttttaatttcgttcgtttttgaaaatacatatccgtatttgtgtcggtttttaagttcgtttgcttttggaaatacagaaaagacttctaattgtagctcatgattttcttaaaaaaaatatatttatccaagcgaatttctacagtaaatttcatcttaactaaaccatatctctactattataaaaattgaagatgtttttaccagaattttagtacgtcatccgtgtttgaatcggctttaattttatgtttcggttttaatctatatctctactaaaaacaataaattctggtcttatgttaaaaaaagaaagaaataaagtccaacttaacgagcgataaaaaaaacttccgtcgttagtaaaaaaaaaagcatctcgtcgcttgaaaaaattgtccgactcctgtagaaaaggaaaaaaaatctcccagtaaaaaaaaagtccgtttggtttttttcactggtattttttttccctttttatgtttggctgggtcaaagaaaagcagaccgaatggaggaaggtagcggacacggaatagcggactagtctagggctgaaaaggaaggaaggctttcggccgaaaacacagaaaatatttttattaacctttttaattattatctatagcgatcccaatgttaagatttttattaacttttcaattatagtgtatagtaatcctgatattttttattggtatgaaatcttaggtaatcccgattttttgaaatcttaggtatgacaatctgaaaatttattggtgcttgttttgatataaaatctgaagttgcaatgttgtttgttcagaaatctcaaaaacgttatagtactagttctgaagctgataatatgacaagttttacagtgagttcttgaatgaactagctgataattgaccagagactatttggctacatgtttaataactttaaacttggttagtttcaagaaattgtagcagtgaatgtagcacgttctgaaaattttacctcggtgctgtattttgcttctgacggatataaaatttcactgtattagattcatggcaactagtcaagtactgaactatcgtgtacatgtaatggatgttagatttaattgggtaattaatccatttaaatcaattaaatcaaataaatttcaaggctcattatgctaggaattcatgtgaattcattcttctatgggatatcaatgggatgaagagttttgagaattaatccatttgattaaggaattggtaacttatatcaattagtcctaattgatggatggttgatggttgtgtagtggaggatggttcatggctagttgatgacaattagttgctctattcctcttcctattccatgactcttactcttcatcttccattcctcttataaaatgagaatggatttgatctcccgcgagaagaagtagacacactttcatccattttcaaaagctgttgctgctacggtaatcccatcccgacgagtgtgtgcacacgcgttgggagagtaggcctccgaaaccacgcgttgctgcgacgtttgcacagacgggcgggcgatcaggtttttggggagcgcaaggcgcgactactcactgttcgtcaacatctacttcatcttcaccaacatgtcgaacactggagacaaggagaaggagactcccgtcaacaccaacggaggcaatactgcctcaaactccagcggaggaccattcttggggtataaccttattacattatttcaattagaagttttactgttaatgttcatcgcaatgtcaacattgtgtcattatgtgattgttgatgcttattcaacgttaagcatgctcatgttgattacattcaccactatcactggatcaaattctattgtaaatatcatgtttattatcttgttattttggattaaaatatgccgaattatgaccaaatttccaacaatggatacatatccaggtttctaaaactactagtaaaatgtaattggttctgttgtgctttcatacattttccgattccaagttactattggcatgtgtgaatgcataaaagaaataacttgctgttgtttgttgttcatgtgaaaatggatggaagtgtaaaaatatacaaaagctcttctgttcattgcaggtgatcatttgatatgctaccccggtgcatttaacatgactacagggccattgcactgggagttgctgcaaagagcaaggtattacattttctaaatcatttgcacctgaaaatattacgatcattcaacgaataaatatgagcttaagggacaaataagagacaatgaattggactggtaatgaatttctaaaataaactcaaatgtacagacaacttaagcttggttagtttcaagaaattgtagcagtgaatgtagtgtatgtagtatgcacattgtgtacagtagcatatacttctctatatgataaagttgatcctgtacttttccatgtgttatggtgaattggtggtgatgttgtgaggtgatccatgcatatattatggtgatggcagaagattctacaataaacaaatttgattttcctgcaacttgtaaattcgcagagagatagggcgaggagtttgaaagaaatattatggcggtcaaagaaacacctgatgaagcacagaagcttgaagagttcttatgcgtacgaagagaaatgctgaaacgtgtttaactggtgaatatgtcgtctgttgctttgccgtgtaaaaaccgttttatcctggcacttgtctgcagggtgcctgttctactaggacaatgaggcacctgttttgatagctctcttttcatattgttcatgctgtaaaaaatgggtgcaactgtttatggagaaaaaagtgggggatgcgaatcatactttgttgtgggaggatgtgtggtatgggcaaactcctgttagagtgcaatacccaggcctgtatggggtcagtttacagtgtgggaagactgttaggcaggtctgagacgggggggggggggggaatgggatctaaagtttttagaagacatttgtgtggggggagtttgttggagctgcaagatcttcagaataagttgagggctgttgacatcacttcagactgtgataggatcatttggcctgctaggaggaagcgggagtacaatactaggtccatgtatctctactacttaaaaagtccgtagtggtggtcttgattcctgacatagcagacgcatcttacagacatgcataatctcaaccatccgattgccatatccaatagcgtcaatctcctccacatcacgcgatcgctcctctcccatcacgcgctcgctcctccccatgcccactcctttccccacgccgcgtccttcgccctcctccctgcgtcgcctcctcgccccgccgtcgcgtcgcctcctcaccagccatgcccaccggcctcctctccagacccccgccgccctctccaatctccacgcctccacctcgcatcggatcaatcctccaccttcgccctcctccctcctttccctcccacacggaaaagtctatacgtactaaatttttcttacaaaatgtttacaaactctgatgtgtcaagctgtgagtaaatctagatttcttgtaacttccatctagttaaatcaaatggttgagaaatttgttagtaaaagttttgtaagaaaattttagtacgtgtagcagtactcctcccacacacacgactcgcgccaccaccggcccctcaaccccgccaccgcttcttcccttccgctcctttccctcccccacccaccggcgccgctaccgatcccgccgccgcactaatctctctcgccaccgtcgcccgccatctccttactccgcaggccttcggcacgccgcagacgatttccacgccgaccggtcaccaccgacgccgtcttctccctacttcaccgcaggtactgcttcattgcttccgctcccaccttccccttctctgatcttttatgtcgctcccaccttcctcttctctgatcttttatgttttatgtggtagcttgtggtagctaggtcttttatctatactttccctgcttcttcttcttcttgttgtgtttttgttgctggatgagtggattgatcaaaacgtatgtcctcatccgagagaatcaacaaaaaatcatataggcatcatttatgtttttccatttccactttttttcactaagtaaattaaagaaatagtaagtttgcagtagtgtccgagttgtgaatttactaatgaaaacatccaaactgaacgaagtttgttttgctgtgg

SEQ ID NO: 4414 - DNA, 20620 bp, Oryza sativa
ttatctttctttccgctgcttagatctttattgattgagaggaagtatctacctctgtaatgacattttattcgcttattaattagagtaatatttgtactctattatcaatttgttattgtgtgcctcggctgattcctggacgagggttcacacacatgtaagcgtttggaattttggatagaaatttcgggcgtgacacgcggcgcgaggccacctccgccctgccgcgcgagggccccgccgctgccgcccggctggccgccatggcgcgagaccgcctgcgcctctatccggccgccgccgccgcttggccgctgacgaaagagaagagaggggaggaatagaatggggagaggaggaggaggaagaggaagagatgggaggagcaagagataaggttagggaagagataaggaatagaatttattaactcctccatctcgcgcatgcctcgtcctctccgccacgcatgcgcgcatggtgatattttgttccagtttaggctaccaatcgggactacaaatagatccaccaaccgggactaaagataataggtatctctagtctcggttggtattatcaaccgggactaaaaattgatctttagtcccggttgagaacaccaaccggaacaaaagataaaaaagtagctataacccggtttttattgcaaccgggactattgtggtttttggctgaccgaccaaagatggtttcttcaccagtgaatcctaaactccccaactaaattggtggactactagcagcaaatcacccaaagcatctacatcctcacaccaatattaactaaatttccaaaccgaataacaaagccttgtattcggtctaaagtgtaagggtattccaaataaaccgatgtctcataagcaaatactatttggcaaaactaaaacagtaccaacatcttgccgacttgcacaaaatatgaccgaaataaattataaaaaaaataaaaaaatcacagttatttctagctcccaaatatttcggtctctaaaaattgataacaacatctacaattattagtaaatatacaaaactatatggtaacatccctccataatatagactcatatgatatccaagaatcataataagaccatgaaggataaccttacatacctgagaattgattccaagacatatgcatcggttgcataggtgaagaatatatataatatggtggcaaaagaacctgatgatctgatgcaaaccgttgatttggcacacacctcctaactaccttctcattctttgcctccactttaactttaacatctgttttattctgcacctgaacacttcctttaggaagccatgacatacctttctccctcagcttttctacacttagcttgtggagctgcttcttctgccaattcgacaagctgtgtgaatgtctcagttggctgccattgccccccgagctcttcggcggatcctgatttgttactaactctgccgaagatgtctctcacttcatactcacatgatgtacattttctagctgttgtacacgtgcatgccccccaggttcaataaccttttttctaaactaaagccttttgtacactcacacatgcaccagcagctaagctcttttcttgaactctagacttcggcacctagatttgcttccttgttgaactacctcccacctgtaccgaagacttctttctactagaccacctagaccgatttctcttatcaaatcggttatccatggcatgtgacttttctggagttgcaacatgcaatcgaccttcattaatagctgattgtattttctgacgaaaaatattacaatcactagtgcaatgatcaaatgaattatgccacttacaataaatttgttcttctaaatcttgaagcgatggcatgacatgatgatccggcaatttaatataatcattctttagcaaatcatcaaaaatatgatcacacatactccaatcaaaagtatacttcttttcctttaaccgacacttttgtggagacggttttaaagctaagcaaacaaatggttcagatttactatctacccattcggctacattgtcgcttatatttcccttgtccaatgatttagaactatctgctatatcagcaccaattttaattttgtgcttctagctctagattgatcataagcaaaccatgtagacataaactttgtcaatgatgaaatagaaaatttaaacactttattattgccaacaagaatattaatctccccaatcgatctgttagaattattcatggtgacattattaatgtatggattattttcagaagcatgatcaaattgagaaataagcaaattacctgtaaacgttaccttatctaatgtgttggagaagcattctgattttttcacttgaatgatgtctaagttcgttcattgatggctctccaatatttgcgccttgtcgtcgcgatttcgtgatccatcgtctagatgttcatccacttccttggcacgaaattcagctggcaaaacaaaaggtcctatgtttccagataaatcaagcatagctacctccttttcattagccgataattctaaatttatcggcttttgctgtttcgcaataacactattctttgttttctgcaagcgtatgagtttatgttcccttagctctgcaatttctacctcgacttcctgctctaactcacaccgttggccctcagataaatcgtctagtgtgacagtgttattgtcgagatcgaaattgtgctcttgatcaatgttggcaatttttgacataggtatttcagtttgcccccaaccgaatttacacaatttgaactctgcgtgtttgaccatatacatagtactatttgattgacattttgaagatggcaaactatgtgggggtacaaaatcactagtggaactactattaattcggctataatcgctactagcatatgaagccgaattatttccactagatactatataaggtgacccataagactgagatgtgactgaccgatacttggcatgccatgcaatgaattaaaagaatcaactggataattaatattgtcatggccatacatatctttcatcggcaaaatttgttgtgtaacagtaggttgtgaaataatcgccgatgaattaaaaggtgtgtgtatatattgtatattactagcattactgaattttaaagtatgtgaattactttgcataggcagtgacatattattttcgtaattcaaagatctcgaataattatttgaataatcactagcaaatgcaatatgtccattaaaaataggtctagcaatatttgtatgagaatatgtggcacttgtaaaattgtttaaagaaattggtgtagattgtacctcacaattaacatagtaaggttgcggcgtagtagtccagtatgtctccatgaattttgtagcagggcttgttcttttcctggtgcaattcgtgtacctagcaaaaatcagagaaattaatttgcacttacagaccgtgaattggttgatcgctagccaactgatctccttgttgaccagtgtatgtagttcactgttcccaatgcaaaagtttctatacaaaagttgcttaaaaaaatcatattaatcatattgatctatttttgaaaaaaaattaaccaatacttaattagtcgcgcgctaatggactattccgttttccgtgcactaatggctggttgggaacatcccctacgaacacagcctaagtacatgaattattttcatcagcctgatttgaaaaaaaaaaaaactacttagaataccatattaaagactactgatgtgagaatctgcacaaccattgtctaattgaacttctgactgaacttttgttcaattagacaattaggcaaggatcatctgactgaacttgacacagcaagtcggcaggtggaggtatcctgatagataaacagatcacataaacaactcaaacatcgcaaacctgccaatctcataataagagaacattaatttgcagctttacttacttcgatttcattttttctcaggtcaagaacaaaatttacatcaatgcgcggttgcaatctgagtagtgatcttttactccgtacagtgatgacgcaaaacttacaggagatgagctactacaactaattacacttcgcatgtccatggaaataaggtttgcatatactaactctgattctctaaaacaagtctccgtatttcaggctccttgcagcatatggctttactctcagcttgctattcttgcccaactgcttgtggagttgtggggtgaaacaggtatcaccacctgcagaagaagttctagttctgaaagacaacataccttccatgatacattgatgccttgttgcctccagataggctcagaagtctatcatacctgttcaacatttgggggagatcacgaaaatgtattcagcagtgaaccctagatggtagtgaaggttatatacatatacatgggccaaatgggctaagtgggccaactgaaccaaaacagaaatatatatatggtgtatacattaacaccccctgtcaaactctaggtggatcaacagccttgagtttggaaagaagaaaatcatgctggtctcgtgtttgcggtttggtgaagaagtcagcaacttgaagttcagagggcaagtaatgaagacagattgtcctgtgttgataatgaaatcgggtaaaagaagcatcagtccctatgtgtttgctgagttcatgtttgacaggatttgaggctatttggatagcacttgtgttatcacaaaacaatgaagttggttgtgagaggacaacaccaagatctgcaagtagccaacggagccatataacttcagctgttgtagttgcaagagctcgtaattcagcctcagcgcttgaacgagagatagctgtctgtttctttgacttccaagcaagaagagaagatcccaggaagatacaatagccagtaatagagcatcgatcaatagggtcacttgcccaagtggaatctgaataagcttgaagctctaatgagctatcacgggagaaaaatataccacgagatggcgtcccacgtagatagcggagcactcgtaataggtgagcataatggacagatgtaggggcactagtaaattgactcagaacatgaacagcatgtgagatatccggtcgagtaacagcaagatatacaagacttccaacaatatgtcggtatcgagaaggatctgaaagtggattcccatcagtaggacgaatcttgagatgaagctccataggagtggcagcagttttatcatcacttagaccagagcgagatagtaagtcgagagtatatcgatgctgagacaaatgaaaaccattcggtgttgaagcaacctcaatgcccagaaaatactttagtggtccaagatcagtcatcatgaattgctcacttagacgttgcttcacgaaggcaacatgagaagcgtcatcacccgttatgatcatatcatcaacatagagcaagagaatcgtacgacctcgagaagaagtgtggataaatagggcagaatcatgctcactagcaacaaatccagcttttagaacaactgagctaaagcgctcaaaccaagctcgtggagcttgcttaagaccatataaagcacggcgtaggcgcaacacatgaccagatggacatgtcaaacctggtggaggctgcatgtagacttcctcttgcaaatcaccatgaagaaatgcattcttcacatccatctgtgagatctcccattgacgagttgcagctacagctataagggtacggacagtagtcatgtgagcaactggggcaaaagtctcatcataatctcgaccatattcctgctgaaaaccacgagcaaccaagcgggccttataccgttcaatagatccattagagcgagttttcaccttaaacacccacttgcaagtaattggaacagcatgatggggaagaggaacaacatcccatgtacccgtgcgctctaaggcagaaagttcctcattcatagccaatttccattcattaattgtaacagcctcttgatatgtgcgaggctcctgaacaccatcagctattgcacaactgtaacgaggatgtggcataattttactgcgatctcgaagaccatatcgtgctgcaggagatggtgatgatggtataggcatatcatcaacaggtagctcattagaatcatcaagtgggtgagagacaagggaaacctattgcttcctagcagattcggtaggcagcagcaaagaagattgaggacaggggaaacttgccggcggaggagaagagattattagcagcagagcagatcgctgatgcgacgtccaggacgcagctccggcgaatcccaggcaagctctgataccatgttcaacatttgggggagatcacgaaaatgtattcagcagtgaaccctagatggtagtgaaggttatatacatatacatgggccaaatgggctaagtgggccaactgaaccaaaacagaaatatatatatggtgtatacattaacaataccaaagatgctctctaccgaaggattcactaaacaacctttcatattttcatctttatttcctaaacctaaactcaactttttagtaatggacacaatttctcggtccaggaaaacagagaatgcgaccaataagaggatttaagaaaaaaatcaaagggctatacctatactgtactgcactagtcactagatattagtaatggtaagaatagggcctcaaggtagtttgatatacaaatggttgctcctatagacataggaggctatagaagacaaggggtatgaaagcattgtcgagttgggctgtataagcttccaataaaccgctcaacgtcacagctaccaaaagtgatatccaatgctgtgttaatataaaaagagatggtcaggatttatgcttgctttatattgtagaataaaagcttcaaacggttcaatgccaggggggaaagtaaaacctgtgaaagtatgtagccacttgaagctaggagtgacagcaggattgagcaggctgctaatgcagaagttatgcctgctgctgtgccctcaattgttttctctaacatttcaaaagtatgtgcataagagatcaattatcaatcatggaataaataataatggaaattaaactcacttcctgtcttgctccatcttaggacaccatacttataacatatcattgatgcctaggtaaaacaagagaattcatcatactgaatgcagctaacataagaaaatattaactgatcacacactggacatagaacttaccatggtatcaccaatacccaagctgagaattccagcaaatggtgtaagaggtcggtcattgaatcctgatgacatccatttaggaagtgcacatcccagcaagagtgagaaatgactgaacaaaacaaatatagtattaggtctatccaagcactaaacatgtaaatgagttaaaatctggaaaacaacgaccattaatccagacctacctaacaattagaatctccgaatcgcggtgatcagtgaaggcactcatgaactgatgcacaatatgcccaagagggtatatttcccaaacctgaggtcagggtgaaacatttcgtcggagaaattagcacatgttggcatacaaactgccaaaaaacagagaaaggggagaaagaaacaggacacaaataaagaaaatgcttactcgaaccatctccaatattaagaaaacggcaaatgtgtggcatgatgtgtggcatggcgcatgccctttgaaaatttgcttcccaagaatttttgagatttgcaatcaacaaaacatcttagttgctgaggtctctgcaaatgctaatgctctcactttcagaaggtcttttggggagagagagtctgaggaatggctagctattggggatatcattaactctattgagttgtctgatgacccagatgtgttcctttgggggcttgataagaataaaacttacacctctaaatccatgtatagagcaattctctttaggggagtgactgacactagaatgcagggtgtgtggaattgtccctgtcctgaaaaaattaaacactttctatggcttgctttgaaaaacaggatacaatctgctgaacagctgaagaaaaaaggatggaagggctctgagttttgtgtactttgtgggatgcttgaaaccactgatcacattcttttccagtgtccaatggcctctttagtctggtgcttatgcagagatgcttttggcttggagtattatacctaggtcttttgaggatttcttcctgatcaatggctctttgggtggggctgatctgagagttttcttgaccctacttgctgcagtttgctgggtgttgtggtccactagaaacaacatgatttttagagaaaaattagtctactcacccctatcattaatgttccaaatcaattcatttttgcagctctggagaatccttagcagcaaggacactgagaaaattgacaagatttttttttttttttgccgggtcggccgaaggaactggcgaccaaatttcattaagattgggaggaataaaatcaaagtacaagtagttttcgcttgcaacgacaggaggctgtcgaattagactgtggcaggaaccacagcccggcaaactaaaaaactggaacgccaacacaacagaaagaaaactaagaactgcaattctcgaaatagcctgcttctttccacactaagatctcttctttgatagcctctgctaactggttagggcttctcgatctttggtcgaaaattgacaagattactgggaagctcatggatgctacttcaactttgagacaaccaagatctggagttggctgatcgtctgaagtttttagttcttagtcgtttgcttagcttgagagtttgttaagcctgtcttagagttgttttgtttccttttagtgctggtcagcttttatcccccctaatggtgttaattctggacctttcctgtgtgtgatgtaaaatgggtatcccccataacgatgccgtgtttggctttctataaaaagccgggcctaatggcctcagtttcaaaagaaaacggcaaatgctgcaccaaatgctaagcccaagaaatcaggcgcaaagagaaacaatttattgagagtgtgtttcaaacaatctgatggggatcgaataaggaaaacatacaatacctgaaatattattgcaggagagaaaattaggacagcaacgggatggtaatacttgcgcaaaagaatcctctccgttttgctttgttttgatatactgtagaaccttctaattgatacatatatcacaaatatccagtatgcgcataaagcaagccgttcacgtgaatcggtgaaaatatagttaaaaaccctgtcaaacaataaaccattaagtgaaccaaaattcaatatgtacaaaaatgcacaaggtttagaagcaacaacagaaagaaatttttcaatatttgactaacagatttcgtgcttttatgcccttccaatgaaatgcaaacttatatgctcaccaaacaaatggatgcacttcaaaatcttgaataagacgcgtccatgatggcactaacaacaatagtgctaccaacaatgaaacataaaatacatcacagtcaattctcttctgtgtgcattcctcaactgtttgtgttctttgcctccccagttttctacagtaagccaaaacttgaacggaacttttgtataacaaggggagaagaaaaggaccaagcaaaaccccctgcagaaaagaaaaaaaagggaagggtattatgcactaagaaactgaagccatacaacgcaataacttctacctgaataactgtgcctatctagcttcgagttccaggtgcgcgaataaatgcttctgatgatacggagaacttcatctgccagcagcacggttgcaaacgtgaaggcaacaaaataagtatcagatttgctaccattttgctggtaaaacatatatagttcaaggaataaatcacacctttgaaagagtatgagccagcatatcaccacagtaaagaaaaagaccacttgagaccaaaatggcctcccctaagttcacacaaaatgtaaagataagttaaaaaaaaaaagcaattgcttcaagtcatgatgaaaaggagacatatacattgcatcggccaataggaacctcacaaattagctgaatttaaattttaaaaaatgaacagtgtagatataatgcactatgcctgcatggaaactggtaggataactagaaatcgtatggatagctctaaagtataaacatatgcagtcagatatacacaaaaaaactttatctaattacatcttagacttcaggtacaaaccaaaagatgaacatgaagggaacttctctagaatatgctggattaagatcacagcagccactccacgacagagcaaatacaccaaattactcatcaccagcagatctattaagacaaaacctagattagtttgtaattccttgcttctgatgaacttccaccagattttgaaaagaaagggtgagattatatctttgcatgcagataaaatatgcgtgtacctccatcagtcttcagtaaaaagtggaacaagtatgccaggggatataaaatgatgagcaacgagccgtatttcgaagctatagaatttccattgctgggagactgccgtacatgccaaacaaaaaatgctaacacgctgaggcagctaacagatactgcccagtactgcatttcaaggtatgcatattctgacaatgaacacatatagttagtaaacctgatgtgttaccgaaaatcttagtgtcaaacaagatttgaaatgttgatgaagacttaggaaaatatccatttagtagtggatctgataaatttgataaaatagaaaaaatggataccttctcgtccattaggatctgctagtaagaccctataaagttgaattaaccgtgaaagcatgacactaggcagagtagtggcgccaagaagtatgcctgatgaagcacctggcctggatcaagagcatcaagagcatcaagccaccacaagaaggtgaagttttatgctattcctcacaacacaagacatgacgaatcttacggtaagcaactaggattgcacatcacagaacccatataaatgacagtgggagcaacgtttttgctgaaaatgcaatggaacagtatttgtgaaatgggttaactaagaaatgctgaagcccaattattcaagagtgatatttgtcccttggattcttggaaccaccaaaacctgaccattttgcacactactgaaccaaaagaaaatccactaagcctcaagtaaaaataaaatcgcattcctgctgtatgctgaatccgactgatgttgtttccccaattgcatgatcctcacagggaggcaaccagcattgaagcaacaaatggatcaattcacctggtcctgaaccggcgggcggagcggggatgaggacgtggcgggggagccatccacggcgagctcgacggcgagggcggccgcggcgaggaccgcgggcgacgaagaggaacaacgacgagcctatctggatttttcacattttggtccttttaaaaaatttatttcgcaaatagacctaaaaaaatatcctataaatggtcatttttggatgccagagtggctggggccgtcgtccaacaggacagcgccaacctctctatcgccgtccccccgccgatgtggaatgaactcaaatggacggaatatgtaacttgtagaatttttcctttcttctcctctcttcgaagtgcagaggagagagttgtgtaacttttttattttaattttaattttttgatattttttgcacgcttaggaacacaaaagaaccaaccatataaaaaataaacttaaacggatgaaatatgtgacatatgtgaaattttacaaagctctactaaaaacatgtctcctcgaaaatccagacgagcctctcgcccgagaccaccgccggcgcacgaacgcgactacgctagcctcgggttcggttgggtcggccgccttggtggttctgactgacagctgggtcaaagcgcacgaacgaagggagcgcggcgcgaaccggacggaggaggagaggtgggctctgtagcctgggtcgggccttggtggctctgactgacaggtgggtcaaagcggttgagccgtcgcgtccgacacgggtgtgggtgtggtgcaccgtgcacgcgcaccggaccgacctggtcctcttgcgtggcgtgtgcgcgacgcggagagaaacgattttgtgcctcgtatctgtgggcgtttgcgtcgacgtcgtcgtctactgatgggcgttgggttggatgggaatatggaatgattcctgagcattttgtaccacctctccaggcaaaattcacaagtgttgcaatgttcaagcaaaattcgtgttctgtactatcaaatataagttcgacatccacaactcatgttctcagataggtacagaatttaaagcaactttaggtaactagtgactgatgaggagcttgtctgatggatcacaaaccacaacatacgcaatacaatttaaaacattttctaaagtaacaactaacagtccgggaagaaaacagacactatacgatctaaccatccatccattgatccatcaactcagagcagggtagtaatactaataccacgttccaggcatagtaataacattactaatacagactctaataataagacaagttcacaatctcgatagtagctttataacatttttttgctaataatacagttattgggacagcagtaatactatgttgatcattttctcttcagagcggagaggatcatgcaacggcaacaaagtgtgacatgcaggacagatatcatctccttgggatcttttaatctaagggaactcctcagcaaaccgggtcaaaataccctgaacacaaaaccagtaacaaaaacgtcagtgcatcagaacaggtagcaatttatcattacattacacaagtaaacaagggggaaatatatcctaaacattgcacccccttcagaagcaacaagcctgcaaatacagaaaaaagaaatgcaacttcaatgaaaatgcatccatcacaagtaaacaccataaattgaatatctgctaactcaaatatcactgagttcaagcttcacacgcatatattgggtgacggtacatggaaatgtacatcctgcctgccaatgcgttctcacatcagatgtgttctttgcatagagggaagaaaaaggcagaacataaagcaaatttgcagaaagaaacatgaaaggaaaaacgaactagtgcctgcacactatggttcatatgataacaataaccaaagcgttggcaccactgaaaaggagcaaacagaacaaaacagctgttggtgcaacctagtccattcaatataggcagctcgtgatagatgttcactgaaatcaagtaaccaagaagaccatacaattctagcatatcaatgtaaagtgaattataaaaagctgagctctatttccaacaggtcaaactgcctaaggcctaataacatacagcagcccaggctaaggatgcccatttgttgaggaacagtacaaactgataaaacacttgcaaggacagcagtaaacgaaaaggaatcatacatgcgagtaatgcaatggttgctctttagaaaaagagagcacctgaatgaacaaatgtgaacccatgatacaatatcacaacttacttcgtaactaacagcagaagtttcaataatatttgccacaaaatttaagtaaaataataggaaagaaacaacacttacattgaacagacaaacatcgccagctctggacggctgtagatattatccccatcgtcatccagtgcaggataagcagcaacaagcgcatcttgtgcagcaatatatagttgagttgtagattttccaatatacttcacatactttccttgctggatggaaaaggccttgaaggcagtaattcaagatcacagctggaccaagagcaactctcatcccctcaatcgcctccatgacagcattgatgacatggggagatgtctcaaatatgtttggcaccaagagccatgtgcttcacagcagaggcagcagtttgccagtgaacaagatctctgtccattagagcatcgtcaaccaagggagtaacagcatatatgtaatccttgcccatctcaccaatatactcaaagaggaaagagagagacttcaggacaccattctgaacattgagttctgggactcggtactcattcatcagggcaggcagaactgtaaaaggtgagcaggtttcagcaacaatggcaatcgcgacagtcgtgcagacacggttttgccgttcctgcaccttcaagtaattcaacagagtagccaacacatcctgcagcccaatagccttcgcaatataaccaaatgtgttcacggtggctcttctaatacccttcttgtgagccttcaacatttcaagaagctcaaaacaaatcctcatccactccctagcaggcacaaattctgctccacgatcagcaatcctaccaactagatcaatgcagttctcctggaccttttcatgcctgttcttcaaaataggagtcagtcgaggaagaagattcttgatcagcggtgtcatcttagtcatgccaatgacattcacaatagctttcagtgctccaagaattgaacccaacacctcagggtactcctctcccaaatactcatacagcacaacacccaagtgacccataagctgctcctcctggcaatgtttcattacaatggctatccttgagatcagatcagcagcttgctgcctaacttttgcactcttgttgttcaaccgccacttaatggtaccacaaatctgaggaaggtaaggcttgaccccctgtcccagtgcattgacaacagccccaaaaccattaagcatgacatttgcatcgtcacttgcctgctcttggaaagcatacaagatgccatcaataagcagctcctccaaacgagcatcaatatctgaagcacccaaattagccactaccttctcaactgtttccattaccattctcctgtaaggttcgctttcatctttcagatcctcaacaatcctcccaacaatatcagcaactccaaccttatttgccatctctaccgttgtttccacaagctgcttatagttcctgcggtccagagccattctcctaacccagaagtgatggaaaaattcaggaaggatgtcattccagatataatcagcctctacaccctctgtactgacacactgtttaacaaccttcaggacaatctttttcatctcttcatctggtgactggaactccctaatcaggatttgcatgacctcctttgtgtagtaactggcatacagcgcatccataagagggatgataaaaccaattgctttcaagaaggcagcaagaacctttccacggttagatctgatacccttccacagaggcttcaaaacagtatcaaaactttctataccatatggtgcagcagcctcagcaagtgcagcaagagaaagggcagtgattgtcctcactttctggttctcgtcactaagaccatgctcaatgatctcgactacggactcgagatgtggcagaacagcgcagcccataagaatagcaatctgctgaacaatcttgataccagtgtgccgagcttgccaagacttcttactctgacagacagcctttaagaatggcaggagagcagggatacccaaagcagaagccaccacactaaatgctctagcagtggtatttctcacatactcatcaatgttatcaatatctggtctcatggcggcaatcatagtagcaagaccagcagctttgctaagatttgagatgatctcccggccctcaacacgagcgtagtagtcctcatcaatcagaagtggttcgatgaccacaagaatcttgtgcacaaatggacggactagctcatccagcttatacagtaccctgtcaatgaccttcactagaagatgacgctcctggtcctcaagtgttggctgcatgagcaagggtagaatcttgttgaacaatgggccagcaccaaattcccttgctttgtctgtcagctgtcgaagtgctgtcttccgctgtgggggtgtgccattcttcaccttgagcaggagcttcatgatcttcctctccttctgctcttctggagatagctgctccccctcctcctcattcagcaatgttccaaagtactggtaatcctctggcttcatgaagggcaacccaccaggcaactcctagggcacatcaaactgctgcccacgattctcctcaggaatagcatacaatggtgtgcccaatggtgtcggtgtaacgagcagctttcttgctggtgtgcgtatgggctggtatgaagcaggaggttcaagaatcttgtacccttcctgagggaacatagtatcaagctcctcatccgtaagaggcctgttccgctcctcaatgtcccgctcccaccgcaagagctggtactgctctggagtcattggaccacgagaagcaatctggccggggtgttggcgtcgcaaggttgtcaccaccaaatggcgtcggaccaggagtgtaacctgcaggcgtcgcagcaccagtgcctccaggtgtagcactacccatactagcaggagtctcatcccatctcgatctctgcttcttgggtgttggcgtgacaagcccaccaggcagcttaggagtagcatcccaagctccagaaggtgtggcacctggagtaatgccaccagctgcaggtgttgcatccgcatcggccatcctcccaggagttggtgtctcatcccaccgattccttctcaccgacggcgtcgcatccccgacacgaccaggggtggcatcccagcgcccaatcccaggagttgcatcaggagcatcccaatcggaggaggtcttcgccttcttggatccagaagcagcagaagcatcaccatcttgcgactgatcccatctattgctgcgccgactggctgctgctcaggcaaggccttcttctccttggccttctcctcttccttcttcttctgagctatatcacgcagcagctgctccttctgcttctgcaggtcattctcgcgcatggcatcagcataggtccgcacggaagggtccggggtggcctcaccggcggcgaagggatgtggcgctccggcgagatgatgcgggccagccggcggcggcgatagtcatcctcgcggtcgatgatgcgctgcgacttcttggggaggccgtcgtcctcggcggcgcgggggatgtcggcggcggcgacggcgtggccggtgtaggaggcgaggcggcgggcggcggggttgacggccgcctcggagtcgtcctcggaggcggggatggaggtgtcgtagccggcgaagcggttggggtcggagccgccgccgccgtagagatcggtgtcgaaggtgacggaggagacggccatgggcgcgccggcggccagggcctcctccatcttcttgcgctcctcctgcgcccgcgcgagctccgcgtcgatggcgtccatggcgacggcgcgggggagaggcggttagggtttggggtggagagattgcacgaggcgagaatgggggaggattgagttgtggttcaagataaaacttcgtgacacgttgtcacgttgatgcgtcatcgggcacgttcggagtaagtcccgggtccacgatacatatgtacgagtttgatacatggcacgtttcggcagagattgtatctatccatctttctaaagatttatacgttgatatcacacacagatttttaatttttagattaaaatctaatagacacaggataaaaaacaaaaaacaattaagaaaaaccataatggacactaattaccatatattcatgaaaaaaaccaaatccaatataaatttcaaattatatgcgattcaaaattacaccatctcttataaaagttatgatgtaagtttcatgaaaatattacaagaaaatatactgtaattttgagtgagacaattgaatgagagataagaaaaaaaaatcttttaagtgagatatagaaaaatcgttttggatatgcatcattctttaaaaaccggtttcactgtaatatcatttttaaacgcgagcattcgctataatattgttttctttttttattgcatttgcaaacatttttgtccaaagcatatgcaatctctctctgaccacgtactcatgatcgagaccgagccgagcgagaggagagaaaggcgagggaagggacgaccacattagtatcgtcactcactagacacgttgccaccttcccccactatccacgaaagatgtggtgaaaggaggcaggagatattgctcgagtaggttgctgcttcttgctgctcctacctctcttgtctcatggcgtggcatgccactgggcttctccctctcgccaaagaaacagacgttgtggtcgtctcccaacaaaaccttctccatctctttcacgatgactctaatggcaccacagatgacgagggagggggcgcagtcaagtaagacggcggagcaggttgtgggcgacgccgacgaggttggggagggagaagtggcagggatggtaagggaaggtggctagggctataagtgggtcagccgcgaacccacttataggtcaaaataagcggtttcgcgacttattttagcctataagtgggtttcgcgggttagccacttatacccctaaaggtggcagcgcagaagacaaatgaggtagcgcgactcagttggggaaggaagtgacgcgctcggttgggtaatgcggcggagttggtgtaatcaccccttcattcagccttctatcctagtattgctcagctcggtctcgatcgtgggtgcatggtagggctgtcaacgagccgagctcgagcgagctcgtctgcccaagctcgagctcgacacaagctcgagccgagccattgcaccttcgagcttttaggcaagctcggttcgagctcgagcttggtgccgagctcggccataagtagtataatatatattttaataataatctcttgataagtataattattttctagttaatcacactaataaaagagtagaaaatgattaaaataaatatattgtgctaacacatgctaatttattgtgtaaatagatacaaatatatatatttatctattagtttattatattaataaggtgaacatgcaatataaactatacacagccaagcttggtcaggctcggacgctcggtagaagctcgagctcggctcggttaagctcgcgagcttttgctcagactcgagttcagctcgtttggagctcgagccgagctcgaatcaagcctaggacgagtcaagctcgagctgctcgtgagtctcgagcttttttgacagccctagtgcgtggtccaaagagagagattgcatatgtggtttggttcaacaacagtaaggggcaaaaacgtccgatgaaaaaatatttgaatgaaaaatattttgtaagtaaaaaaaacaacgaaaatagcattgtgtcgaatgcttacaattaagactgacatctaagcgaatcacacgcaaaattcttaggcactaatgtgggaacgcgaagtaactaactggttaatttagtacataggagtatttaggatggattactattaaatccccaaaaccccgcaccaccgcgtctcaaaaaaaaaaaaaaacgcaccaccggcgcggtcggcctcgccgatagagaggccgcgcgcggagggcgaaatgtggaagaagatcgcggccggcgcggcggaggggtggcgcggtctgctgccgaagacggcgtccgccaccaccaagctcgtgcccgattcttctccaaagtcggcgacgccgaccgcggcgctcaacctcgtcgccgacgcggtggcggcgtggcgccgctggcttcgctctccatcagcgagtcccaccgcgaggtgtgtataccctcctcatcagctgccgtggagggcaccgccggagaaacaagcccccccgtctccgacgcagcgttggaggtgtggcgtcgttggctacgcgcgtcgacgcggcgctcgctctcctcgttcatggatcaagcttcgtcggagactcacgcgcccccaccaactccacggccgtctccaccacgtgttctcccgcctcctccattgtctgctgcacggagggcgaaggggtgtcgcactgctgcttcgtcggcatctctgtcacgcaactactcgacgtcgtcgacgaactcgtagtcccctccggagccccgcgacaggttaactcttcagaacttatataaatgatgcttcctctagcgatattttctctcatgtccttttaatttgtactctccaaattgccccacatggttcatggcccatgtccaaatctgtggtgcaaagtcagacgggatagactaggcacccattatatgatctgatccg

SEQ ID NO: 4415 - DNA, 15949 bp, Oryza sativa
  unsure (1)..(15949): unsure at all n locations
atttggcgcgacttaggcagctgtgtgatcctcctgaagacatctgatttcggttttttttttttttttttgggggggggggggggggggtcnccccccanagcttaggggttccggtttctgaggccttgctatctatgtgttagtggtattttgttcgcttgatatgtagctggagtcccctgccatctagtttcctcgtttttccttttgtttcttgatgactgagctctttagactcagaagactgtgttctccttttggcttggttttcaagctgggtaatgaattacctgatctcaaaaaaaatattgttcttcgacaaatataagtgatgcctattactagtactttttttggcattcaagggtataattttgaagcatgctatagcatcaggattacggattactttctttacttaactcatgcacttttttttcctgttttattaaccagcttcgaggaaaaagcattttgcaacagagaattaccatgcacaagctgctcttgatcattgcaattttgcaacctccatgtttggcataagcagagcagagcgacataaaaaaatcactggcctattatattctctattttacgcgtgaaaacaaaaaccactcgggttactattatttaaataaatcaaactttggtgtactatatcacagaatatattatagcagaacgttttttttaaaaaaaaattaagtccgggtgtccggaccagatcgaatataaaaaacctcgtggtttttcggacaagcgtgtataggaataaatgacaaatattattttaggacacaattggttaagcccggaatccgtccggtctacccggactaggtcgaatataaataatcattgtttttctgtcgagcgcgcatatattatagcagaacagttttttttttaaaaaagattaagtctaggtgtgtccggaccatgtcgaatataaaaaacctcgcggtttttcagtcgagcgtgcatagaataaatgacaaatattattttaggacacaaatggttaagcccggaatccgtccgatctactcggaccaggtcgaatataaaaaaatcatggtttttgtgtcgagcgcgcatacattatagcaaaacggtttttttgggacaaaaaagattaagtccgagtgtgtccagacctgatcgaatataaaaagcatcatggtttttttgtcgagcgcacatagaataaaggacaaatattattttaggacgcaattggttaagcccggaatccgtccggtctacctggaccaggtcgaatataaaaattcgtggtttttctgtcaagcgtgcatatattatagcagaacggttttttagtgttcgaatgtaatttgttggaactttttaaaaaacatggtttttcggtcgactgcgcatagaataaagtggaacggattattttggacaactagttattatgaagccatgatcaggtcgattttaaaaaataaagcagaacagattattttcgggaactagttattatcaagccccgaccgagtcgattttaaaaaataaagcggaacggattattttggacaaataactatatgtacagaccaggtcaatttttaaaaaacatagatttccggtccaccgtgcgtagaattaagcggaacatattattttcgacaaataactattaagaccgggattgtccgagccaggtcgattttttaaaaaaacatagttttccggtcgaccgcggatggaataaaagacaaatactatttatactattttaggatataatgtcgaatattaaaaacctcacgatttttttagtgtccgaacctaatttaatagtgaatctctgaaaatatccacgtatattctcagcaagtacagcccataaagaaatttggaggccatctacgaacgagtgggcctgtatcgagaggcccatcagccgaagcgctatttggcagcacaatctggaatccatgcgcaattacataatacacccccctaaaaactgaacttacaagaataccatatgattttttttccacaattactcttttactacactactactccatccgtcaaaaaaaaaacctttgagggatgtgattcagtttatctcttttttgacagagggagtacacatttatattaggtgtagtagcaacgaattttcacccttatatctcatctcttcaatggtctatattcatttagaggtacactaaaaaaaatccatttaacaatggactcagttgttgtttccaagtgtgaattaagttacgtctaaccaacaaagacacacacgtgttgaatgtggtgttcaatgtaaagtaatttcttctacaggatgtactatgagttaacattttaagtagaagtagaacattaattcttacaaaataaattggatgttgatcttcttattataactggagtgcaaccttatctgtgtgctactcccgcgccgcctcttcccccaccgcatctgctgccgccgctgccttccccggtcgttccaagccatggcatcgacggcctccctcaacgccaagtcgcatcaatgccagtgctcgtttcttgaggtgagcgcattccttctcgttcttaattgaaccgaaaataggcatcaagatatataagttgctgcactaatctgcaagtttctgtcagaaaacatagcaatgcatttagagcttgattttagttagcaacttagcattatatgtgaaaatgcatttagagcttgagtttaattagcaacttagcattatatgtgaaaaaaattagcagttatataagatatatgattgtaaaaactacagcggctgccggtagggatttttggtggtaagtattgatttgacaattttggatttttggggctgatttttagtaattagattcaggttttaccaaattattcaggtctcctacatcactgctcactcctatgcatcctatgcggctgttgctactgtctgccaagatgagttgaatcatctcgctgcacttggtggtgatgatgctatcagatgctatctccatattttaatgtatgatactgttgactttttatccaacgtttgactattcgtcttattcaaaaaatttatgtaattatcatttattttattgtaacttgatttatcattaaacatttttttaagcatgacataaatattttcatatttgcacaaaatttttgaataaaacgaatagtcaaacgttcgtcaaaaaagtcaataacgtcatacattaaaatacggagggagtacatgccatggaccaccgttgtttcttgaaatcttcgttaattatatcagggtatccagagcaaagcacggttgaggtaaatacaatttcttggatcacagtttatctgaacaattaaccactcttgatgtacatgtcacatgttgaaaaggtttccagtgcgtattctgaacttatgttagcaaaaaagctactattttgccaccaccattttgatttatgtttagatagttaaactctgatatcatcatcctagagatgtacttgaggtgagcacttgccatctcgttcttaattgaacttaaaatatgcatcaagatgtgtacttgcagataacgatgccttagctgcacaaatatgcaagtttccttcagaaaacatacaagggcatttggagcttgaatttagtttgatatacgaaaaaatgttagcagttatctaagcttgaatttggtttttcttagttacgacagaagatgaacatagaaagatttgcatcgtcctaatatttgtttactactttactgcttccacctggtctattgcgttgtactagtaattaattttttcgaactctgacatagtgcagtgagaatgactctaaagaagcaaatgaagtaatagtaataggggaacttcttttgcgcatcaggaattagaagcaaatgaagtaatagatagacaacctcctgaggtagtgcgtaaaaatataaggtgtatataggtccttgctgtgccgttgaattcaacaactttttgttgtacgtgtaactaccacgtgaaaactacaatgatatgaagattataaagatgtgatgcaattatcgtttgtgcttcaaggttttcgttatagcagatttatattgaattattattttatatcacattatccagtgattcaaattgatgtacaatttttcccgttgcaacgcacggacgtccagctagtagtgactaactgtcgttcagataagaattgcatcatcatgaaagaaatagtatacagagctttcgaatgcagagcttttaatcgaaagctaaccgataagtctgcatcctgcaaaaacaggatgattaacagaagagaggtttattgaacaaatcctaagcagtggagtactccctccatcctataaaaaaccaacctaatactgaatgtgacatatactagtactacgaatctgaacatatctttgtccaaatttattataatagaatgttacatacagtcgtagattcaattttttcagtgggacagagggagtactctgctagtcagagtaggaggtttattgaacaaatcctaagcagtggagtactccctccgtctaaaaaaaaagacaaaccctgggtttccatgtccaatgtttgactgtccgtcttaaatgaaaattttttataattagtattttcattgttgttagatgataaaacatgattaatactttatgcatgacttgtctttttaatttttttcataactagcaatagtgcccgtgcgttgcaacgggaaaaacaccgtttgataatgtgacactttgaaaacctcaaatctgtaaaaatcaagtctaatttgatatattaacaaataggtagaaccgagtctaatttgatcaattagcataggatttaggatttagttttagatttatttttcgagcctacttaggagtttatccgacggactttaatttgaaaaatgtaagccacattgtttgatcaaatttgcttttggcctaggtcttcccaagccggtccaaacttgggctggcccatctttagcgagttgagtcaattcaacggcccgcaagctgagcagctaagtgcggcccacatatgcgggggcggtccgatgcacttccgcggcccattgggcgcagcgtaatcaacggcagcgacggcccgtcgctgggcgaatctgagccgtccgatctaatggacggctccaatcgtccccgcgccggatgaagcgccgactggggagaggggcaaaaccctagctcccaaatccctctctcctgatcccatttccctccggcgacgagcgagcggaacgacggctgtccggcaagttggtgcgcgcgtgcagtgacgaccgccgagcggctcctgcttcgctggctgggggagcgcacccgagggcggcgcaaaaccgtgccacgatgtcggcggtccggctaggtgggcgtgcaaacggcgacgagcgccaagtggcttggacctcgtcggcggtaggagcgacgccaagccgacgcttcccgtcttcggcaaaggatggtggacgggtgctctaggacagtgcgcgtgcagggaacccggcacgactgcgaggaggtgaaggtgcggtggtgccgcttcctgaaaagctccggtgagctcaggggcttcaaatccggtaagtaacccgaacccttagcttaattgatttggatttgactcctatggttcttacccaaaattagagttcttcgaatttagagaattttatcgggaaatttcaatctattttattctctcttttcgagttagggaagtttcaatatcgtttatcctcttttaattttggaaacttcaatctagtttatccctttgctcaatttcattttttttttttgctttggctggcgtttcattgtgcgggcagggacggagggcgccgctcgtcccctcggaaagattaagattaagataagataggattttcacggacgacggaagtaaattgaatcgaactttcttttatttgttttaatgtttttttcgccctttttttgttattacgaacaacggaaacgtttttaattttttaagtagtagagatagagaagatagatatatatagtaccgtgtcaaatataataggattcgacttttttttaccgcgtcacatgtaattctttttttttttggatcggacagatttgttttttatttttttcgctctttttttaccgcgtccacgcggataagtttttttgccggtctttttttcacctggttttttttatgcctgtttttttaggaatcggacatattccttttttatttcttttcgcccttttttttaccgcggaatcggattcgtttttcttttcccttttttccctttttttatcggacagatttggtttttctttttttttcgcctggtttttttcgctcgttttgttttggatcggacaggtttttttcacctggtttttttaacggacgatggaagcacctcttattgtagtatagatagagaagagatagggattttttcaaataagacggacggtccacgttagacacgaaatttttaagtagtagagatagagaagagatagagattttttcaaataagacggacggtcaaacgttggacacggaaaactagagtttgtctttttttattattattttggatggagggagtactctgctagtcagagtacagatgtgggtatgtagcgttcaccaaaactataacgttgcgacttatgcctgatgatgcgaagctcgtcgtcgtggccgcgcaccacctcgacgccggtgagcacggcgaaattcctttcatccgactcgaaatcgcagcagtattcggtgcaggtcccccggcgagagaccgtgtacagcttggcgacgcacagcttgctgtcgcctaggtggatgacgtgcgacgaatacacctcggtgaattcgccgaggtcgatggcgtgcgacgggcgcgccctgcgacgcgacggccctggcacggcgaattccctgcacccggggtgcgccggcggcggcggctccggctgctggacggtggaggaggacaggtcccacgcgccgaggacgccgtcgtccgcggcggagaggccgaaccagagaccgtgctcggggacgaactcggcgtggtcgctgaagggcagcgtccagtcgccggccttgctccaggtggctctcgccgtgtcgaaggagtaggtgccatgcctcatcgacgacagcaagatgtgcgagttgccgaccgccgcgtacgcgcaggtgtcgccgacgacgtgtttgtagtccgcggcgtgcacgtacggtggcggcggcatggggcgccagaggcaatcgtccaactcgggcttcttacaacggacgagcgcctcgaaagaacgctcggtgacgccgtcggggtgaggtgacaccgccatgacgtacagatccttgccgacggcgagcgacagtgtccagagcttgggcgtgaccatggtgggcaacgcgccgacgctgtgcttggcggggtcgtagatgattgtgcggccagcctggtcgacggcgattatcttgtcgtcattcctgcgcataatctccatccacgtgatgttgtccgtccccgaattgctgctgccggggggaaagaagttgatgtcggttggaggcaggcgcacgtcctccacggccgccggcgacgccgccgccgccgcccggtctgcatagaagagacttgatgggtcgattcggcgtagcctctggaaggaagagtctacagcccggaaatcaaccatgtagaggaatcgccggtttttcgtcttcttcactttcttctcttccaagatgccggagcgattattgggatttgtccccaatctgctaatggggttaacatttgctaacgaggaggttggggttgagtagatgcggtcggcgagcgcggcggcgcgacggcagctactggcacctaggcgatacatgttgtggatggatctggaggagaaagatgagctagcgggtgtggcggcggcgcaggggatttggaagagaagcgcaaggggatgtctcgccgtcgtcgacctgtggtggagaaggaacggatctatggtttttctctttttctttcttacgaatttttttcgtttttagattttttttttaatatttacagaaataatctatcgaccaaaaaaattgcagaaatagcctctgccgccctaatgatgggcggcaagctgacgtggcagacggtgggtcgaccgcgccgtctgccgccgtcggccaaaattgcgggctaattgccattttggccgcccataaagagcttgcggccgtacttttttcatctgggtcccttgccgccctctatgccgcggcggcaagggacccaaatgaaaaagtacggccaaaagatttttctatgttatgttaataataaataaagaagtatttattggtaaaacttgttaatattgttataaaaatgtattgaagttggttgttgcgcaatttcatatgttaagtgaggtattattttgtaccttattcgacgtattagtactcggataatttatataggcctatcgcagtctgggtcatagaaacattatatggacttaaacaaggagaattatgtaacatgaagaaatagtagtacaatttgaatatgatacaactatttgcattgcggttacatagatgatattagattcgaactaggagggaggtagtgcaatagttgaacacaacaacgatgtagtaatgggacaaggaagcatgacagtagaaatttcaatatgccaagttgtccgataatagctaacccctacgtgaggatccctctcctctctcaaaccgcgctttagtaaccctgtattgctctggtagtttaagctgcacaacacggctaggtggagttagaatccttctggtgtctatccattctctgtattaacatctccttggtggttcctgggaggaaagaatagatgtaaagcaagcaaagttagtaaatgttgtgagaaaataaggattcatgtaatcaaaatattcttaccatgaaatcgtcgtcaagaatatttggacaaacaaagaaccttcgacccaatgttgtaggatttatggaacgaagaacctgacaacgatcaccacacctgcatcttggacgggcttcccatggagggagtgccgtagttagcacccgccagtcgctctgttgttcacgacattgtcgttcataagtcgcttttctctgtaagtattgctcagtactttcggatgcgaaataccagcgaccttcttataaacaagtggttaggtcgagaacgggattttctgtatcgacccactcgatgtatgcgcaagccgtagtgcgggtctgccgaatagagtagtgttacgaagaataaagcgattgcccatacggaatgaataagcatatgcagataataaaatacctcacggtcatagttagggcacctaaaaaagcgccttcctcgaatatcaggattcctcgaagccattagttggcatcgatcaccgcataggcagagaggacgctggcaccaaggtggtagtaggtatacacaaggatcgctacgctagtttggatcctcaacacctcggcgtctagccattgacgaaagccggtcggatttgtaatgaagcaagtggggaagagagtactgaatgtgactgagttttgaaagattgtgaggcctcacacgttaaggcgacttatataggcgcaaaaaatcgagtgatacccctgacatgtgaacgtggtggggtatggtgggtatgcctgattggcgccgaaagatacatgcatgatcggcgccgaaagttacattggtcgtatgcgccaaatggcgggcaaatactcgtatcacacgcgaataaaggaggctgcatcggtgcggcagaaagtagtcgtgcatgcgccgaaaggtatcgtgcatgcgccgaaaggtatcgtgcacatataacaacaacgtagtcattacacaagcatacagtactggaaagtgaagcaagtaaacaaagagaagactgctctactggccctgccccgcaccacgaccacgcctggtcctccgggcctgtgctcgcacgtggtcctgggagtaggtgaaacgatccggtggcacagcacgggtagcacgagtgtcccgcggaggagtggcctgcgcatggtcctgcgtctgcaccggcggtgcgcctcccagctgtgaggggccgatgacgtcctttgtcgaacctgaagcgaagtcgaagtcagtgatgtcgaagaggaaggtggaaggcaacaagtggtccgacgaggtcccagcatggtccagtggtggaccctgactcgacgtgccggctgcctgtgacgaagtcccggtgtactgccagaactgcgctgagtgcgaggttgacacagctgcctgagacgctgaccctgcagcctgggagaagtgggcggcctgcgtcatagcgaactgggcgaaacctacacatcgacaacgggacccttgtaagctaagacataaaatgtatgtaaattgattgtcgaagtaatgttgtttttttaagtacctgtggggggcacaacagaaggcctagccgaggaaggcggggtgctgaacggtgcacgaaaccctgaagcaatcgacaagtgaaacggctcacttatatgtgcgaggcatgtacagaaatagtaataaaaatacttacctccgtgcggagggggagtcggcctaggaacgtgcgcagctggacggggaccagtcggtacgggtggccgctgtacagctgcgtctgcccgagcaacgtcgtctgcacgacaggtgagaactcggagaatcgagcgcatcgactccaccatccgcgtatacgtcgtcaggtgctcctctacgggtaccgaaatccccgcgcctaaacgttggatcgtcgttgaaccgtcaacgacgatcccggttgatgtcgtcgacctgcatggttaatttgttcgtaaatattcgtaaaatttgacgaagagaaagacatgaaaacataaaggaatggtgcgatgcagggtactcacaacatgagcgaagtcctggtcgcggtgcctggcatagaggtctctagtgctcgcaacgtggggctgctgctccaagggagcgaaggtgaccctagtacaggtgcgtggctggtaccagcgtaggtaggcctggtacgactcctcagtgtgtggctctccctcgtggtccacgacctcctcggttgcgagcaaccagtcctcaacaaaagtcgccaacttggcgggccagtcgccagctgagtgttgacccttgcgcgagtacctgcgaattaatgtttaatattagtgtgaaacgacagatgttacaaattattgtgaacaggcagattttaatgcaacaacggaaagcgtagtgcaagaagcaaccggtgaacagcagctgggacggtggtcggaaacggtactggaaagggctgacggaagccgaactgccgcatcacgcggaaaggggcgtgaggctcaacgcagatgtcgaagaccatcggaaccgtagtcatccagtacgcctggtccctggtgcagagtgtggacagacccaacggcgcacgagcctgggtagccatggcactgtagggctcccacacgacgtcagtcggcagaaggcggtcgaactccataacaaactcaggatacgaccgcctaacctggacgtgggcccatcggcgctgcaatacgagacgatcgatgtgatgtacaatgaacttagcaattaacttaacaatacgataagatcgatgcaacgtacctgacgacggcaccacagagtacccatcgtagggtagtcgacctctggtcgctcctcgtacagtgactcctcgtacgcgtgctggtccacctcagggcggccgatcgcaatcctctcagctgcccagatagaaagaaagagagggcacccaccaaaggtcgcgttgggatccgtcttcgtgcaagactcacaaagtgcacggtacagagccgccaacaacgtggaaccccagctccactgaggcacctcgcctaccgcggcgtcggcgatgctcctggcgtagtgcacgagtcccttgtcgaccgcgtgcccgtgaccgccacagaacatcacccagccaaaaagccagagcaagtacgcctccaaacatcggctgtaggagtactcgtcggcctcggcctgtagctgctcaacctgcaagccgtcgataaaatgttaggcaccttaactgcggactaaatatgtaatacgattgtcatttcggtacaaaaacactcacggtgaactgaagcagccacctcttcgtaggtccggtgttgcggtggtgtgccaacggctcgagcgggaggtacggtgcgcgctgtactagtgcgaaacatgccgtcagatcgtcctgccagtccacagccgtggtcactggcccaacagcgtctcccgcgagcggtagccccaacaagtacgatacgtcctgtagggtatgggctacctcaccgcacgacaagtgaaaagtgtgcgtctttggcctccatcgatcgaccaaagctgctaggagggacctgtccacagtccatcgtctggccgggtccgcgtcgccggccgcagcctccaccagccgacacatcggtaggaggccggcctcacgtagcctgcaataacaaattaatatgtcattataaaaaatattacagtgcaactaacttatagtaaaacactgttcgtacctctcgacaaaggagtggtgaaccgtgagtagctcactgcacgtccgtgcccggaacgtcccaagctgagccccctgcaccgcagtaaggtgagaccggtgtcggtgatctatcgccgggtccaacaactgaggtgtatcctgacgtgccatctctgaaaaatatagtgtttcgtgttagaacaattcaaaaaatagtaatgtaaaacaaaagataacttgcaaaattatgaaatagtaataaaatcatgagattaattatgtacaacaagagtacaggctatttaaatatagcaaacgttactaatggtacataacgatgacgtgcaatttaacatatatgtagagttcaataatataatataacattacgtgtcgaagtccgacatacatcagcatacctaaagacgttaggcgccttagtccgacgttacatcacgagacctaaagacatgacatgccgaagtctgacattacacgacgaaacataaacacatcgataagttcgaaacgaattacaagcaaatccacatgccgacatagaacataagaactacaccacgtagccagacgtggcacgacgacgcctaggacgtggtcgagtggaggtagtgccttcacccgtagggcgagctccatctgctgctgatcctgatagtcctgcctccgctgcacttggtttctccttgtctttaggacaatgcttgtaggtgtgcccatgttcatcgcatttgctgcaacgcttcaccctgccagcctccgactcgtccatatcgttgcggatgcgacgagtcctcctccttccagccttgcctcggagcttcgatgggtcaggaatattgagtacttcatcgttagtctctgtgaactccccagctatgccgaacccataaatctcgccgctccatgtatgatatattgcttgcttactgaagtactgtgacacatatactgcatctggtatgccacactccgctgcggcagcaatgacatgggtgcatggcctgtggagcagcttcggctttgcacaagagcaatggcatgtgccgtcggctttgagaacacactcctgcttcactctcttgcggtagatacccctgcctgccttatcttgacatagtatctcaaacctgtgctgttgggtaccttgcactagagctcgatgtttcatggcctttttacgcaactcctctagctttttctgcatgaaagctccaaacaaaatgctgttgttcggcatagagggaagaactgcctggaaccgatccctaaaatacctgcatgtcccatgtaaaatgaactccactatgccaactagtggcagtccacggacaccgcgcatcacccagttgtaaacttctgccaaatttgttgtcattattccatatctagcaccacctgtgtcatacgccttggcccatttctcttttggttcatgcagaatccactgagaaaatttccgaatctccaatccagttcttctaaccaatgttggactatccgttgggagaggtccaagagcttgaggagggtcagcaacggcggtcgatggagccgttgcacgctgatcactgcatttggctgtcaactcatctaatctcttccaaagctcattgaattttttctcctggttctgattgcacagcctcttgaacatgttcatgagctccttgttcttgaattgcttgaagaaattagctcccatatgacgcatgcaccacctactctgtacatcttcccaaacaccggggtatcctcgttccatactcccaaactgcaactctcctatcgctcgcagaatgccagcgtgcctatcatgtatcaggcatacatttggcctcataccaacaacttttgttttaaccaatttcaggaaccagtaccagctgtcggtattctcactctcaacaaaagcaaatgccaagggcaatacctgattgttcccatctacccctattgctgttagtatctggccccgatactttcctgtcaagaatgtcccatcaatgcagagaacaggacgacagttcacgaatgccatcttgcatgcatgtagagctaagaacgccctttgcagcacactcttgccaagatgttcaattgaggggaatttcttcacttcgtaagagctcccagggtttctttcctcgataacaccaagcaggcgtggcaaattgtcatacgaggcttcgcaagttccaaatctcatctctattattttgtttggccctccaggccttggcatagctaatagtatatttgtatgtctcttcaatgtgtcggattattgaccttggttcatatgtgagattatcgatgacatgcacatacatctcagatgcaacaaatgcacatgtaatgttcctgtggtatttctgaacaccaggtagaaaacatgtatgcttcgtaacaactgacactgtccaataatccttccatttccccttatacgcgtgcactctccagggacaaccatctttttccttaacacaccgaacttcatattgcgaccggttcgacttggcaacccaaaactctctatgaagtgacactgcaaaatgttttaccgcctccttcatatcttctgctctactataaatcgctccctgaataacctcattttctttgtactcccatctcacactatcctcttcagagacgatcagcccagaaaaatcctcactagcccattctgctggattaatatccgtcttatcatctgacgaatcaccttcctctacacgctcgttgtcagaatcctccctctccatttcatccacaatggcaccgacagtctccccctcgtcagccactccacctggttgaatgcccactggagctactacgcccccgtcctctcgtgcgttgacctcctccacagaagtctcgtttacttcagcacttggtccctcgccatcatccatgttcatctgaataatccttccatttccccttatacgcgtgcactctccagggacaaccatctttttccttaacacaccgaacttcatattgcgaccggttcgacttggcaacccaaaactctctatgaagtgacactgcaaaatgttttaccgcctccttcatatcttgtgctctactataaatcgctccctgaataacctcattttatttgtactcccatctcacactatcctcttcagagacgatcagcccagaaaaatcctcactagcccat

SEQ ID NO: 4416 - DNA, 7239 bp, Oryza sativa
  unsure (1)..(7239): unsure at all n locations
aaaccaatttatccgagtttaaatcctagatttgtcacgggtgcacacgtttacaacttattattctttcagtaagaagcgacgtactcgttgacggcgagacgtcacttcgtcaatctcaagatatatcggtccagccttctgaaggaatggaggtgcttatagaggcatggtgtgtgtgcgtgtgtgcgtttaaaaggaatgagtgtgcgtggggtgtctacatttattttgtgtttctaacaaaaaaagttggtgcatagaataaacatttggtctacttatatttgtgacccgagggatcaacccttatttgacattaggcgagaatttgggcccctgggtgcaaatattcagttggtctgtcatgcctatgacaggtgggtcccgcagcattcgttgtcgtgtcggcaagtgacgtggcaggtgcaggtctggtgccacacacggcacatgcccggaaatatacggcgtgattcattccgctcaaagtcattcctaccagtaccccgcgcagggtcgcgcaagtatcaaccgaatcgtcaaatggtccaatggcccaccgccacgtgggccggcctggttggtttctactgctaccgagagagatccagggggacattgactgtggatttccacgtggatttgcagtcttgcagagggtgcggcatcatggtcatccatcaatactgtagcagtgtagttgcacacccaacagagcagccattgatgcttgtgattgatgctctaccagcgtttctaaacagtttagggtggggttaccgtggtatataccatagttttaaaaactgagaaaattatcgcacgtgatagccgcgatagtcacacgattttgtaaatcctcttttactcccttcagatgagacttgagagtgaagttgatggtgttgaatcactaaattggtgaggttatctgttgcttgcaagatacagattaactaactaagcactagctctagaatccttttattctattcttcattttattttgttgttttactttacatttgtttgtatgaactactcctaacaaacaaagcacatgctctagaatccttttatttggtttttgttttacttttacctaagtggagtatgtgcatatctctactcttcatgtccatatacgagcaattattaaagttctgataaagaaaatggttgttgaagtcttaaatataagaaaatggctttgtaccatgtttaataaattggaagcacgctaggatagacaacttttgcagtgtactgtttcacaatgaaaaaaaaaagagaaaaaaggagtctttacgaaatagagtcaggacacagaactttgttaatgtgttagtagtattacatacacaatgaaaaaagaagaaaagagtcttcataaagaaaatccttttcacgcaatgattcaagtggcatgagaatcatgattttaaagttgtctgatttatataacaaaacttttcctcaaagttagctatatgatcttctttccaattatatcgtgattaaggagtacatttaataactattatgtaggtttctaagatagagcatacatgcttttgactttattacattatagtaattacttctcctttggggatatctattcgggggttatgtcgatggtcgctagtaatgctagctatatttttccctaaagaaaggcagtgctcctattttctcgcgtggggatttaatctgttttgcacaattgcaacattattaatatcatcataatatagaaattgaaatgtacatgatgcaatatttacagttgtatacataaaaacgattatcaatgctaaatactagtagtacaatataacgaacaaccaaccccgccaatgtttcactagcactcctatgtcattataaaaaaatgtattattagagtgtgttgagagaaggagaaatgagaaaataaaaaaatattatttttaaaagcttaaaaaaatattaatatgatttttaaagcaactttaccgtagttttttcttttaaaaaaattgcttcaacttcaaacgagagagcagtaatcaaacactcactaagaaaaacaaaatctacataattgtgtaaatcgccctgtcctccctgggacttgatttccttcaaaggtactcaggttttcgtctacggtggttgaggtctcactctccaaccgaccaccggccattccaatttcctagctagcacagtagctccaagtccttttccagccaaaccgctcctagaaaacgagaggtttccggacgctctcaccgccggtggccatcacactcgctgacaaaaccgaaggttggtacagtggccgtaacgctctcgctaatcaccatccactgctcatgctctctgctcttctcttttcccagcattgggtgttaggttacgcgcacatatcactgtatatataataccacactcatatcctctcggatgtgtcccctaacacatattctacgagacgaaattcagcgactcatcactggtctcattaaaatcttattgaaagtctacctgcatgtgcgtaatatacatgtacattaggatttaaatcctggtgggtggagtcatgtactcatgactctaagcaccatgtcacttatacttcccctaattgtttttttggtgtgatggtgagaaagtagagaaaaaaaaagaggtcgctttagcaattttggctgtttattttactactcttaacttttccttggatctatccatggatcgaaaggaaaggtctgaaaaaactctgaattctgatcatgagatgagatgacacgagaggagaggcagacgctgacatggtgacgtgcatagctcaggctcagattctgggatctttgagtggacccacgaggccataatatggcagtgccggcccaagttgggagttggtcatcgtctaaatgggccgaaactggatagttacctgaagactgcaccaattcatttctgcccagggagctccttttttttcctttttgaaaagaaaggagcttatctttgtttcttcagaaattcagatagttcagcttcagatggaacacttcttgttactacgaagcagcgaagagatgtcgagattattgccattttagcggacagtacatgaactgaattcaaaccaagctgacaaattgaggacacttttattcatcgatttgaaataggacagacggatggccgacgatactacagaaaaaaagacagtgagatttatcatcatctcaactaattgactgacacgtgtcgaaatggcaacaacacatattccctccgtccaaaaaaaaaaagtaaaccctgaatttctgtgccaacatttgactgtctgtcttatatgaaatttttttataattagtattttcattgttattagatgataaaacatgattaatattttatgcgtgacttatctttttaatttttttcataattttttcaaataagacggacagtcaaacattggacacggaaaccagggtttgtctttttttttttaacggagggagtaaccctgaacgtgtcgtgtctgattattttgtgcgtgcattcacgctctgctcgtacgattcactcactggctgccgatgctgaagtcgaagttgccgcacctggtcatggtgccgagtagcaagccgctgaacccgaactgccacttctccaggtcgaacaccaccaggttgtcctccatctgatgcccgccgatgatcaccgccggcgcggccgcggcgcccatgtcgacgaacgcgaagcacgccgcctcctggctcacctccaccacggcgctggcgccgacgatcgtccagttctggccgccggccagcatcaggtcgacgctcgccgtgtacgggccgatgcgcgtcggcggcagcgccgacttctggtagcacaggtcgaacggccccgccgccggcgcgcgcgcgagcccggccgtggccgccgcgaacgcgtcgcgcaccggccggtagatgtcggagcgcagcgcggtgtacggcgtcgccgtgctcaccgcgacgccgcctgtgccttggcgagcgctgagcgacagggcgcccggggggagggggacttggacgctgttcacggcgacgccgatgacgccgatgtagtaggcggtgttcttggggttcttgagcaatggggtgtacctgagacggtcgctgacctgctgcggcggcgcggcttggagccagaacgggccgccgccgaagatggccgcgccgacatcaccggcggtggggaggcacagtgcgaacttcttctccaccttcagctgcccggcgacctgaagcggcagcgacaatggcgcccgggagaggccagcgacgccggcggcgccggcggggagcgagcccagcagcggctgcggcgcgcacgacgcgacggcggagagccacacctggaacagcgggttcttgccgtcggtggcgttcgccgacagctgcaccgtggtaaggtcgccgtacccgcactggccactcgccgggttgtacgcggtggcggaacacgcgcagcgcccgccgtcgccgccgttgctgccggcggcggtgtacgggcagttggggcggtggttccggttggcgacggcgcacacgccggcgccgcacgggatcgtccggtgcttccccgggcacgtggaccagacgagcgggccggcgaggtcgaggacgagctgcccgccgccgttcttgacggaggcggtgtagagcgacgtcgaggggtccttggcgaggcgggtcagtatgggcttggaaggtggccggtgctggccatcgccggcggcgagcgcgcacagcagcggcgccgcgagcagcgagagcacgagcgcgatcttgtagctggacgacatggccgagtatgtttaatttgtgggtgacttagcatgcgtctgtatgcgtatttatagtggtttgtctacgtggacagtagaccagcagggtttacataaccacggttatcatgtgcaataaccgtctcagtttttgaaaccaccgtatatatcgtgataaccgtcaaacccgattatcatgtacagtaactttatcagtttttgaaaccacagtatacatcacgataaccatcaaacctggttatcacgtgcagtaaccttctcagtttttgaaaccacagtatacatcacgataacagtcaaactgtgaggcggtgctaacttcatgtaaaacgatttggtaaacccttgtaatcactggattttcttttatttttcgaggatattggaacttcaactaggcgtgtatatgaagtctacgaagtacatctgcacgtgctgtttgtgctaattagctcagacaattacctcgtggctagtatcatatgggttttcataatgctaaccttgaggtttgcgtacgccacttgaacgaattcaccgatatctgggaaggatatgatattattcttgttagtcgtgacactcaccagcttcgattctcagcacctctcactagctagtcacgtttgtcacgaactcgcaattcagtattatccatggaccatggaccgttggatcaagcttctacggtccagatcgtgtgaacggttggcggtgtgctggtgttgggttgattaaaggtctatttgtttcagctccaacttttaaatctagatacagaagttgaatctgaaataaagttatgaagcatgctaaactcagctctactttttttttttcattttgtgagagctacattcagttctactatcatttaaggtgaaattgaaactatttggctggctatagctccagctgtactagaccggacctaattcgtgagcctgggctttaactcggtgtaaaatgtgggtcctgtgtaatataatttgggcatgtcctgaccgttcgatcaaatttcagcggtccagattgcttcccgcggaggaaaacgttcatcctgatgatgtgctgatggaacgagagattgggaaaaaaaattaacgaagagagatggaaaaatgaaaaggacaaaatgaaaatataccgccaatggttcggagactaaaactccgaccccatttttcggctgggaaaacgtcgatcctcttttttttttggaacggttcggcgatcctcattccgcgctcgtctgatctcaatgcaatatgtgtgagagtgtcatatggcaatcacaggaaactattttaaacactcgggtggatgtccacccggtttttttgcatgtcatctaaatggttacgaaaaattttcaaaaaattgacataataggttaatatgtaatatatcactttacaaacatgcaagttcaatgcgacttctacaanttgtaacaaaaataacaaatcaaactctaattagtatacgtatattcacagtcaaatttgttatttttgttataacttgtagaagtcgaatttgaacttgcatgtttgtgaagtgatatattacatattaacctatcttgtgaatttttttagaattttttcataatcatttaggtggcatgcaagaaacgggtggacgtctatccgagatattagaatccatcatcggcaatcacaagcttgatgctcaagtatatatggattttgaattgttcttcagagagatgtttgtagttagctaagctacatcgtcatattagattagatcagatcatccgagcaatgctcgcagaagaaaacttgctacggttgtgacatgaacatcaggaacaatatattactacactttcatatgacaaaactactcaagaaaatgctcagggggtacaaaaactgtctcaacgatgcatcaaagtatcaaacatgcaaaagactgaaggaatctgccgtcgcaaggatctgtttatgaagtgccttctaagctgaatccggagcccgagcattcaaggtgtgcattccattcctcacacatcacactgcgaaatttttttgacgggtatcacactgcaaaattcagtagtaagggttgcatttaaatgttaggcaaaggtgtcatatgaattttgcaaaataaacaaaataaacagttttttttcagagaagaggcattgtcagatagaacggtctaaatcctgtacaaattgagaaaaactcttgcgtcccaaacaagttcgtcaaaacctcggaaactgttttaaaaaatagtcaaacagtcataaaaatgcatgctatctaaatagacataaaaaatatgaaaaaacaccgtgaagatagattaatatgtgatgtatcactaca

SEQ ID NO: 4417 - DNA, 2267 bp, Oryza sativa
ttagatttataccaggcttcatcccaaccattacagcctatatgttgtatgaagaagggcgaacatgcagattgttgaactgacgcgtggaggacaagaatgaccggtctgacactggtcatgtcgtcggcagacagccacgttcccacgacgcgcctgccttcggcagaagtggaggtaggtgtgtgccgtcccgtcagaaggatgttcggaggacaaccgtgcaaatctccgtccatttatgaagagaagaaaagtccagtttggaaagagaggggtgcatgtggtatccccttgaagtataaaaggaggaccttgcccatagggaaagggggatgatcttttccagattcggaacttagaacaagtgagaggttggctcacactttgtagctccctcatacacagatccaccaaaacacaggagtagggtattacgcttctcagcggcccgaacctgtatacatcgcccgtgtctcgcgtttcttcctggctcgcgatctttccacataccgagagagcttgagatttcaccctaagcccccggccgaactggcaaaggggggcctgcgcggtctcccggtgaggagccacgagctccgtcaggcggatattcaaaattggatatggaaacttatggttacacttataatgagacggatggagtatttgattaggggtatgtttagttgctgaaaaaagttgaaagtttgaagaaagttgggagtttggaaaaaaagttagaagtttatatgtgtatgaaaattttttatgtgatatgatgtgatggaaagttggtaatagaggggaaactaaccacggtctaggttggtttttacagaggcggtacttcatacatcctactccagctaactccatccagctggggtgtgtgtgtgagagagatcagacaaggacaaggacaagtcacagagagagacagacatgtactgggagtttgtgacgtggggcggggtttgaaatgtcaccggccactcggtcggtcatcacgacgacgtacgactcggtcggtcgccgatgagagcttcaccggcctgttccggcgatcgatcgagctatatataaatgatggcccatgtgtgtacatccggatttgatcgaggtgagacagtgtttggctaatgagatagagaaatgattttccatccatcaaaagacatcttcaaatcctaaccattcattctccatattccatttaattctaacctttcatttatttcctaatcctaatcccactccccatttcccattatccaaacacaccggtattatgcatgattagctatgaccgagttcgatcgattatatatatattgcatcatcctcctgcacactacgtatgtatatatatatatatctcagttatttctcattttctgtataaacattcactcctatatgaaaatatccttatatatgtgatgacatgccatcaaaaggcacaaccaatggctgttactaaatagttcttgcatatatatgatctgttatatcatatccatcgtcactacgtaccagactagaaattatttgaagtttaacactatctcataaattattttgttgcaaatatgtacccacctcctactcgattttattgcaaaaaccacccaacacacatgtgcttaaccgaatcaatatgttttcataaattaagagacgtccgtataatctttatcaaaattaagtcattatttgtcaggacgggtatgctaacaatacaatattacttcaatttcgtaacaacgtgtgaggtatcaccatgagattagctggattgtaactacagagtatacaccatagtacagatgctagccagcgagagtggtgggggcgcgtgcgggacgcacgtgacgaaggcactgttgctcgccggggagaggcagcatcgatcggctcaaggccctgatctgatggatggatggatccccccaagatacagctaaccacatgcttaatttctccatcaacagcaactttccctgttacaaatagtactacgtaccagatctaccacaaacacatcacacattcacacattgatcgatttgcatattactattagtagctagctagtacattattgattattgctagttatagctagaatgctagtagtatatacccccagctagctaggtgattaaacaactaaaagaatgtcagtaatagtgcacttatcaatcaatcaattagtggatccatgtgtcataaaatacctgaaagattgattataatcaatcaat

SEQ ID NO: 4418 - DNA, 25075 bp, Oryza sativa
tgaccatttattttatttgaaaaattagtgcaaatataaaaaaagataagtcatatgtaaaatacttttgataataaagcaattgacaaacaaaataaataataattccaaaattttttgaataggacgaatgatcaaacattgataaataaaaactcaaaaagacaagtaatatgggacgcaggtagtatgttttagcccctctctcccaaacacccccttagttactgtggtgcatggcctagtctagcattaggcaagatactaagcacttgattgagcagtattgatgagactgggatcgctgtatatgtgtagttgggcttagaactttattactcgggcctagggttaattagtctgtttgggttgacatggttacataattggctctgctttcaactaattttacaaatttaagagttgaaaaagggaccacttctatttaagaatttctagggcagggctttcaactgaaaactgaacaagtttagggcccttttaattgcatgattgaaaaaaacgtaggaataggaaaatgcatgactttgatatgaatgtaagtgtaaaacagagtattgcaaaacacaggaataactgtttgattgaaccgtaggaaaaacacagaaattagagaagagataaaaactcaatggaaagtttatatgaggtagaaccttatgttagtttttctccaaaacttggcattaggtatttcataggtttctatagaatttatttatttgattcaaagggctatatagaaaaaattcctataggaatgaaattctctaaaattcatatgagaccttgtttagatcccaaaaaattttggccaaaaacatcacatcaaatgtttagacacatacacggggcattaaatgtgaaaaaaaaccaattgcacagtttgcatgtaaattgcgagacgaatcttttgagcataattacgtcatgatttgacaatgtgatgctacaataaacatttgctaatgactgattaattaggcttaataaattcgtctcgcagtttataggcggaatctataatttgttttgttactagtctacgtttaatacttcaaatgtgtgtccatatacttaaaaactttacccccgaagaactaaacacaccctgaatttcctttgaatcaaaatgggcttaacctgaaactgaccgaaattaatccttctgctgggctttgaaacagctcccagctgggctgaaattgccgtagcccaaatgggcccaaacccttgttgaatgggctcgaacttttgggccgtcgaggcctatgcttctgagttctgaagtttctgaaccgcgcaatcaatcgaaccttctgaagcctgaaaccaacgatgcggtcgcatattcgcattgccgcagctaacgcctagcgccggcggcggactggcggtggatgctacgccggactccccgactgctcgccgccgtgaaccccgccaccgcggttcgctccacagccgcgctcgtccagatcgcctcccctctcgaccccttcctcctccaccaactcacagctcgctttcaccatgcaccggcggatgcccaccacctgctcgacgaaacgccgcgcagagccagctccatcgtgcgcgcgctcggcgcatgcaggggcgcgtcacgcgaggaagcggacggcgtcgcggccctccactgcgcggctctcaagtcgggggccgtgctggatccgcccgtgcgcacgtccgtcatcacggcctactcccgggtgcgcgacgtgtgctccgctctgcaggtgttcgacgaggccgctgcaccggacttgatcctgtggaatgccgcgatcagtgctttgacgttgaactgccgttatggcgatgctgtggtccttttccggtggatggtggacgtgcttggggtgattgattcgacgtcaatggtcattatgctgtcgggggcgtcccgtgcaaggagcttggagcatgggattgcctttcatggaatggcactgaagagatgcctagacactgatctgagcctttggaatactctcatggacatgtatgcaaagtgtggggatttttactcttcggaggttgtgtttcagaggatgccatatagggacactacatcatggaattctatggtaagtggaagcttatttaatggacttgctgagatttcagcatattacttcaaggaaatggtccgttccagttttcaggcagatgaggtgagcctgtcttgtgtcctttcagcttgctctcatctcaaggacctgttctcctttggggagtctgtccatagctctgtgatcaaactcggttacgaagacactaccagttcggtggcaaattccctgataacattctattatgagcttgggtttccagaggctgcagaggaggtatttctaagcacttccaacaaaaatttggtaacatggaatgctatgatcaaggggctggtagagaatgatagagttaatgaagccatgtgtatgttccaagaaatgagatcaaagaaccagccagatgttgccactttagtgactataatttcagcttgtggtgatcatggcctacttcctgaagggaaagaagtccatggatacataataaaaaaaggacatatttacgaggagtgttctgtaggaaatagcttacttgatttgtatatgaaatgcaatgacccatctacagcacgcattttgttcaggacaatgccaatgagagacctgatctcatggaacacaatgatttctggttactcaagaaacgattcacttggagaagaggctaaagctatgttcaaaggactactatctgaaggcctaagctgcaccttgagcactgtggtagctgttataccttcatgtttttgtccacaagaccttaactttggcaagtctgttcactctttcatcctgaagtatgggtttctgactggagtttcagctgctaactctctgatacacatgtatatatgctgtggtgactctctggccgccttttcactgctggaaagcataactcccatatcagatattatttcatggaatacagcaattgtgggctgtgtacaaaatggactctacggagatgcgttagaagcctttcagtttatgcattcaacgttaacactaaatcctgatagcattacattagtcagtgttttatcagtatgtggaaacctgaaactgcagtcccttgggaagtccatccactgcatggcgctaaagcgcttgattgaattcaatttaagggtaaagaatgccctgcttaccatgtacttccgatttggagatactgaaagtgctgagttaattttctctagtctcgttggtagaaatctgtgctcctggaattgcatgatctctggttttgcacagaataacgaaggcttgagggcatttcagttctacaagaagatggaggattttgaacccaatgaaatatctattgtcggcattatctgtgcttgcactcaacttggggatcttaggcaaggaaagaacattcatgggcatgtggtcaggtttggtctgcaaactaacgtttttatttcagcatcacttgttgatatgtatagtaagtgcggaagactggacatttcgatcagagtatttgaatcttctgctgaaaaatcgattgcttgctggaattccatgatatcagcttttggattccatgggcttgggttgaaatcgattgaaattttctggaagatgaataattctggagtgaaagctacaagaagtacttttattgctctgttgtcagcttgcagtcactctggacttactgatgaaggattgaagtactaccatcttatgatagaacattttgggattatcccaaccccagaacaccatgtctgtgttgtagacatgcttgggcgtgctggtcggctgcaggaagcacataagtttgtggagagtttaccatcgaaacaagcacatggagtctggggtgcgctgttaagtgcttgcagcaagaaatctgaactgaagatgtgtgaatccgttgccaagcatttgctctgtctggagcctgaaaatagtggatattatgtgaccatgtctaacctgtatgcgtatcaagacatgtggagtggcgcagtgcaagtcagggacattttgcaagataaaggattgatgaagccccgtggccgcagcatcatcggttaaactgtaagttcaatcaccacagaagctatatatatgtattataggcacaggtcgaaatccccattaatgtgtgaaatgtttttttttctcaagaccccagatacttcttgtttcatgctcgatagaacatggtacaagtattgaatatatgattccgctacagttttttttttcatgatcattttttagccatgcatatatattaactgctgctaaccatgtgtaatttcttctattccttgcaagtcacaaatctaaaaatgtattaagaaaaatgtggagaagggtatacatgcaaatactaaattccatagggatggtataaaaaagtagttataagaggggaataggcaccagatgagcagaagcatggatggatggatggctctgtttgagacacgccaccacccaatcgctctctgcactcccctccccctctgcaccactcaaaccccgacctccctctgcatttcacccctcctctccttccttcctccttggcgctcatccaccaccacctcctccaagagccaccaaacggcagcaggatggccgctgtgatgaaagctctcgccgtcgcctcgccgatctcggcacgagcacagccccgacgatgccccgcaggtatggctctctgtgaagctgcattttaatttcttcgaagtagttattatattcctgggctttgttcttgctttgataggtcagaattgattgtttgaagttatgtttgttttgttgcatcatgcttgttatactttgctaagaatgtaattttccttggattaacatgatataaagctaagttgtttttcttaatgtaatatacctctgtctactgagcacatagctagttagccacatattatttgatcactaaactgtggttcaaggtttcaggccttggatgctcagaaaatggactgtactctcaactctgtagtcgtagagctacacagattacttggcttatatctcacattcatagtagttgacttatctgacgaacttttcttctctgaatgaaagctatgtggaaagaaaaaaacatatgcgtagtataaatttttagtgattactggctcagagatatctggaaaagaattaacctgatacacagaaatcaggattgagacatggaattttcttacatttttgaggactgaaatgaagataaattggtccatacacaatatattttacttgtagcataatcaacacacctttgctcatataaacatcgtgtatcttaatagaaacgtttcagaaaaaaatggcattatctgacctggatgttgagaaatgcagtcagaaacatttttttttactcagagattgtcccattgaaatcacccatattaagcaagaagatccaaaggagctcaacagctcaagcctcaagccatgatcaaacatatctggtgtagcatttgattgttaaacagcaaaataacccatgcaccatgttaatttacctgtgaaactatcaaggtaatactactaaacatcagtctatttactgctatgcattttggcatttttcaggttcgtcaggcggccctagccaaagcctgcattcatcgttcggcggcgtctccctgcagtgccggcgcacgaagccggcgtccctccaccggagtcggccgtcgatgcaggtggtgatgatggcggcgaggccggcgatccagttcatccagggcaccgacgagcagacgatcccggacgtgcggctgaccaagtcccgggacggcaccaacggcgtggccatcttcaccttcgaccagccgtcggtgttcgactcgtcggcagagctcggcgacatcaccggcttctacatgatcgacgacgagggcgtgctccagtcggtggacgtcagcgccaagttcgtcaacggcaagccggcgctcatcgaggccaagtacgtcatgcgcacgccgcgggagtgggacaggttcatgcgattcatggagaggtactcccaggccaacggcctccagttcgtcaagaagtgatcgcctttttttttctccttttttccccctcacactgccttgagcatgtactgtgtgctctttcagtgtaaatacctatgaattctgatcatcataagctcgatacatgatgagttgtttggtgtgtgcattgattgcgtttcttctatgagtgcaattttgtattcgtaaatacccctataagcatttcagagattaatatggagtgaaattactatagtactccctccgtattttaatgtatgacgccgttgacttttcgatcaacgtttgataactcgttttattcaaaattttggtgcaaatatgaaagtatttatatcatacttaaagaacatttgttgatgaatcgagtcacaataaaataaatgataattgtataatttttttgaataagacgaatggtcaaacgttggataaaaagtcaacgacgtcatacattaaaatatggaggtagtagtatctgattagtagaaaacatcatactcagtgcaacactgataaatacaaggaatcataacagatgattggtagtcatccataaatgcttgcaagctgaattccgccgtgctttgttacaggaaaaatacattataatattatttaaaataaataaaaatacattttttaagaatgtgttatccatctttttactatagacatatccatctaaatattttttttaacgaaccggcaaattgccaatcatatccatctaaatatgattttacatgtgactaaccatttagattttattgttttctagtattaataggttcaaagggttatttacaaaatttatcatggtaggtggggtccaccacttttgtaaaggagtataaatttaaacgtgaaatatatttgtgtttgtggataaaggaagtataatttatgagtacggtcagcagctgcctaaatgtcctgtcagtgtcaggtggagttaattaagcaattaaaggagtgagttagcttagctgtgggcttgacaacgaggatcaaacagagacagattggtggtgtctggtgagccggctgtgttatttaggagggttgggacctctccccttctcacggaaacggagtgactgattagtatatgattaattaagtattagtaaaaaaattagaaatagattaatatgattttttaaaacaatttttatataggaactttttgtaaaaaatacaccgtttgatagtttgggaagcgtgtgcgtggagaaagagggaggtgaggttaggaactcgaaggaaagatcacagccctagagcagtattaagttgattcacctggttaattctagcaggtcagcacgggctagtggcttggctgttcctgtcctaaatgggtcgcggcggcagcagacacaacgcatgtggctgcactggaatccagcctagaaatgcacacacacgcacacacactttgccctcttttaacaattgcaatttgctgctgggatctctggctgtgtttagatctaaagtttggatccaaaattcagtcttttttatcacatcacacataacttttcagtcacattacctttaattttaaccaaaatccaaacggctgaagcctccatctctccctccatctgtaataaatgtggtataaatgcttgtcggtttgtacacctgaccgtcctttctctgggtaactttgggttcctgctcttcagtacacactccaatatttgttcagcttctcttgaggaaggagggttcatgttttcgacgaaaacagataaataactgtggaattttgaggtttcaacatgagacaaagtagattccgagtgcaatttcaagtggttttcgagtattcaaaagttgaacattaaatttaactaaaaatttatcaaaatctgattgaaacttggtgaaaaccagggggttgagtttcgacgctcaatcagaaaggtgaaccgagaaaacatgcttagctaggatggtcgaggttctcatctaagattgacactttccagtacttccttcatctcataaaaaaacccaatctagtattggatgtgatacattttagtactatgaatttggatacagctctctccagatttattaatagagtgtgttatatctaattttagattcgtttttttgtgtgactagagtacaatatctaccagctgtgtgattaccgatcagatgagtgagcctgccctatatggcgctgcagttaggagtaatagtacagttattaaaagagtaaagacatctgctttctttctgaaaaggtaatggcctggatggctggattctggagtctgggcatagcagaatgtgtgtcactgtatctgcaggcttcttccctcgcaaagcagaaagttgcaatttggctcattattgctaccaaagcacacaacagaggatgatttgatttgactcgttcggacctggggcaattaatcatagtaatattgcattctgctgaagttaacctgaaggagccgcatataatgctcattagctagggatctgggtaagtcgttaattgcaacgaagtatatacaataaatggataagattacaattctggttcattttttaagtgcctgctaaatccgacaatactactaaacagtgatcagctttgttaaagatcaggaggcataatccaaggagagctttgggtttcagcagtgccccgaatcattcagacacatctggatcatgtttcatggggcacccccatcattaaaagcggatcgagagctaagtagcatagcctcctaatctctgtcctttatctttttctataagagtttttttttcacagtcaagtgatcatgtatcattgcattagtaactttttttttttttgctcatgtgggaagattaataggtaaccacagaatcattgaatagttatatcaatgtaatactccatttcatattacatatcgttttgactttgttattagtcaaacaaattagcgacatctacaacatcaaaccagtttctttaaatgtaaccttgaatgtattttgataatggttaatatgtttgtttgtttaaatattattatatttttttataaatttgatcaaacttaaaagactaggaaaaaataaaaacgatttataatataaaacagatggagtatgattcaatttgaacctggcaatgacaagtcgacaactgtgataagtaggagtagattgttcctactactacgtatactattatatagcatccttgtatatgtttatgcattgattcgcaattaggagataccgatttagacagatttacctgagcaaaaccaattattccattttgagacagacttgttgagaagagcaagctccaatcaaacatgccagctctgttttagaaggattgacagtgagagttccgctgttccgattggcttgtgtagccttttatgtccctgtccaacattccccagatccatggctgccatttaatttactttcatttgaaaccaatctatgtatgcatgcatgcatggtggaacccaatctagcaacaaaaccgaaacttgtgttagtagtgttcaatatacaaatttaattttaaaagaacccacaattgtatttgtttttattttcttatcttgcatgatccactactcagtcaccgttttttgaaattgcaaatcgctatcacatgattacatagttggagtagtatatattttctctattgctgacatgaatacatagttgtagtcccaaatttcagctgcattcagagtccttaatacaagttgcagcacacaaatgggtgtataaattttgaaatttgaagtggtccatgagttgacataacctccattatcttgagctcgtcaaactcatgcccacgatgcgtggttgattagctgtctaacctaaccttcattccacgacaaaccatcattatcttctatcacccatgaaaaactaaaattttaagccacctcatactttgcatactgaagtcttaatagcatactaacacacatggtaaataaaagggagtacctatgcatctttcgaaagatttttatgatcatatcacacagatttttaatctttagattaaaatccaatggacacattaaaatgcaaaaagcaactaagaaacaccataatggacactaaattaccatatcttcaagaaaaagaccaaatccaatataaatttcaaaacttacatgcgaagattcaaaaattacaccgtaacttacaaaagttacggtgtaagtttcataaattacactgtaatttacaagaaaacacactgtaaatttgagtgagaaaatcgagtgagagataagaagaaatctttcgagtgagatatagcaaaatcgtaaataaaattcagcactagtcatatccatataattgattattgtgacctcatgatagagacaagaccaaaaaaaaaaagaaacgcaaaaccataattctctgattaatcatagtataacaacatatatataagtcatgataaaaaacttaaaaaaattcagacaatacctaacagacacaataatttatgtttttaaaaaataaaataaataaaataaatgtaaggaaacaaaaaaggaagcggcaagaaaaccgttataacaacagaagaagaacatcacaaggacaacaacctccctcccttgtcttctcaagtccttccctcttcttcttctctctcatcatgtagagagagaaagtttagagatagagagagagaggagcagtacaaacaactgcatgcatatccatttagcaattattaattgctccccaactccaactccatcatctccaccaccacctaaacccacaaaaaactaaaccagaaaaccgcttaaccgcaagcgccgaggcggagagcggaggcagacgcagacgcagcagccgagcacgcggcgacgcccacgcccacgcacacagctcggcttcccggcggaaaccctagcgggcgggcgggccccaatggcggaggagggcgacaaggccacggcggcggcggaggcgggggggaggagcagccgctaccgccgccgctggtggtggtggtgggggtgggggtggtggagcggaggaggagagcgtgaagctgttcgtggggcaggtgccgaagcacatgacggaggcggagctgctcgccatgttccaggaggtggccatcgtcgacgaggtcaccgtcatcaaggacaaggccaccaaggcctcgcgaggtgcggatccgtacgccccggatctgggctcgcgggcgcttgctcgtgccccggggctcgatttggggggcaatgcctgcggggaattcgagctccgcggctgtttgttccccccctttgctttgcttcttccgcgcgtgcttctgtggcgattgttccgcgcaatgtcgtcggaggaatgaattcgagcgtttttggctggattttcgtgtgcttcttgattttagccttgatatgctccattgctggagcgagatctcgcgccgaattaatctggttggtggggggcgttggtggggctcttagcttgaattttgagtggtattggtctgaattgcgtttcatcagtcgaatttgtccaacgccgtttcgaatttcacctttctgctttgtttttcaaaatgcggttttatcggaacgtttatcggcgttttttttctttgggtgcgtagcttgaatttgtttagggagcaatgctgtgccgcaaatgtgctttctacgagtacaaatcaggccacttattttctcttaccaccagtaattttggcacttcttactcgagctttggagcatggaacttagtttggatcgggcttcagaatatcataagacgagctttgttcggacttctgtttggctattttgagctttgctcggacttcagaaatgcaagatggtcatgcatttttttatattatgcgagataactaagttattacgttgttcaatgatttattctaatttgagcgaactagaaatgtgatgatagtttgggtttttacccgattcggtgaattttcacttctttatgttagcattgtgtagagtagtcacttttcaatgcttcatagaccctagagatcgtgctacaaatggaaacttgggtggagcagacatcgctgcaaaattagaaggcatatgctgcatccttcttatttgggacattgacaagccagatttgctccgcttgtgcttttctctttgtctctgtagccccatgccacctgatagcctttcttcttcttttttttctatttcttcgctatatctgtctgcctctcaggttgatgctaattttggatgtcatgaacttaatgcagggtgctgcttcctcatatgcccctcgagggaagaggctgacaaggcagtgaacgcttaccacaataagcacacacttcctggggtacgtgatcgttggaatatattacaatgctaaagttgaattcatgctgttttccttagttgaattgttgcaagctgatcccgtgtttatggggtgaaaattacatgtgattttgaaattccataatctggttgccaaggaacagcattggaagcttgtgcatgtatttggctgtttggtgggaccaaaatgaaatctgtagtgggagtgcggggcactggtgaaatttgacttgggtagggggtctagaatttggaatggtcatgctaaatatctgtggtgggtggtctaaaaatcactggacatggattatccttatttttcagtcaataagtaacatcattattctccacagttctgctgcaaggctgctgatatgcatgtattagtttcagtacgttttgtttcatggctagcatagttaacgagtaatctgattcaaggatgtatatttggttggaaaacaaaaacattacacttaccctcaggcagggctaaacttcgagccacaccactatgaacaagtagtgggtgtgcttggtctttgacagcaataaagttggatctataggaaatttaacctgtcaacagctgcatgatggtctatcttactctcatagcggcacacctaacaaaagttagatcaccaatctggccatcacacttttgtacccatcctgtatggaaatgaactgattgtagcttcagttttgtagcatacctaactgaggtcccaactcccaactgaccaaacaatatggactgagtgttatgattaggatttgaatagaacttttgagatagggacaaaatctcaaactaattctggtgcatactctggtggaccaaattctttcttcggaatgaaaaagcttcatgatttcactagttttggaaacttttaaaaaattatgtaggttgatgttactttcacagttcaggtgtcttcacccagttaatcacagaataagactggacatctaatcccactcccaatcagatgagtaatgttgagacgtgaaacatggatgatgatagaaacaaactataaagtcttggaagttaggactttgtcctaatgttggacaaaagttggagtgcatatgagtgtggtagttggtaatcactgactttgggagccagcaaggcacatttacgtgacattttttttctatagtgttaatagctactgttgtgacaccttgttcatgaatagctgccaaacattcccagttgcttctttcttttatctgatgacaatcttcgttttctttcatcaattcaggcatcaagtcctttacaagtaaaatatgctgatggagagttggagagactaggtatgattgccctttacatagaactgttctttttgccattgattttattgcactcatgcttgtacttgctatgatctccagaacacaagctttttattggaatgcttccaaaaaatgtaacggacaccgaattgactgatttattttccaaatatggaaatatcaaggatttacagattttaaggggttcacaacaaacaagtaaaggtgagatctggtgaataacctattttcctaaccatttagagctagaagcactggttgactctggaactttacaatacctaatgtttttgttaaattaactgtgttattgcagctggctgtgcattccttaaatatgaaacaaaggagcaagcagtggcagctattgaggctctaaatgggaagcacaaaatagaggtttgccagaaattagttagaatagcagaaaaattcttagtggttattgaaatgtactgcaattcacacatgaacatgatccatagctctacttagtcatgagtctgatacacataaacagtcaaagctaaagacactctctgctattgcatttatttgataccttgtgtctgcattatattatccagttacatcccttctcaaaccccacgttatttttcatgaatatattataatctcttctgatttatttgttagggctctagtgtgccgttggttgtcaaatgggccgatacagaaaaggaaaggcaggcccgaaaagcacaaaaggctcaattgcaatcatctaatatgcctagcgcgagtcctatgcaacaatcttcattatttggggctttacagatgggatatatgcctcaatataatggatttggctatcaggtgacttgtgcttttctcttaatatttttttttacatcatacattgtcgtatacttagcacaagaactatattagtcatattcttctttaaaaatattatttgtcacctgaaaacattatcaggatatgccccaataataatttggttcacgttgtttcatggccactatttggtactgctacacacataaatggtggctcttgccatattcagtgtaaaaggggcatttgtccaaactgctaaaattcttcatcttcgttcttcattatattgttggtactttctcacagaagaaaaattttgtcggtacttcaaaccctagcattgagcttcaagagagtgcttaagatttttttttaatgcacacatattttgcttggaataagtctgattttgttttcttttgcagccaccagggacatacggacttatgcagtaccccttatctcctatgcagaatcaagccacattcccaaacatggttcaacctgttaatcaaggaaactctatacgaggagtcaaccctgaactgtcccctaattcagttcctagatcattcaacgcaatgcagttaagcagcccttatccacctgtacctggtgtgcagtatgctggatcctaccctggtggtctcatgaataatcgtcctttcgggaattcgttcagttcgattaaagttccaattgtaaatgcaaattctcctgcatcttctagtcccagtagcaatcctggtggccaaatagaaggttagacacattctacttacacctttagcctttgtgctggagaaaacaccgttttcttccaagatgttatctggaaaaagctgcaaccttagcaatacattttccgagaaaaatcatgtggcttttgattctataccatgtacgttatcctgaaatgtttataatgtgcttctgtacatgaggaatccaaatgcatataaggacatcagagttcaggagatgaacaaaaatctaacaaagatattgaagaatggttagctacctgattgtgctaactaatactctctctttctgaatatatgtttactatcagtgtagctgtcattttgaagtccatcatgttttaaagactagtcttcatgcttacaggtcctccaggagctaatctatttatctatcatatcccacaagattatggggaccaagacctttccaatgcattccagaggttcggtagagtactaagtgctaaggtttttgtagacaaagcaacgggttccagcaaatgctttggtaatctctctctctctctctctctctcacacacacacacacacacacacattttgcttatagtctgctaattgttttctaacgggtgcaggttttgtaagctacgattctcctgcttccgcacaggcagccattggtgtgatgaacggtttccaattaggcagtaaaaaactcaaagtacaactcaagagagacaactccaagcacagtaaacccttttgacgaaaactatgatgaccacgcgatcaggttcctggtacatatttgtcagataattgatcgttgaattgtttgctctggccgcagcattgggagcttcgtgtatcttctttgttcaattcacattcttgaacactgttacgtcgtgtaatttactgcagcctagtggtagaatttgtttcatcagacccttgtacatcagaagtcagattcattcaattgtggacattttctcctgacagtgattccggtttctcattgacacgattccggactcacccaaaactattatctgaaccattattgacttatcatgtctaaatccccccatggaaatctgatgcttttggaaaatgcttgtcagtgattcatattaagtggagtagtaataatttgtcagtactaacgtggagtatcatttgacaagattcagaatatgaaatttggtggggcgagagtttgatgtctgagcagcagatgcagatcagaaattcagaacaggataaaagcaatggaccccctgcactccatcgtgcaacaactccagatggccatgccatgggccccaacacagggtattctttctagcttgtcccaacaacaattttgtcctttctcatgtgcaaccagcagcgacaggactacgctgcaattgcttgtgcttaccctgaattaaccggtaagaggcgccacagccgcgaaacggccaattgttttgcagtaactcatctgaacttttgaaaaagagtttctcctttctggctcgccgctaccaacatcaaaatggatcgtgctgtgtatgtttgccagctttggctatgattgtgacagtgtacttaattgcgtgtgcacaacgggttatctgagtaggacgcgttagctgagtagctgtacggttatcatgcacggctcattaggcacatctgcattctgcaccaaactcactgattagtctctactcagtttgggcatgtgaaacagtgaaagagtttgaataactccgtagtgcatcatcaggaattcaatctcaagctatctgcttgaattaaacatcactccttctgttccgtagtattacattatgggtttgtcctaaatcaaccttcctcaaatttaaccaaatatatatatatatatatatatatatatatatatatatatatatatatatatatatatatatatatatatatatatatatatatatatatataaagcaacattttcaacacaaatatactatcaaaatattcaattatgaatttgatgttacagatgttagtactatatatttttataaacttgaataaactaaaaaaaattagcttagtgtaaacctaaaacgacttggctgtgttcggaaccttgtgttcccaacacaagctggccgcacggaaaacggcacggtccattagcacatgattaattagatatttgctatttttttaaaaaaaagaattaatatgattttttaagcaactttcgtatagaaactttttaaaaaaacacaccgtttaacagtttgaaaagcgtgcgcgcgaaaaacaagaaaaaagtgttgggaacttgtacttccaaacaacatgagacgacggaaggagtaccctggtacgagaaaacagtctggtgattggtgagtaccacaaacttgtaataatgcttaccgatcccttggtagcacggcacgaagccccccttgtccaggctggccatggtctgcgacgtacggcgtagcctgcacaaacgtctatatgtagttgccgccaaagaggtcaacatactccctccgtcccaaaaaaaaaaccaatcctgtgtttgaatttaggattaggtttttttagactagggagtaggggatttgggggctctttgccattgacgccgtcaccgacgccgtgtggccatcccgccgccaaacgatcttcttgcaaatcactctcctcctagcagcgggtctgcacaagaaatggcggcgaaggtggggaggtcatctcctctctggcgaagtttggaaggggaaatggaagagatccgatggcctagattgctctggtagtgacatagttgtatggtttgatcgcgtgtgactttcccatttgatagggtctaaactcctaaatttaatttcaaaatttaatttcaaaagttgggtttgaattgtagttatggagttactaaaacccaattctacctctctaatttattttattagagcactttagtcagctcacttcattttttatttttatattgaagttgaaattgttttgattggactttagctccagaaaatgtggacttcagctccggacttcattttttttattgaagctgtgtcaaactggcggtagaagtcctctgtgttcgcatgagctcgatgtgaattgtgaactattccctccacacgaaaaaccgagcgtttcattagcgcataattaattaagtattagtttttttttcaaaaatagattaatttgattttttaagcaactttcatatagaaacttttttaagtagtacaccatttagcagtttaaaaaacgtgcgcgtgaaaaacgagggaaatgtgttgggaacgaggggttgcaacacagcaagtctgacccttaccaatattccgctcctgcgaaaatcacctactacttttcgatctctatcgaatcctggtgttcgccggcgacggcgaccgatgtcctccgccgcgtctcccggcggcgcgagggagcgcccctcctcgcgcaactccgccgtgtggcccgtgccctcctctccctcgcaactcgcatcgcgctgtctcgccgcctctgccgatgcgcacgattgtgcccatctggcaatggtccaccgtccagtccacgcacaacacaaactaattgcgatgtctgtgctcaaatcgaacaaaatttacaaccaatgacgtatacgtatgagcccccacaaactcgcagcaaaatcgaataattctgcttctgcagcagatcaaagcaatgtcctacagaatcatcctgtcatacagaagtaattaactttactttactcgagtaactaattattttgacactttgacaatcgtaaaaaaaaaaagaaggaaaagataatgacgagatgatatccaattaagtagtagtacgtgtcaaatcaaactaattgaacttaactttgtacatcacgctaggtgaacacgtcgtgccgagcttgctgttcttgccgccgatgatgccgtggtggtagtacggcaccacgccgttcttggccaggccggcggcgaagaaccatggtcggcgacggggtgacctgcatgaacatgtagttcccggcgaagaggtccccgacgtaggggctcccttccttgagccgccgcaccaccttcgccaccgacgccctcaccgcgccgcccaccgccgccgccttcctccgcagcaccctcgccagcctcgagatcctcagcctcggcctcatcctcctcctcctcctcctgccaatgccgccgccgccgccatgctgcgcggcggccgcggcggcggcggtgatagccgcgtagtactgctcctgcagctgctgcggcacatcaggcggcgccgccaccgccgccgttggaagcttcttgagcctgcggtaggagaacctcctgctcatcaggtaagacgacggcatggcgatcagccgatgatcaccggagctggagaaggagaaagcgaggtatttcagcagctcgtgacgcgagcacgcgacatttcgcaaatgcagattggcaatgtggttaattatttgcaataatgtggttgaggttgagacgatcgatcgatggcgagagagagcgagaggagggtggtgattaaagagtggggatgtaaatatggttgggggagtggcagattgagtcgagaggcgaagatgatgcattgaaggcggagaccggtgcgcgctgtggatcagttagtgcgagtacaactcgacagcagtttaactttggtcgtaatcgtactggtacgggcagcgggagggactgagggaggtgggaatctctctctcttcggcagaagcggccgttcaatgccaccgccgtgctagaatgctaatgtatcacatctcatatcatggattcataagcgagactgcgagatgtcgtaagccgagaatagttttgaccggatttactgttgcgaatttgaatttctcgaaatctgattttgaatcaccttgaaatcacgaaatttcacgcgaaggattgtaaattctgatactgatacaaaccgacaactgattcctcagtcctcactaacgacaggtgttcgagcacaagtgccctaaggccattcacagtacacctaggtatcattctccctcatgcagccagcttaaagattcccctccacttagacatagttcggagcctcgccaagaatcgtcagaattacagcttttgggcccacaagagaagaggtgaagaagggggagggaggggagaagcaccgatgccgtcgtcctccccgatctgcgccagccgaagctcgctggccgcgcagccccccgatccatgcctgccaccaagggaggaggccggacggggagctccgcccgcagcatgggtcgcgtcgccgcctccagccccgacgaggagagatggaggcgtagagctcggtgccgccgccgctccgccgacgctatcgaacaatgacatcgccgccttcggcctcgacgaggagaggtggaggcgtggagctcggcgtgccgccgcttcgcttcgttcgcccgggagagagaatggtggggaaagtgtgagaggagagagagggagagataaaactgagtggagagagataggtgggacccactccaagcaacatgcattgtgaagtatgtagctaatatggttctttagcccaattggaagcccaggcgtagcattttccaggacgcactgtgagcagggttcctcttactgcgtggtaacctcgagacatgccgtggttttaaaaaccgaaaaggttacggtaaccgcgataatcgcgcggttttgtaaaccctccctgagtgtgagtgccctaatacatcaactgcagtccccagcctcaatgtggtgggctaggcttggttcacaaatttattgaattttatcacatggagttctgagctcttccaaactgctggatctatgttgaatttcaaacgaattttaacaaaattccatgaaattcgtcatcgcgctggattgcgtttcaacccaaaatgagattgcaaacgctcggccagtaaccttgtacggttcagaagcaaactgatcagaaacaatccaccaaactggttcaagaggaaagccctcaaaaaattatgagaaactataggttcaacaagacagatgctccagagcatagtcccaaaatagacctctgaaaattggaggtagattctatgcccctctcatattaaaaagaaaaaagaagtggtttttacacttgaagatcctcttctcaacagcagtagtacatagcaaaacccgggcaacaagtgctagacaagggcctgccaccaccgtggctttgacctaggcacagctgctgcccatttgccttataccccacccccccccccccccatccatatttacatgcactaacaagaagtataacagcacgccgaggccgtgtgggacgctgtattgtgcttgcccgccggcccgggagctgatcggccggctacagccagacaagaagaacaggtggtgcctcatcacctcttgaaacctccctaatttacatctgtctagccgcgtgtttcttcgtcatagtaggctcattagaatacacacaagaggcacaatgttggcccaatgaatggaacgccacaggctccgagtagcgtttgctgcaacagcagaatgaatggtaaaaaaaatgaaagctgatacatgaggtaaacagattataactctataagcatagattcatcaatagcgtttttactgtcttgtaaattcatgatgcaattgagtaatgcactgttctcaaatgattgcataaatcagatacagatataaatcaaacataaactgaaatatgagcacgagccataaaagacatggtaacgattaatgttaaaacacaactatataaaatttagcagaggaaatttcttatcccatccaaaataacttgtttgattttgacttttcaccttggcgtacactatctagcgtaactgagcttttctcttggctcacaaatattttgccatccaaggcaactagatcccaaggattacaaaactatgctttctaagatggaggtacttgtttgcccagaagaaaacctatgaatgtttatctcaatcaattgtgagctgaactaaaactccatttagctgaggtaccatcagcagataggcaaactcaagcctgatctggacttcacagaaatgcaacctcgattcagcaatcagcgtaaagatcaaacaaaatggatttaccgtattagcctcaggagcagaaacagcaagtaaaaaacagaagtccaaattgtccagctggatataattagtactacaagaatcctatagtattcttttccgacattctaaagtgaacgaatgaattcctcttagagataacactcattagcagttgagagaatcttaaaaagataaggcaaaaaacttacatgaatgaggtgcaggggccagagccgacaatccagcaggatctcttcttgatgtatgttcacttggaggatgagcatgagcaaaagaaacagtgggcaaaggtggttctggaagaactggaggggatggaataggggacctactgtgcacattgggattccgtggtgacagtgagtgaggtggcaaagcaactggtgaagcaaaatgatggccattggctgtaggctcaggagctggcattacatgagctttattctttggcttgtcagtaccatatggacaccgagatggaggtggagctccatatctgggttcatgcacagggtaatgtactggagcctgagccggagccgaatgcctgctgtcttcatgaccatggtgatggtgatgatggtgatggtgaccatgatggtgcatgggtgctggactaggtgcttcagaaccacccccactatgtaaagaatgtctaagataggatgaaaggcttatctgcttcaccctgccaaatacggtatggttcagacccaggtttcctgaagatgaattagtaattgtttgtgccaactgcttcatccttggtacagatggctggtgattcccaacttcaagaaaaatggaggtctcaacaatagttggagggtcaaccgttgaaccattcaaattcgccaacttgatatacagattctacaatgcacacaataatataagtttaagccaagaataaaaagaaggcaatgatacaatatacactaatcaactttttcacaacaaaatgtaagatccaccaatagaaattcatatgatggattaaaaataccagcccctttctttacagatagttcttagcagactatatcaaaagcatcatccgttatttgtatgtacatagaataaaatgaaaatgaaatggacacatgtatttataaagcagaaaatggtataaattcaagtatgatgagactgtagacagataaacagagacttccttgggttggctatgctaatcttgcaccccttttccatgtggcttcatgaaaaattttaaatcaagagcatatcctcaaaatcacctgttcaagcactgtgtgctctctcatgcttacggacctaactttgtgcgcgcacccctgaaccaagattgttcagtagcaccagaaatcatgaggaagaaatgcagcaaagcatgctatgtctacaggattgtgtgtgtacatcatgtcacatgagaaagtgcctaaattaaacaaatatctaaaactaacatatttaaaaatgaaggaaacttcaaaggaggcgacataaaatgaacagaattcattagtataatcacattaccatataacttaataactacaatgaaggtaatataaaatgagttaagccagaaggtaccactaacctcataggaattgagcagtaacccagttttcatttgatcctttagctcatcgattctgtcttgcactttgtagattgggaaattaagagtgaagttaaaagttgcatgaggtttctgaggaaggaaagcagtttgtggcggaatgattgtaattcctcctgggaatttaagcacttcaaaggacgatgaatttccaaataaggactcggttaactggagtgtcgactgccgcacgacaaaggacataaaataagacctaagaatgctcagccctgttgacgataaagtcaaattctttggataaggcacaatgctgaagataacatttgtccagtttgatccaactaattgtagtgaatttactaccacctgtataagtattcaaacatcagattgtgacgtgatgaaagaaatgtataaataaaagatgtctgcaggccatacagtggagttaggaatgccgatttcctcataaatgtccaattcaagctttgatgcatttccattcagctcaggaaccatcttgtgcagcctaaagcttgccactatatcagctggaagaaaaaaatatcggttcgtaagacacgcgtcttaaaataaagtgcttagaaggattgacatgtattgtgcaattctagacttccagtacttctacacaacagaataaagaacattatatttgtactgcagaatgaccgaaataaagattaaaagttctgcaaaccattccaaaagtgcaatttcagtaaacagtaaatgccaaacaggcttttccacattagacaa

SEQ ID NO: 4419 - DNA, 9706 bp, Oryza sativa
ccacgatgggcttggacggcgtcgggcggcggcgatcggtggccgccattgcggtcggaggtggcagtgacgcgagcagaagcgagagtccgagccatgggagcacacgtgcgctgtgcagcgtaacgacgtcattctcgctgaatcggtggtggcctcaatggctttgatcaacgtcgcaatgtcctttgctcataatatagatgtgcgtactgcgaccgggatggaagaggaagtgtgtgtttttattatctatgtcctaaaatacttgttgttctagattgtttagtatatataaagtttaagaaataaaactataatagtccttaataaataatgtacggttagatgtgagatggtggatagagtagaattgaaagtgattgattattttgaaacatattttaaatgttagaaaagggttggagcaagaattatttttggtcaattacctcgtgctggattagcgtgctcaggtcagctcaggctcttctgacgatggagtagtagtggcattgatcagaccatgtggtttttttggatggatcctcgtttcgaagctttgcgtagcaacgccagtacgtggttcctttatccaaagtgaagtagtcgaagctctggaaaaaaaaatcgatgtactagtactccatcaacagcctcgtgagtcgtgacaagcagcagtgagtcggcgacgtgaaggtgtgatccccaaataaaaatgggcaaaaccgtgtgtggcgcgtgagcacgttttacagacgaggcccggcccaataggccgataaaagcctttgatacttggggccattttaaaccgttgaattggattgcttgccgcctaccttcaaaccagagaagccgagcatttaactatggaagaccatggatttcagcgaaacaaaatgcatgcagttttcacattaacacaaaggaaatggatttaggcaaattacgctacgacacactaaatttaactgcaagactcaagtgggtgtggaaacgctaaactttttaaaccatatcgaaagtgctaatccctcgtgctatcatatcaaaatcctctgcagttgaagtcacgtgactttatcactgatatatgagtccgatgatccctagacctacatgtctgtgacaaaggcaccgtgtatttgactgcataggatctcaatcccgcgctaccgtgcctacggagtcccccagctgaagttgaagttgctgcacgtagtccggatccagtaaagcaggccagtcgatcccagcctccccttctccagatcgaacaccagcaggttgtcttcaagctgaaaccctccgatgatcaccgccggcgactcgtccatcgccggcgtcggccccatctcgacgatcgcgaagcacagcgtctcctcgttcacctgcacgatcatgttggagccgaagaacgtccagttaccaccgctccggagcatcaggtcgacggtggcgagcggaggccccacgcgcgtccaccacatcgccgacctctggtagcaccgctcgaacggccacgacggcggcgcgcgcgcgatgaggcgtagctccgcgtcgatcgcctcgatcacggcgcggtagatgtccggccggagcgcggtgtacggcgccaccgtgctcagcatcacgccgccgtggccggtgccggcgtcgagggcgagggagtccgggggcacgtccgctccgcggtggttcacggcgatgccgacgacgtcgaggtagaagccgccgttcttggggttcctgaggtagctgatgtagctgagcccgttcgagaccatgccgaactcttccggcaccaccaggaggtggaacggcccgccgccgaagatggccgcgccggtgccgccgccgccggggaggcacagcgcgaacttcctctccaccttgagcgacgccgccacctgcgacggcagcgacaggggagcaccggacagcccagcgacgccgacggcgcccgacgggagcgaccccaggagcgcgcccggcgcgcaagccgcgtgcaccgggaacgccacggggtacagcgggttcacgccgtcggtgacgttcgccagcatcggcgtcgtcgtgacgtccccacgcgcgcactggccgttgagcgggttgtacgggtaggcggagcacgcgcacaggcccctgccgccgccgccatcgctgccgcggccgtcggtgctcgagctgcagttccacgggttgtcctggacggccgcggcggcgcacacgtcggagcggcacgggacggtgctgtgcgcggcgaggcacgtcgaccagaggagcgggccgccgaggtcgaggacgaggcgcgagccggtcctgatggacatggtgtagagcgaggtggaggtgtccttggtgatccggacaagtattggccttggtgcttggaacgcatcactggctagcgtccgtggcaacaacgccaataggatcagcgagaggaagagcgagaagtagcagcgtaacgtcgacatgacactgtacttttgcttggtttttactctgattaattacaccttgatttcgagagtgagttcgatcactatatatatagagcgagtttggtcaattaccgtgtgcaagttttcgatggattgcacctacgtaagtcggtaaatccgtaaatgtactgtagttgactctgattaatttgaagaagcacgcagccatatatggtaattgcattgctcgcacagtcatagacgtggtaaagtcaacctgaagtggcatgctgcagcctgcagggtacttgtcgaggaaaaccctcaatagcggggagtcgtgagacccccctttcgtgagttcggccgggggcggaggctctcctctcgttagtcgtttgctcgtccctacgactatcaggagtgaatgcacgcagtcggattatataggttcgggccgctatcgagcgtaacaccctactcctgtgtttgggattatgaatgatttttacaagggttcctccccctcagagagcgcacctgcgtctttccttctcaagttcaggttttctgggagtcgtcccccatctccgtgggtagggtcctccttttatagcttaaggggatgccacatgcgccgcctctacttaccctccatggggggaaccccactccatctttttgggttttcaaactgtgccttctctcggaagctaagcaataactgattcttgcgcggaacccggcgccgtcctccgcctgacacgggggtcagccctgtcattcccttataaatgaacgatgacatgcaacagcccctcatcgagttgcgctcggatgtgacgggtcatacccacccccactccgtcggggacaagggcgacgtgaggacatggtcgccctatccaacggatgtgacggagacgggccggtcacagaccggtcacatccgatgaacaggggttcgctaggcacgccgcacgtctctgcccttaccgtattaactgcggtgagggacagttggggcgtcgcacatttatggctgttcagcctgcgctcccttcttgctctttctctctctgccgcgtggcagctgggcgagggcctcggggcgaagccgcgggagagcccgagggggtgacgtcatgccccgaggcccctcctcggcgcttctacgactcgcgtggcgcgcgagtggggccaacctgtggagtcacgtggccagagaggaaaataattcccctctactccacatacccccgggcccatatctccgatagtactccctcagtcccacagtataaagggatttgagtttctgtagcgcccgttccgtcgtggcgcctagcgggaaaatgtaattcctaaaaaccctaatttcgaaatctgtttccttgcttattgtctagtgtccgtgccaattccggatctcaaatctccgatcgatcgccaagttcaatcccgaatccaaatccttcccaaatcaaatccctccgcaaaagtctatttcgcctccctcaggttcgatgggccgaatccctctcggcccatctccccctccctccccatctctctctctctccctctcccccactctgcccgtgcgctgcgcacgcgtgcgcgtgagccgcgccgagccgagcgccctccgccctcgctgccgtttcccgccgacgccgcctaaatcgctacgccgcccgttgcttcccgcgcgcacgcgtgccatggtggccgaccggccagtcgccgccgccgtcagcgcctgccgcccgtgtcgtcgctccgctccaaaccgcccggccgtcatcgccgtcgtcatcgccttggccccgcccctcctcgcgcgtgcttccaagggacggaggcagagctccccccacctctgccgcatcgccctctctccctcctccttttccccaaagtggcaagggggcaagccccctttctctccctctttttccctttttcctcccgccggcgtcatcctccccccctgtcgccgttggggccgcgaccgccgagcgctggctcgctcccttgaccgcccaaggtcggtttccaaaccaacattgccgccctataaacccaggcaccctcccttcctttttcccctcccaatctcccccgtttttcacccacgccattgtcgtccctctcgccgaccgccgccgtcgcgtgtgccggaggagccggtgcgcgctaggacgcggaaggggactccgggtgctcgtcttcttcctcttccccggcccgaggcccggagagataactcccgtgccgtcggcctcatgtcactgcgccccatcacccccgcacggtagtgcctctctccgttctccctcctcgttccatctcctccccttagactcgggtagtagcacgagtagcctccccgtagctagctggcgccgccccgaccgttgccgccggtcgctgtgtgctcgccgccgtcgccgcccgtgctccgtagcacccgctcgtcgccggcctcgctcgacgtagctccgcccaatcctacgctagcaacggactcccggagtcgcgtagatgctctagctcgcccgaatcggtctcccgtcgcgccatcgctgtttcccccttctcccgccgccggttgccgccaccgcaatccgccgccgtcgagcatcccccagcgaatccgagccgttggctcgtctcccctcgtcccgagcaacttcccggtgtgctcgctttcgcctgtatcgccgggttcgctccgccgcccgccaccgtcgtccgccgtccgttccggccgacgtcgtcgtctacctcccgccggcccgcgtggcagccacgtaagcgccacgtcggcgccacctcggccgcgaccgggtcaagctgaccccggtccgccgctttccctccgccccactcgcgcgtgcggtccaccgcgagccgtgaggctgcgcgtggccccgccgcaccgcgtcctccgcgaaccgcgcgcatgcgctgcgcctcacctccccaaaccctagcacgccccgcgtgcacctcgctcacggtgaaccgagtcgccgacaagcgggtcccacccgggaccacgcgggatggacccggcccaccggctctctctctcctccctgcccgcgcgcatgttttgggccgccttctcgggccggccggcccgttaagtttggacgagccgcccttttctctcgggccgcgccccagccgcccgaggaaagtctaatttgcctccctccttcttttcttttcttttctttttcaaaaagcatttaaataaattctttttttttaccaaaaatccaataatcttagaaattcaatatcttcccaaccgtaagtccgtttgactccgttcaacttccaaaattcctcaaatctcgagatctatctaatggcatgcttagaggtcaataatagggctttattttcgccgtttgctgagttgtcccgtttcgcgtgtagttccggagcccgaagacccgcagtgcgaggatttcgaggatcaagctcaagatctcgagcaaggcaagccacccttgaacatcttgagcctatatttgaacttaattatgttgcttgaaaaatattatgcattgataggattgcacttaatctgtttgcccagtctgcaaggcagaccgatgggcctacctagctcattgcgtctgatccttcctttgttaattgttataccatgttcccttgtaaccacctagttgcgcctcggtaatcgtgcactctgcacgagtatcgacggtcgccttcaaccttaaaatctgagaaacatcttgggtaaaacttgggttttacaaaagacttggaaaacccgacacctgggtcggtgcttgcgaactaaatgaatttccaaaatcgcggaccggggaacgtaccgggtgtatggtttcccgctcttgcacttaaggaccgtttccttggaatttcatccgaacataagacaagtgcgaccacatgggtggaatgggacacccctggctgagtaactagctaaacgggggagccatgatgccaagagacatgtggattcaacggggtggtgtcggggagaacccccgggtttcctggcacagtatggtctgggacctaatctggtgttggtttgggacccctctcgttggcatatggtgaacctgtgtcggctttcgaaatgtcttgtcatgaaagccttaaggtctctagtcgtggctgttctgcacgggctggatgatccgggttagtaatgttgtgtgggtaaagtgtaccccctctgcagagattattaaactgttcgaacagccgtgcccacggtcatgggcggatgtgaggtgattcctagcgtagttttgtttgactactgctttgtgaaatttgctgatgtggtttgggattgatgtttggaaaatctgcggctgatgggatcagccaggcccgggtggccgtttgaaagctgttggccaggtgccaatcttgatcaattcaaaagactgatacattgcacatactccgaccggacgagacgcactgtctcatccgtgtcgtttgagaagcactcacttagttgtttcagaaaagagtttaaataaaatcaattgcaaaaacaacagcctttccttgaagcctgcattaaacacttattttccatggcttgctgagtactcctgtactcacccttgctctatataaataatccccccccagttgctgaagaagatgaagtggatcccgctgacgaggagttcttccaggagcaagtcggctacgatgagttttagggtttcggcctagttcccaagtcgcgcatgtgatgtgtgatccaagtcttggcttccgcttcccttttgtaatgcagttgtgagctcgggatctgtccgcagcccaacatgactgtactcctactctataataaggagacctctgttgctgtgatattctgtcttcctgtgataccagcactgtttcctgggactgatatcgattaacaggttaatttggagcgtcacgggctagtcccgctcggggctagttcggggcgtgacagtttttacttgcaatgtttgactactcgtcttattcaaaatttttttgcaaatataaaaaatgaaaagttgtgtttaaagtaccgtggataataaagtaagtcacaaataaaataaataataacttcaaaaatttttgaataagacgagtggtcaaacgttgcaagcaaaaacttaaaatccggggacagagggagtatatacaacacttctccctacggttgactaatgtgacttgcgataagattggctgacttagataatcacaaggtgaaaaggtcaaattttgcaatcaaagatgagctagctgccggccggtttaggcaaatctgggcagcaaagcccgttagattctgcgcaagattgcacgtgtctgcagtgagcatgtatccaaagccgctgatcgtgtcaagcttcactctcgatctactcctccaatccacaataaacaaatctaatacattcacgatataacacattgtaatgcaatatgattcgtagtactttccctaacgtcccatgttatgtatagttcattttgggatcgagtgagaattccattgaagtgatagtgtggtactagtactactataaaactatagaactatgtgtactgcactggaagcacatatgctcttgtgttgatctgaaggtaacacaagatagatggatcgatctaaagtatgagcaaatacgaaatcgcattgaattttatctgataggaaaaatcgcaatgaatcttgatccatgcaaaccagcacgacctccataactcaagtaaatggctcacaacaatctatgacctctataacttaagttcttgctagagggccgatcacagtggacacatggttctcttattcaattttagtactaactatgtactaactgtaaaccattaggcagcgacagtgaagttgaagttgctgcaggtggtctggagcccaaagaggaggccactgaagccgagctgctgcttctcctcgtcgaacaccaccaggttgtgctccatctggtgcccgccgatcaccaccgccgggccgtacccgaccttctccggcctcatctcgacgaacgcgaagcacgccgtggcgtcgtccacctgcaccagcgagttgccgccgaagatgtaccacgccgcgccgtcctcgaggttgatgttgatgtccggcacggcgtagccgagccggttcgagccgatcgtccggctctcgtagcacagctcgaacggcgccaccggcggcgccaccttcttcggccattgcaggatctcgtcccacgccttgacgaacgggccgtacacgtcggggcggagctcggtgtacggaaccatggagctcagctggacgacgagtggcgccccgtggttgggtagtggcacctggtggtggttcacctcgatgctcttggccgtgatgtagtacccgccgccattgccgccggcgagctccgggctgcggcggagcgcggtgtaggacagcttctgcatgatgtccggccgcgagtaggggaagatgaggacgaacgggccgccgccgaagacggcgacgctcgggaggcagagcgcgaacttcttggcgacgttctgcgtcgccgcgacctgcgcgtgcagcgcgaggtcggatcgcccgagaccggcgacgccgacggcgccggcggggagcgaggcgaggagggagcccggcgcgcaggaggcgacggccgggaaggtgaccgggtagagcgggttgctgccgttggtggcgtccgcggcgagcgcgtccgcgtcaggtcggccgtcgccgactcgccggagaaggggttgtacgggtgggcggtgcacttgcaccggaacgggtcctcgacgtcggcgcggccatagccattgtgggggcatcccggcgggtggtagctgtgcgcgtgcatgcagaagtggtggtggcactccagcgtcggtgcgcggcggcgcacgacatccagacgagcgcgccggcgaggtcgaggacgagcgggcggccgtccttgatggggacggtgtagagcgaggtcgccgcgtccttggtgatggccgcgacaagcggcttgccattgccattgccattggcactagctgctgcccatggcaacgacgaggccaaggcgacgcagagcgagacggcgaggaggaggtggagcgacattgctggttattagcctgggcaaactagctagcacgcactgtgaattggtgtgtccaagtgtgatggtttatat

SEQ ID NO: 4420 - DNA, 15273 bp, Oryza sativa
gggcaatgctagaaagtcttataatatgaaacggaggaagtaataaatatggaatggactgcaacctgaattattggctagtaatttactacggttcaacttcagcatttcaataaagccattgcaaacctttgaaaaatgcaaaaagggaaatgggaaccaacaacacaaatatcagtgacagaacctcctacacagatgtgcaattctcacaaaatagttgggtcacagctcaccaaattcggtaattgtatggaaccacaagctgagagtgacggagttgccacttttagcattaaattctaacttactcattgtgcaaaacaagcaccgacacatggctaacgcaatacagatcaaataccgacatcaaatctagcagaaaacagctatacgcgaggaaatttgcatggtatcctctgatagaatggctacgctaaggctaaattaatccgtctcgcatccaaatcgaacgaaacataaatcgcattgaccagggtcgccacagtcagttcaaatttccgtacatccagatccaaacctcagaaacactgcctactcatgaatccgccacgagctaatcagaaatcgaaccgcagattccgctcgtcgggggggcattgcaaccagacgcaacggaaacgaaacggaatcaaaagcgagcaaggcgagagatctcggcaatgcggggctctcaccatcgaagccggcgcccggatccgggccctccgatcccctcccgcgccgcgcgaacggcgggagccagaacaccgccgacagcagcacggcgacgccgagcacgagcgccgccacgcatttcagccgcaccaccccaccgacaccgcagcagcagcaccaccaccaccccagtcgcccgctacctccccttcctcctcctcctcctcttcctcctcttccgcctcctccgccccctgccccatccggcgggcgctgctgctggtgctgcccctcgccgacggcctccttccccatgcggcgcgatctcaccacgacgcatcccggcgccaggcagccgccgcctccgcctccttggacgccattgctggggggggggggggggggcgatccggttggtggagctagggctgggtggtggtggtggtggtcctccgctgctgcggcgtcgttgcttaaggaggaggagattgaggtgggcgagggaaggtgagagaaagtgagaggtaaaccgcaccgcaccgagccgaaggtgaaacgtgaaatgaattggagtggaattttggaagggaagggaggaagacgacgagcagcgctgcggttggagtgacctgacctgacctgaccacgccgagtagtagtagtagtagtggactagactagagttaagtgggtaaagctcacttattgttggctcggtttattaaattaaggtcgttaatttctttctggttgtgttggtgtggaataaatttgtaggtttagctttttctttctctttttcctttttcatggtgttgtgattggtttgttttatctgggtttttggtgaggattggtttgaagattttgaatttggaagggggcaaagtaggggttggatcttctatggccagtgaaccttgtgagtgtttgagtggtagctacctagaaggtgtagttttttttaagtacatagcagtccttaaacttgtgtatgtgtgttatctaagtccttgaattcttaagatgtatttttaagtccttaaacttgtcatgtgtgtcatatacttcctccgtttcacaatataagtcattctagcattttccacattcatattgatgttaatgaatctagatagatacatatgtcgagattcattagcatcagtatgaatgtgaaaaatgctagaatgacttacattatgaaacggagggagtaggtcctaatggattcaaacccgctccatatgctgacgtggcattgctacggaggcacctacatgtcagtgaaatccgcatgtcaagcatatataaaaaataaaattaaaaaccatattttctcatcttaggtaataaaaagataaaaattctaaggtagagaggataaaatatgttttttttattttttatatgtgactgacacgtgggttcgactaacacgtaggtgctatcgtggcatgccacatcagcgcatggagcgggttagagctcgtttggacctagatgacacctcaaggcaagtttgggacccgaaaatacattttgatagtttagggatctagatgacatgctcgcacgagtttagggaccgctcatgcacctcactcttcttcgtttcttttcaagtccagagattttaacattcttaaaattttaagagtgtatgatttgatggtttatttttgaacatctagaaaaatgataatgtttatttattttttgaccagcagataaatagtaactttagttggagttattttgaagtagagggacgaacaaatacaattaaaaaacaacacaaatacactgtataacaagcataacattgtattttcatacgaagaagcataaaacatatatactttctccgtcgcataataagttcatttttaacccctcctatttgtctcaaattaattttttttagtaattatggtatcggaatttgtgaaaatacgatataaatgtattgcaagtaattaaagagaggaataattacattgtgatttgataaagtggaactattatagtcttttgagttttgtattgatatatgtgaatggaaaaaaaacatttactgaaatgaagagagtatatattttagacaacataggatggagttttgtagagtatatttgaagcacccttctaatttaagtcatatagttgaaacatattgatctgatctcaagtttatttttacttgtacaacattcaattctggctccaggatatataaaaatttatacgcttcagatataaatagtttcttcgtacgaaacaacacgatactaatttcttgcctataaatatataatcagctaaccatttcaatataaatctagctacgaactatcaatgcatcatcaatgaacgcgaaaaagaaaaggtaaggtgaaacatcacattagagaatgtgatccttttgttccccatctcgatcattcccggccttctctccggttctctccagtgctgtgagagggcgagtgcttatccaacaatcaacaaccaaacagtgaacaaacgggagaatgtcggagggacggcgaaggcgatatgcctcctcgccacaacaagtccccacaggcgaacagccacaggagatcccggtttttgggtgcagccagcggcggatggatcggcgagcgacctccggaccaggaggcgagacccgtgacgtgggcccgggccccacacccctattccgatcccctctggctttctcgcggaagagcgagagagcctcccctgcgcacggtccactgcacctgatcaagacgagttcgtttatggtgcttccggcttgccaacctccactctctatcgttttctacgtacactttttcccaactcacagtattataaaaaattatatagaaaaatcactttaaaaagtcatattagtttatttatttatgttttttactaatacttagggcctctttagttagtaaaaaaatttgtccccgcatgtcacatcgaatacacagacacacaattaaagtattaaacgtagtctagtaataaaacaaattataaattccgctagtaaactgacggaatctacgagataaatttattaaatctaattaatccgtcattagcaaatgtttattgcagttgcagcaccgcattgtcaaattatggcgcaattaggtttaaaaaatttgtctcgtaatttcctggcaaactgtataattggatttttttttctatatttaatactccatactccctccgtttcgaaaaaaacaaatctagaactagatgtaacatattatagtacaatgaatctagacatatctctgtccagagttataatactaggatgtgacagcgtcaaaattccttaattaatcgtatgataatcttgccgctccgtttatttttttcatgaatcacttttagttcccaactcatagcaaagaaaacagcctcgggtccatgcggaccaggtgcacggagagatccgtacgtgcgtcctcgagtcggtccacgtgcttttccccgtaaattacgaagtgttgaacctctctcgctagtcgctggctcatggacccggtgcacatggactcaccttacgagaacccgctgtcactgaccgcgtgggcccacgtaaacgagagagcacgaactcgccgtcgccgacgctatcagcggccgcgttcaaaaccgaagcgccgcggcggcggcggcgccgcgtgggggacggggcccacatggaagcggcgttgggtggggttggtcgaggtcatcgtcggcggccgcggcggcggcgaggagagccaggtgacggtgagggtgggttagccactcgctgtcggggatggaggagaggagacgccacttggactccatctccgtcgccgtcctccggctacaaggaccatgcacctacccgccgcttgcctcacgcgtcgtccttctcctcgcgtttgcatctctgtctctctccctctagaagttcttgatcagatagacagacagaggaacgaacaactcctgggtgatgaaacgtcggcatctttttttcacggattttggaaggatgagctaattttattttttttgtgggggggggggggggacgtacggtgttaacctacattttgtagtcacgcttgatgactgatttaaggccttgtttagtcgtaaactgtttcttcaaacttctaacttttttatcacatcaaaacttttctacacacgtaaacttttaatttttctatcacatcgtttcaatttcaaccagacttttaattttggcgttaactaaacacaccatacggttctgaatgtacagttgctgtacgttgaggtactgcagctgaatagctgatgagtttagagtgttattattatgcttagttattatcttttcattcattgcactgtcgggttgtactcgctgtttttattaaattcctgtgccgttttcagctcgtagtactcctgctaagagcggggtaataatacagccgacctactggctataagtttctttatagccttctctcagcctacccatataatagttaactcttcacaattaacatagagcctacttgtctctctaacagaatttcttggttcttgtgtccaagtcggctgtaagtttacagcccgcttctcctctctctactatcttcttttctccaactcagcatttagccggctatagcctactattatacttgctctaatcagggttaggtgacagatgaaacagtgtttatgacaatttattcgaagcatggacgaataaattaaatattaaaaaaatgagaaacttgttttaaaaggttgtttaaaacaacgatgaggaaaactttcccattgtaagtttggacaccatgtctacgataatctatagtagtacacactaccttagttccataaaaagacaacctagtaacacattctagttgacatacgattgtcataattcgtagtattatgatgtgtcatatccgatcttaaatttatttttttatatgatagagggagtaagttacggagaatgtgccctcaaataatgtttcaacaatttgaatggggtctaaagggcagaacatatttgtagagcctcctaggtattgtgtaggtattgtttgggaagcttaaaatttcgagaagcatctatttcgtagctagcttacgagaatttggaaaaatatgaaactcattttaccggattctataaccccatattcttagaatttcaaaaaaaaactatactttttagaatgagcttttgtttgggagaagatgcagctgtcgtaaagctcccaaaaacggaccctaggacttcaatggaactgttgctaccgcacacatactgccatttggctaacaattttatccaccgatccactcgtgccacgtttctatttgacaattttcggaatctaagcccctttgtaattgagaaatatcaaatggattttgaattttgaaggattcaatttcctataaaactatttgatttatagaaaatggtaggatcttctcataggattacatttatatggttcaatttcatatgaaaaataagcaagaggtctaacttcttgaaaatttcctgtgatgctattagaggctcctcttcatctttcctatattttctattcctacaagattagaaaaacatgcaacattaatttctgtatgtgtattattcctatgtgtttcctataatgtatttcaaaggggtctttaaaaaaatatcgagtgtcacttatacatttcagtaacatacttaacaaactattataattattgattatgaataattataataattaataatttgcaaaatgggccatcgtcatgcgcacgtggcagtttcaacgtagccacgcccccttcacatctcatacctaagaatcctgcaatttcttttagcatatttccattttgttggtccttactgaacggcttccttttccccctgagatttctatagaaaataatgcgaatgtgaggtagcttacataaagtcgaaaacaatatcttttctacctacacttcaagaaaaagtagggggggaaaaacacagtaaattccgtagtaatagcaaataaatgggccttacatagacggcccagcccatttcaacagtaagatctccaccgagtcaataaaacgcagcgcctcctctcctctactccgctccgccgtcgctgttgctctctgatccctagggtttactttcccctcctcctcgaactctagggtttttccgctcgctctccgccaccatgacggccgccgagacgcaggaggagctgctccgcaagcacctcgaggagcaaaagatcgaggtgatccgtccactcccagcttccctccccccgccgctgttgccctcttcttgtgtgatagaagtctgttcaagaaggatacgatcttttaggatttgtgcgactttagatcggtgggtttggttagatcgtagtggtaaactgccggatctcgtttgctgctgaggttgcgcggcttttaggtgcgagatttgggtggcgaactgagtggttgttggagtgtggatttctggggatcctattgtcctctgcgatcaggagttctttttttactttatggggattctcgttgatgaactctgttgacctctgcaatcaggagttattttcctttcttggaattctcgttgctgtaagtctataggcctcttgcgtgctagtagtagttatgtgctccatgttgtttggcgattcacctatgaagagagatcggtacttctgctttcatggtactcctgtattaaggattacaagttctaaattgattatgaacatgctgaagctagattaaaagcgttataattgtttagcaccctgaagctagattactgctgtttaactatagtgattgttacattagtaacttgggctcatttgttaattagattgttactctaggattctttgttttcctactgcacaaaggtacaagcccttctcttttactcttgagaaaagtccttccttttatgcatagcatgcttattttcaatttggaaatagcatacactggcgtgaatactcactattttattctgcatgtggcttggtctgttgtgggttatggccctgctttgcagggcatgtttgttacttgacagtcagttaaagaaaatgtcattttgcatgctttcagggagatgagcctatccttgaggatgacgatgatgacgaggatgatgatgatgacgaggatgacaaagatgatgatgtagaaggtgtgttggaatccattttagttattgtaatataaaggatagatatatcaggtggctgcccattctctggttgtcgcatgaaacatctctctatttctttaatctataattcatttattgaagcgatggatatttatggagcgcaaaatagttttttttgtagttaactgatttgctaccttcagttccattttgcaaatattctattctttccatactagaactatgacttttgttgttttaattcttcttttgtcatgttatgttcttgttcttttaaacttattcatgcttccctgaattgtcagtgtgagccatctgcattaaaaatttattcacatgctatactgtgatagcaccgttaggtcttgttttgatacataagaatttcaattaccatggccatctcccactttccaaacagggccttattggtacaggatgaatgcttgaacagatcttggttaagaatatactgataatcttggtggagcttgctagatgtattgtatataatatcataagtgataccatatttgtttcactaggagtttagtatttgtgcctttgatgtcaggccaatctaagaggatatatagttcacagttcaaatttacaattataaatccccaaccaagaactgttatcattagaacccaatttctgtttcacggttactcgaaaacagtcaaaggcttcagaaaaactatacttctatgtggtattgtagacttactgtccagtgtttgctacttactgtccagtgtttgctaaatgctgatggctttcctttatgctttgcaggagcaggaggtgatgctagtggaaggtctaagcagagtaggagcgagaaaaagagcaggaaagccatgcagaaacttggcatgaagaccatcactggtgtgagccgtgtcactatcaaaaagagcaagaacgtgagctgcttaatcactgttatgccattgtttcttgtaggctcacagaattgttatataccattgcattttgcttaacttttccctgcactaccagattctgttcgtcatctctaaaccagatgtcttcaagagcccaaactcagacacctacgtcatcttcggtgaggcgaagatcgaggatctgagctcgcagctgcagactcaagctgcagagcagttcaaggcacctgacctgagtaacgtcatctcaaaggccgagccttctgcagcagctcaggatgacgaggaggtcgatgagtctggcgtcgagccgaaggacattgaactggtgatgacacaggccaccgtgtcgagatcgagggcggtgaaggcgctgaaggctgctaacggtgacattgtcactgccatcatggagctgacgaactagtggaatcacgaaacgttgtggtggggatggaacttgtgggttaaattttaatgttgagggcgcattgataggatgaaccctcctccttggttatgctatcttgagagcggtaggtagtgttacgaaacttcaaggcctatatcatcctttgataagatcgactgtttgctatttaatatgcctttttcattcactggtctcgctacacatgcctgcatgctccatggcttctattatcgaaaaactgttgaatgtgaatgagtatgtttttttgcatccaagagtgttgtgggactgacatttggcttaattctgtgcaacacttgtgatctgcccactcgcgcgtcgtagaattttgtaacagctcaaattaggtatatgtactactatgtaaaaaaaaaaactaatcctaactacatatgtgtacatgctagcatagcatgtgctcaggtaaatagctatttgatttttttataggaagttcaagcatttgttcaagtaaatagctatttgatttttttataggaagttcaagcatttgttcaagtaaatagctatttgattttttataaggagaggtttcacggatgtgttcaagtaaaaatagttagaattggattggactatttatggagaggtttcacgcatgtgttcaactaaaaataaatagttagaattggattggattattaatgagacggtgagatttcaagtggtaaaaataattagaattggattggattatttatgagacagcgaggtttcaagtgtgtgttaaggtaaatagttggaattgaattttttatgagggagaggttagggctgtagcgatatgaagaaaccatcagtactgcacagagaactcaattcgcagcaagtcatcgaactcacaaacgggccgtcccgtcctgtatcttccttcatcttcttgccatagttgggcacttgggctggtgcgccgcctaggcaccggcggcggaggcggcggcgcgccacacgcgataagaccgaggcaaggcggcggcgtgccggtgcaccgcgcgcgcaccacacgcgacaagctcgcaaggcggggagaacgccacaacgattgcacgcgccgcccaacagtttgacggataccaggtaggcgcgtatggccgcccgccggccgctcgatctcttatcttctttctctccctccccttgtcgaggttttctccgcggaattaggctcttctctctcgttcccggttgggcgacgacgcgtgatgggcgtgactgagttgctgcttgttgctccaaccttacgagcgcaaagtgttcgacgcaatgcctcagagaagtagccgcggcctgcacttctgcagtcttgcctctgttgaacatctggcacatttgtgctgctctgaactgaaaagattatgctctgatctgaaaaggcaatgctgaaactgatcgtgcaaaatccacaacatttaattttactcttcttttttttcttctaaaactcttagtaacattttgcagttcctaactgaagctgatgctgaaactgatcatgtaaacttctcacatttttctcctgcacgtccccactgcatattttttttgagctcaatagattaaccgatggtgaatataagaagtccaccggaactgggtgggcatgaagcttgtgttcaaaacggccaattttgtgccttccatatttgaccaacagattgcagatatgccaactatcactggtttactacgattaatacatgttcaagcaagatgaacagcttacatatgttcctagtaaactttgccaaggggacatgagtagtgctacaccacaacaatggcatttatccactttccagcctgttctgaccaaattatcttcaggtagaatttgagtgtcacctagagaaatatttttatcatcagaggttatgtaattttccgtaggaagtcaaaacagtccttatggtggcacttggatctcctgtataagaactgtaaaaaattgatattgcggtgattcattcagtgagtaaacattttagacacccagtgaaattcaacacacttcattaaagcaccttccttttcttttacactatggtcatgttctttcttttttggctatcggcatacttgtaaatcctgcttacgattcctcaaacttcatttagtacctgacttgatatttttagtttcttgattcaccattgcctgcatctatttaggagcgggagattgcacaccaaaggtcaaacaggttgatctaaagatgcatagggaccagctgattgggtcggcattcatcgcatttggcatcatattatttgtgggtttcttctatgctgcggttttgaccaagatgcttccaccatatgaaaaccggtttctgtcagcaatccaaaacgataggtaagtaaaaacaaggacagaacagatgttcagcatcattcactgttttcatagatatgttcttttactgcatagggcattgatgtacggttgcaccggaatcacctaaattagttttctgcttatatttacaggtattactgcctgctcataccgttgacactcccagtgataatcgtggctgtctatttgcattggctaagcatgaagatgttcaagcatgcatgaagcctcattctaaaagtctgaagttctttctcaaatgacaacctcattatcatggtgaccaaaaacatactccctccgtcccaaaaaaaactcaacctggacaaaggggattcatgaggttttttgggacggagggagtatattactagtatcgttctcaaagtcagcgttagacttttacaaccattaatatatatatatttttctgccaggaattcaaactatacataattgtactatcgtagaactatttgtccccagctccgtctgttgcactagaaaaaaaacagactaatttaggatcaaggcacaaacaagtgtcaaattttttttgtctatcaaattttgccaccagagtataattattgtttatagtacaaagacttcaaatcttgtgcactgccttttatgtcaattttttaccatgggtcttgcattgaatttttcttttttttcaaaaaaaacatattgttgtgctaaaaaaaaagagaaaagaaacaaaagcaatctaaatttggtagcgcgttggctttgctatgtttacccgggatatgtttgggccgtagagattgtcacggatcgggctatagagagcagcagtaattttgagttaacaaagcaagtttagagttttgatcctgtccaactaatcgccgggttaatcgggtctacacgcgtgacatgcgccgcaacgagattaccaaaaaccaaaacaagcaaagggcgggcggttcattcattcacagaagaagagggccatcactaggaaaaaatcatcatggtcgtcatggaggggagagacagtatagcctaatctaatcccagattgctagtgattagcacgtagatacatagaagcgatcgatcgaggacacatcgagaaaaaggtaaaagggagatcaattaatcgaagaagagagtttttgaaatatcgatcgatctagctatcatcatgtcgttcatccggaagaagtcgatggagttcttgaagagcttcgaggtgccggcgaagaacccgtcggaggaggcgcagcgccggtggcgggatgccgtcggcacgctcgtcaagaaccgccgccgccgcttccggatggtacccgacctcgacaagcgctcgcaggccgagacccagcgccgcaagatccaggtacgtacctgctctcttcaattccatcggcgtcgccggcgatcgcctatctccctctccatcttaccttctactatcccttttcatattaaagtaattctgaattttctttgaaatcaaactactttagctttaactaaatttacaaaatatatttttttattttattagctttaataaaactaatttagtactaaatattgttgctatatttttttcataaacttgatctaactttaaaataaataacttgaaaaataaatcaaaacaacttatataatattaaataaagaaaatatttttttgcatcgatcactgcatgcgtcacttaattagatctgaattctgcaatctgcaatgcacgatcgagcatgcacgcgtcatctgcgtgcatgctccacacacacggacacacctcacacctcacatcaggaattacatgcaactttgaagcatgatagagtgggaatggcgtggaccgacatggcattggtctatgtagttgatcctacatgttagatttcataaatgttatacacctagttagagtatagttttatattttgtacaacaaaactaaaatgactcaaatccaataaatccgagtctcactgttttggatcaacttggtcaggtaggatgtatataaaaccgtgaggtatctcccattaggatagtggcgaaaaaaaatgttttggatcgactcggtaaggtaggatgtgcataaaactctgaggtatctcccattaggatagtggcgaaaaaaaataattatagggcctcattgtttggcatattcatatgcttatcaacaaaaatttgaattttcaacgttaaatttggagctgattttgggtttttttcatcgaagtttatttttcagcttttgcttttagatcgctaagaacacatatataaaagttttattcacaaattgattttcatttgcaaatatgagaaaatatgcctaatgatgaggctgctagagccttggcacacgtgtgcgaataaatatattatagacacctttaaacactagaaatacaaggcattgtagtggtgtgatacgccggtgagcccaggccttgatccaccccctgcatcaggaaagaaatatgtgttccattacaatctgatccacaaattaaaatggatgtgtacaaaattaagtttatggctgacattatacaatattaatttggccgtctttcttttctttggcagttaacgtacatgacagaattaagctacattaaaagtcaggtttccatgttttgaatacttattaattgtattaaaattttccattgaaaagtttacaatgtctcctacttctggaccttggaccttggagtatttgtcattgatgtcttaccgacatctggaccttggacccacatgtcattcaaagagggaatgccacgtgatgatttgggcaaacttttagtggcacaaaaggaattcacccaccaatatagcattaattgttctagtatatatagtgtcgaagcctttgctcttgctatttattcctcataaaataaatttatatagtctttgagagataacaaaaaaattttagtcctagttgccagagttaccaagagataacaaattttgcactgaaaaatatggtaccaaattttggctaggctgtagattattctcgaactgacgctgattttgaattctatgcgatatttttggcgcctttgttactcgacaaaattttttcatggttatatgaagactaggtaaaaaaaactagtttgcctagaactactcttaaaaatcaaaattaaaattcgcccccaaaaggagagggaaacttagaaggtattgtcatgaagaaaatattctttccattctactagtctgaatgtaggatcttaattggcattatagcatatgactgaataaaaaaaactgacgtatgtatgcattggttacaaaacaggagctctgaatttaaaataattaatatgaacgttacatccttggcataagaaaaaactcgtccattcgcattaacaaagaacatagtaccacatggttttaattagcatctccctctggaaataagttcattaacttgatggtacaccctgtgattctgcctgttcaacccaacacaattctactccttttgaaacacagtcaaattaacttcgaaaacctgaaacaatctatg

SEQ ID NO: 4421 - DNA, 27170 bp, Oryza sativa
taacagctaaacttttggattcaaagtcgaagaggatatgcaacagctttgaataaaaagctgcatgaaagaacccttatagttcttctgtaatagccttttgatatgtcaaaaggaatttgaaattttgcactatatatcatagtaccaatggcactagatacagctacaaccagccattttaaccagaaagattaaattgaaagaaggtaattttatactagtaaaaaaatggaaaaagaaactatcatactgtttcaatatactagtaggcactacaaagggggaaaacatcgaggcatgcaaatattgtggttcactgctagtttccttgcccaatgtgaacaattctcccgttaatcatttttttcaacaaaaaacggttaagttagttctatgcaaattatttgtttgaagatttcccaatatatttccatctagcagcaagctaaaacgtaatcaagcaaaaaagaccagctctaaatgcaagcaggaggaatccactacaacattttgaagtaaaaaagggagctaaattacccacctctcccggagcaaagcacaatcaagcacaccaaaagcgccgcctttagtagcccgcggcgctccatgccctaccaaaaaagagagagaaataaccaagcgcccatggcaaatcttggcaaaatttgcacaaatcaactcacctgatgccccaaatcggccaaatccaccccggaaattctgccgccgcgcgatcgagctacctgctaccgacgagttggggggaatcggagagtggcgaccaatcgatgaaatcgaagattttattgccgtatataggagtagtaaaagattattaacaatccgagttcgtgtaagtgtttgagctagtgaagaaaagtgaggagcaaaataagttaagagaggcgagaaataaattaattaaagattaaattaaggagcgagaagagggaacacgaaatgaggattagcgaagatatatatatagccgagccggtcttgtgggtcaaatgaccaatttgcccctaatgcttatctggatttagctgattaggatggcggtttcgggtcagattggagagaggaagcggatcgccatccgataaggttcagagcatctctctcttcgtcttcggtctttgcagccgaatttctttcttgttcggccatgccatagagtgggctccacacgtactgaacagcgattttttgctacagttttttcccttttttttcattttttacctttattaatacctcagttccaaaatgtaacatagctaaaaatgtttatattttgggatgaagggagtatattatcatatgaagaataactaaatatagtcagttgtctctcctaaaggtgtatccccatcttaaaatataatataacgaattctaaaattcgacacataggtcataatttcaatatgagttatgatttatgagtgtagctttttcatcacgtactagggtggagtagttgcgtaggagtagtctttttaattttctattaatttgcttattgcaatcttgattataaaaacttacaaactttttaggtttttattgtagtttaaatgagatatacaacacaatttattaatgattacatattttacaatcatatgaaaaatgcattttgataacacagatgaagtcatcaatctgaactaaaaaccaagtatggcatttttttctttgtcctttaagatgaagaatcttgtttcaaccaagaatatttttggctatttagaataatccgttgcaacgtacgggtttttgctagtatgaagaaaatatgttgaattagatatgtgaaggttatgattgattgaaaaaaaaaacgatttatgtgagaataagaggtgaattactatattctaaaataatttttttaatactagaatctgctacatttgaatacgaccgaggtagtgctgctagataacgcacagtacagtcaacaattaatgtacggcacccacaaaatactgtttgcacatagtttagttttctcactgtaatttaagtatgggtatgtgtattttgcccccgcgtcgcctcccccacgggcgacacgggagacggaaaccgccggcgtcgcccgctcctcccccctcctcctttcaccgcctcgccgccgtccgagcagccaccggcaaagccgcgcggccgcaaggatggcggcgacggggcttcaccctcgtcttcgtctccctctcccgtcgcggtgggaggccgcgcgcgggacgcgcgaagaccgcccagatccgggccgccacggccggatctggcggggaggccgccggcggcgggtcggtgtgaggtggcggtggcagttggtggtggtggcggcggggattaaaggtggcggggtggtggcagcaattggtggcggctggcgccggggaaggcaacgacggtggcgggggagacggcaatggcgatagggatggcgtgcgtgctggcggcgtgctgcttctcttgctgggggcgtcgatagtggggttggagatggtgcggggatggaggtggcggcgaggcttgcgacggaggccggatctggcggcgaggctggcattggcgaccagatccaggcgctggagatggttttgccccggtggcggttgcgacgacagcggagagctcggcgatggcgttggggcggttgcgttggcagtgccagcggtttgcgacgacaactgctggcgtcggtggctggtgatagcggcatcggcgacggcagccgacttgcagcggccgtgactgaggagacggtggcgacgtcgaaggatgtggcagtggaggtggggaaggagttgggtgtgaggtgacggcagcgacggtgaggtggtgaccgtgacggtggtgggaggaggcatggcggcctcggacggcttgccgagggcgtggcagacgactgcatcggccggcgcagcatcgtttgaaggaggggtcggagaccggctggacgcagagtggtgtagccgatggcagcggaggccggctcggcgcgagaagcgcgggcggcggagatagaggccggcttggcgcgagaggcgcagctgatggagggaggccggattggcgcgagaggcgcgtccggtggaggaggccggcttggcgcgagaggcgcggccggcggtggaagaggcgcctcggtgcatggtggagctgccggtgggtgtggcgcggtcttcggcgcacgaaggctggccggcgggagcgtcggtgcaggggccccacatgtcagcagagtttgagtggtggtggagcatcggtgcatcagccgtagattcgcagatggtgagcggcgggtgaaaacctaacccggccttggctgaaccgacaacgatggttaattccccctcctgagggcattgtcgtgctgtctcacacctcaagggtgattaccgggcgaaagcccagtcttggctcctttgagccctgatggacggcggcggcggtcttccgtcgcttctctttttgaagacgtcgttttggcacccccttgctgtagggcgatctcgtctgtgttcctttgttggtctagcggcggccggtccggtgctaaccttctcctggtcgtgtgtgttggcgttgccggtacgtgggtggtggtatattttttttctttctcctggttatgacccttcagggttataatcttgtaattttttcctgctctatcaatataatttcgcaccgtctcgtgcgagtcgttaaaaaaaagtatgggtatgttgcaccaaactagtgatggtgtcgtcattgccggggacatcgcatctagagctatagcttggtctctttactctgcacgagtatccatcagtttgttgagttggttatgcatgaattcgacgtaacttcttcatgtggcaataacgatgtaacgatataagtatgatatattatgatgcgcaagtagctagtgtactgcaatagtcatatatatgaatagagaggcttgattaatttggcttctttctgaaatgtttaattatctaaaccttgtttgaaacctgctacctgaaagacgagcgatcgatcgagtcagcatgcaattaagcatcgacgtcgcgtgaaatggcagcgaatttagcgtgtgatagcctcgttgcttgaacgatcggagcagctcacctctggaatcgaagaagcctgacacgaaaaggcgagagagaaaaattcttcatattaattactcgcttaatatatactcccttcatcctaaaatatttgacgccgttgactttttttaaaatatttgaccgttcgtcttatttaaaaaattcaaaaaatttaagtaattattaattctttttctatcatttgatttattgttaaatatacttttatgtatacatatagttttacacattttacggtcaagcatgtttaaaaaagtcaacggcgaacatttagagtaggagggagtaattcagacgtgcgggaaaccgaaaggaggtgctgcgtgcctgaatcgaatcgcatcatattgagcgatcgccgacgcaggatggcaggttagcatcatcaggatgcatggaaatgtggaagcactggatttaccaaatttatctcaataataatgttaacggattagattccacgctctgcaagcccaagatattgggatgtgtagcggtgagattcggttgttgaagatgcatcatctagcaataggatggtactactacctgtaactgcagtgcacggtgagtgatcacgcacgtcagactgatcaaatcatgatgttgcgattctcggcgatatcgagctgcagcgtctatctacggagcagagctctccttgatcaggtccaatattccagtatggtcatcaggtcacctgatcagggcagctaaccaacaaccatttgatcttggtgtgcagtactgcctaaatgctatattcgttttaaaatattattacaaaggatattttagaacggatgaactactgtaacatattggagaataaaaattctctaataagcaaaaccaacatattagagaataaaaaataatttttagataaaacttttatatgtgtgttagcgacttaaaagccaacactgaaaaaaaaaccaagttgaaaatatcttaaaacaaattcgtaaaaattatgtttgaaaatacaaattttgtcaatggcttcggtttattagggcaactagtgagactaatatatgcgagcgaaggaacctaaagtgaactttttcctgaagaaatcaaccaaccgggccttgccttatataacggcccacccatctccccctcccaggccggacgcggagcccacggagcgatgcgatggaaagaaagccagcgctgcagcggcgcacccaggcccagcgcgggggctcactatcaccaaactcgctgattaattcgcgcgtccccccaaccccaccgccacacgaccacgagcgcggtcgtgcgatgccgtgccgtgccgtgcgaaacggctgcatatgcatgctctcgcatctggactggatcaacccaacggtgaccctgaccagtgaccaccggcttctcttctccgccggttagtgctgctgcttcggcggcgatgcgaagataggattctaaatttataatctcccagatggaagtacacccctttttttttatatcaattaaataattataaaaaaattaacaaggtagattaatatataatatatcactcaatgtttagattcgacttctacaagttacaataaaaataataaaaatagtaacaaattaaactgtaactagtgtattttttttatttttgctgtaacttataaaaggcgaatttggacttgcatgtttatggcgtaatatattacatattaaaaaatttaaaaagatttcatgactatttagttgatatgtagtgcttacaaaagtttccccatctcaaatcatcatcatccaactactactgcaagttcctacttctgtcacctactgctgtgctgcattccctgccccagatcgatcaggtccccaactcacaacgacccatgcatctgctgaacctgtgctttactgaaatcatgcacaccctaggttcgttattcttctctcacctctaattctcttcacatcgtactatgttacatgcaccattacatcaggtacatattgctcggtattcacaatggagtataaacctacctccgatttgttttcattccatcccagcagcatcctattctgcttgtttcgaccgatttaacagaaagatgttcagatacggttgctactacaatacaaacaccttttctgaagtttccgggtttttacacaaaagttgcagaagcacacggttctccaaatcatttcatatattccatcaggccgcaaatcaacagtatgcacataaaaattctaacaactcgcaacagaaacgagtctatcacaattcgaaattcagcataaattatttcggaaactgagcatatgcaaatcggtcagaaaagatcggaacctatgcctggctttaaagcttgacgatgcctcgtcgcttctcctcgatcccctctgctcatctgagaggatcggagcaccgccgccgccgccgccattagtagcaggggtacaccacgcagcgcctgcgccgcggcggcgtgcacagcatcagcagcagcaacgcgaggacgacggcgacgagcagccccagcaggttgaactccggatcgtcgtccgtctggctgcaacacagcttccccatgccacccgcttcagaaggagaggacgagagttcttggcttgcaagatgaacttctctcggtctctttctttgagaggaagtagaagagaagcagggcttcttggcagtagtgggttttctgaatctgaaagactctgaaagactccggatggaggtcgtctcgtctctgtattctatgacactttggctatgaatcttggggtgctttcaagcatcatgtgggctggctggttgttgaggcatcactgtctagcccttccatgatgcaacttcttttccatggctatgtcctttaggttggatatcagacaaatcgaacaaccaattccgcaccaaccatggccaccactaccagcacatcaggatagagttcttgtaagttataactatgcagagattgaagtgcatttcgggattttactagtgttgattaatcttgaaatgtctagttttttttaatttctttcagatttcagtatggtggacctgatcatctctcttttagccaagacctgatcaatgcaaacttatacattcagttaactggcactgtcattgacgtagtattaatttggatataggatcatcgctgatgcgctgaaaatcaagttggatccaccctttgatgatacggaaatgccaagtggtgaaagaccaggtcacattaatttgagaacctgttcttttattcttctctagcacggttctgaaaaacaatggttcctctcttttttttttacaggacactgttgaatattctggtgagtaatccctccgttccaaaataaatacagttttgtacggttcatgttcaacgtttgaccgttcgtcttatttgaaatttttttattagtattttttattgttattagatgataaaatatgaatagtagcaattatgggcgtccactgcttcacatgataatcacatcactttgggttacgctacgcacgtcatcagctttcattaatagccacttgctgtcactgtatcatgatcctgactgcaattaggcttcctaatgtggataaagacttgcaaagatggctaccaattgctgctgcttaatctgaataaagaacattcttacctgaactaacacaagggctgcaggctgacctagactgcactgcaatttttttctctgacggtgacagattcagcaataatgagagatcaatttactgatcccctcgtggctgtattacaagccaagcaacccctaatctacgtgcttattaaataatacatatacagcacatgctaatcaacgttaaatactcgaaattgcacaaactagcagtcatcatctcagttgaagatgaagtatttaaccaacaagaacagataagcatcatgtacagtttcttgctaataaactgaagggagaaaatttggacatttcgtggaggcatgcagcaatgcattttgtttggtacgatgcgtctcattttcaaatttcaattcagcggtgcttcaattggatcggcggtggcttgttgttcttgtttcggcgactcaattggagcggcggtggcttgttgttcttgttcgtcatcctttttatccttagcgacctgctcctctcctttttcatccgtttttgttgctgtcatggcctccttcaattcaattgtttgtttcccatctgattgccctgcacatggaatgggaacgtctaggagtattatgtgagcagttgaaatcggcagctgataaagttcatctcttttttatttttaaaggaaaacagatcagcagaattatagattgcaatttatgcaagcatgcctagatcactggatgtaaggaataatgttgttagagacaaaatgattagaaaagatgcaaaagaagaataatgatcgttgggtcccctgattttgataaacacaatagatgagataatagcatgtgcatgtgctaccttcggttttttttttttgagctgctaccttcgtatttagattattagatatatataacactgttgattttatgcagtccttggtgcacaactttgaccactattttctaagtattagaatataataatatgatctattaaaatcataatgttttaaaagtaattctaaataaaaattttacctgtatgatctcaatttttaaactaaataagtgtggatgatcaaagttttgaaatttcaaccaaaatatagttaagaatgtcatatttaacgggaggcaggaaatttcagattattatttttagataaatagtccttgtgcgtgtaatgtttagcaatcaaagaaactaaattgaaaaagtgttttcatccctcaggcgatatctccttgtttcatgcatgccacctaaatagttattattttttttaaaaaattacaagataaattaatatgaaatataacacttcacaaaagtgcatgttaaaattcaacttctacatgttgtaacaaaaataattaatgataactatttttaatttaatttgttatttttattgcaatttgtagaaatcgaatttggccttgtatgtttgtggagtgatatatttcatattaatctatgttatttttttaaaaaaatttatattatttatacgtcatgcaaacatctagggacattccctctgaaccttaccatcgtcatctttcgaaacggcaatggatttctcctcctctgtctcctgggagacgatgatctcctcgtgttcgaccttgatctcctcgcgttcgacttcgaccttggtgatctcatctctcgaaatgacagcggatttctcctcctcctcctctgtctcctgtgagacgatgatcttctcctcctcctcctcgaccttgatctcctcctgttcgacattgatcgcctcaatgttgcttgtctccttcttggcatcttctgcctgatcaactccggccaccgcctccatttcgccattgttggacttagaagagctaggttgctctagttgtgctacctcctcgccggccaccggcgccgggacagcggccgggaaggcggcggcggcgctactactggtgtcattctccagggtggccggggcagtcgtcggcgaggtgacactagtgacgtcatcctcctgatgaacctcgtcggcgttggcgacgaccggccgggcacgggcgccggggaaggtgacgctgccttcgtcgtcctcggcgacgggggcaaccgcgaaggtgatgctttcgtcgtcgttgggctgctcgtcgtcgtcgtcgtcgtcgtcgtcctcggctaatgccgcctcgtcgtcgtcttcctcctcgacggctgcctccattgttgccgtggcaacaacctcgtcgtcgttcttgttcttgttcttgtcctcctctgctttaattttctcatcgacggcggcgacattctcggttgatgcgacgtcgttcttggcgtcagtgatcttctccttctccttgacgaactcctccttcattggcactactacatcctctttcttctcatcaatggcgaccttggtcggaatcaccttctccttcttcttatcatcggtgacagcttcttgtttgttcttggcctcctcctttttcttctcctcgacgatcttcttcacggccgccggcgtcgccttggccgccgccgccgtcgtcgtcttctcgacgatcactacgccggtgtccttgacgacgacctcatcggcggcggccgccgtggtgctctcctcgacatccttcttctcctcatcaatggccttctctttcggcgtcgccttgcccttccccttgacctcttcgttgacactgctttccttgacaacggcggcggccgagctctcgtcggacggcggcggcggcgcgtgagacggggcggcgttggcggcggcgacgacgctggacttccgccggaagaggcggcggctggatctgccgccggtggagccgacggtgttgccggtggccacagcttctttggagccaccgcaacccatggcggcggccggccggcgatgtggaggaggaggaggaggaggagacgacggcgaggagagaatgtaggagacacaagagaggattgcatgggaaaatatatgctgcatgcacgcatgcatgaacgaatgttcatatggcgtttgcaaatttagggaaaccataaacaaacaggaggttttgtgacatgtgtttagtgctctaattgcagcctcattgttctatatattcgtagaaaaaaaatctttagcaaggctgtaggtaattccaggtggttttttcagcttcagatggaggtttaactttataatactaaatttgatgagctgttttacctgagatggatgctgccggttttttttgaaactgaagccagcaaagctggtgttatattaagtaggaaaaaaagtatttacatgatcaccaatggtgatggggaaaaacagagaaaaggaagacagggaaaagaagaaaaactgagtcttaggcggataatctcgagatgttttttgctccacatattctcaataacttgattttatcttgtatcttgtccagcagcgtatcttatccagcagctgcatcagagttttttcttgatttcgaaacacacgtctattccactcacaccgtatttcccatgctacccgcatgtggactgatttgttttctttggctttgtctttcccaccttgagatgttctcttaatccaccagtccaacagcggctcattttcatcatgtgtcatgtcaatttcattgcagttcagcctacttaggaccctctcccaaatctgtcaaaggacaatctttgaagagatgttgagctgtttctaaattcctataatatagttgatagaaatagttgtttggccattatctgatctatagctgatctgttgtccaaatcctattttgcagcaatagctaggcaaagtgtttgcatttggagggtgcccattgtttccaaattatttttgctgcagttgagtttatccttccgttgaattgtgctatataggttgacctcacactgtgttttccattgctcatccatcttgaagttatggtatcgtcggcaccttccgtgagggtgatgtcgttgctccatacttggtagaatacctcaaagtactccttgactagctaaactgtgaggttgtgtctgatattctctattcattggtcattagctagtccttcctgtactgaccttccttttcttttggcatgcttgtatagagttgtagccaattccttgagtagttgtccaccaattcagtttgattcctaaaagctcattttgcgtccatctcctattgacatcttgattgatcatgccatgagatgaagctgttggaaatgatatagtatactcacctaactggagtaaatcgggagctgtctgaattttgcccctgaatatctggaatgcaagttgctaaggagagaacagtagttgaaaagttgaaagagagaccagtgggtgagatcgagagttgcatactggcatgatgcaagccattgaatgttagttacatgcaccgatgcacaactactgttctcactgcaagcctataaatcgtccacttggaactacaacatcaaatcaaaccatatgacagcaatttgcaaggatatgttgccttcgctcctgaaaattctgttcttggattgagttctttgtgaagctgtagctagcattttctctcggtgaaatggatccacctgggcctggaggaccgggaggaggccctggcggttggggccctcctggaggtggccctgggggatggggccctcctggaggtggccctggaggatgggccccactacctcctgctggacctggctttctgggtggcccaggccctggccctggttactgggggcctggatttggaggtttcatggggtcctggtaagctgtgtacattacactgccctaaactttctggaagtttaacctcgcgttgcaattgcaaacaaagtttttaattcatctgcttaggaattcacattatcacatatgagttaaaaggtctacgttatgtgcaagttcaaccaatcgaagcacacaccaccgaaatttcacatatcaactcatcaaaagtttgaatctctgaaactctcttgtgcagtttttatgtcctctgctgctgctgcttgctccaggattgttgtgggccattgctggggcgtccaggcccgggtggcccatcgtcacccttctgataccaccctgaccttacccacctagtgaaataatgcgatgtgtttaccattacacatgggaccaaaatcgttacacatcctctgatgaagaacaagtacctgatagcagcttgcagagtcttatatatgctctttactttgtcacttatctctaggggtgttatgcataatcctacttgtttgcatttgttagcaactcgacgatataatgatggttctgctttggtacctcgttgatgccttacaaatgtcaaatcaaatacaacctgacagttttcaaactgacaccagcccaggtgaaaaggaaaacaacgaagaaaactgcaccgattctaagaaagaaccgaatccaacacactataaaaaccccagtgaggggagagaaaagaaatcccgggttagtctactgagccagcagcatctcttggacggttctgtacagatgtaaaagctgttctatgcacgcaggcaattggtacctttgttatatgcaaaaccataatggctagtgaaatacgatgctaaggaatgctcccctttcaagattgatgcgtagctgccctccaattcttgtgacaaactgaagtgtccagctgatgggtttttggaagaacttgacctcataagcgcaggaggtaacccagagaagtaccaagaagtgccacataaaccacaaacagcaaggggaaaccaacttgattccttggtgttcccttctttcgtagaaacatctagccaagccatgcatcagaattagtagacatgtcatgcatgaaacatagtatatgaccagtggtttcaggatggaatttgagtcataccatttcttgctgtaacttatcccgctcctgggtggtagttctgctctcttctctcagctttattatcattttttcagcctgcaaatcagaaagtttgtgtttcacttcagaaagtattatctggaatataagattaaaatcttagtttatcaagcattataagctccatgtttcaggaggatctcattctgaactattgatttgtcctgtccaaaatattacctcttccaattttacttcgagaccattgagctttgacttcaggttctgaacatcttccgttacctgtccaaaatacagagcaacttcaataaaactagtgggaagattgtttaagagacagatcggaaatgtagtgagaaaaatatgtaatttgaagatctctataagtgcagcttagctttagtgcattgtatctagttgcatatttatttcattaaagctacttccagtttaatggaagatagaagaatcacaaaatataaaatacttatttcaagaaatacacttgttgtgtatgaccaattaaaggatgttggatgcaatggacgattggcaaatgtgaccaaaattcgaatcaatagtcagaacaagtaagcattcttatgccatggtgtttgaaaactaagtggagacattttaaccaggaataggtggaattttgtaaaaatctagccactaatagactttccaattgagatggttagcaagaaccctgaccagctaaaattcagtcaaagactagcactgcaggcctccagaaactcaactcatttttgccttatactccacttaaggggcatgtgaaaatagtagaggaaatgcttacatggcatagttgacgactctgcacattgacagccccttgctcacttaacacgacagctgcttttggaagagtttcttctagaggagattccttcaaacttgctaggttttgttcgaaaggatggagagattcgacagtaatggaagaggtatctgttggagggggtggagattctgtcaatataacaggtgtctccttcaatggtgtaggaacttctctcaggattggagtctccttgactggggatacgggtgcaggaacttctctcaggaatgaagtctccctgacaggggaaatatgcacaggaacttctctgagaattggagcctccttgacagggtaagggggtgcaggaataacaactgggtcttcttccagaggggaatgaacctctttctctgcaactggaatttcattcttaatgttcaacgtgtcctttaatgaaggaacctcaacagctgcctcagtgtttggaattccattaattggctgctctccaaaaggatgagatgcactaacaagaacaaccctcaatttactttcctcgatatatctgccactttctttagaaaactgtaaaaaaaaatgatgagttagaagaacaccatgtgtacagctctttccaaaaaaaagggggtcatattcttatgtgcttacataagaaggaacaaggtcctcatctgatgttccataagggacaactgttgtctgaaccaaaaacttgtcttttaattgcatgtctggtggagcagtacgttgtgcttgcatggtaacttcattcagacgagtaaagaaaagaatcaataagagaaaagagcaatttaactgattggtaaaaattataacagaaccaataaacgataagaaacatctgtctaataattactctcccccaaaagaaagcacactgtgcttctttactgcacagttcaactaggaatgagttcattcctagaaagctttatatagattccacagaaaatgaaaatggctatcttgcatgactttccaaaatgagcatacaaaatgcactttatcgtactccctccatttcaagttataagacattttgactttggtcaaagtcaaactgttttacgtttgactaagtttatagacaaatatagtaatatttataatactaaattagtttcatcaaatcaataattgaatataatttcataataaatttgtcttgggttgaaaatgttactaattttttctacaaacttagtcaaaatgtcttataacctgaaacggagggagtatatgctaatatagatcaacaaggtaagtaaatatatctccggtgcaataatccttgcatacacaaaacaatattgccagtgagtaaatgcagtagtgagctactgaacatacctgtgaaatcacatgttgaccttggaaggatgactccagtgtttggtcgaacacaataccttttaggtgatgttgttttaacctaacaaatttgaagggcaatatcagacatagtcctattagatgctcaaacggcaaaaattatcatcctttgattgagcataaaagcgattaaagaatacataatattcagaaaacaaaatatctaagtttagtgtcatcagaaatggcatttaaaaacaataggaaataccttgcattaaaaatacaattttccagccttctcgttaggttaccatataaatatgtatctagcatcactatataattcttgtacaataccataaaaagacatttaaatttagaaaaataaaagtagttgtatgtagtagcagacaaattaatatgtattctttgatatgcccatttggtattcaagaattaaggccatagccgcattcaaaataatagtactgatggacaacttcatggttacaattacctaggaaaggatacacaatgtttagatagcacaatgtacacagtacaccatcaggagctatacttaacataaaaacaagcggcatttgaatttgtctttgagagcactgacaaaccttgaatgcgacatattcattggatttgttgacaagatggacagtacatgaactttgcttcttcacctcaactgccaataataaatgagataccaagtcagattatcattcaaaactttgagacggaatgtgttttgtatcctatactgtacagcagttaaacacatttcaattatatggctgaatgttgtagtttcaaatacaggtgtggtaggaaccagtacgagaccgtcttgttcatccaatgaaaattgcaaagaccaatttaatcatgtgcaaatttgacaagtactctaaattgcacagttcataagaaaaccacctgcagaactaggatacgataattttcagtttcactccccttcctcttttatcagcacatgatgatcttttgagtgatgcatgactaaaaggtaaaaactaacaccaccactccctccttttatgattgttagcatgtgcatcgctgtatcagtccattctcagtagttactgcaaccgcatccaatccaggtaagccaattagacaagcaatcagatccctctcccacacacagacatcagactttacaaccactcgcaccacgaaatcgacctgtcagtaaccaaacgaacagaaaaaggagcagcccactaaaaaagcagcctttaaaaaattccaaaacaaaagtttacagaaaattccaaactccggagccatgtttgtagaatgttatctaagtaacctagagaaaagttaacagtaaaaacaaaatcactcattgcttcttcacttaacactgtaataatctaacaaaaaaaattctgcaagtacctacacctctaaacagaatcaaaaccattcagacaagaaaaattaaaaaatgacagtgaaacgaaaatcaaaaccactaagaaatgaaaaaaatagaaaccagagtggaacgaaaattcccactaatttgaaatgaaaatcgctaagacccttaaacctgttgatcagtccaaacgaggggaaatagttttggaacactaatactggaaccaattccaatcaacagaggctacaaattaaattccactgagggcgaaaatacccggcacgatacaaagtaatactacagcgaagcgaagaaacaggcagggaagtcgcacaccacgacacacatacacggaatccactcgattgaagtcgattcgcccgttaacgcgagacggatcggaattactctctactccactctctatctagggggtggtgaggcgtggcgccgtggcggtggcgtggcagcgggggggacttacaggtgaactggagctcgcgagggtggatctcggcgaggtcctggcccatctccaccgcaccacgaacgagacgccgcccggccttcagcaccgcctccaccgacgttgggtcgccgcgcgcggaagcctagctagctaccaatcaatcgaatcccccgcggactctgaccgggcgagctggagaggagagacaggcggcgatggcttcgagagaggggtggtggaggtggaggtggagttggagtgaagtcgaagacgacgacgggaaggcccaccaccaccaccactctctctcgaagccgttttgaggaggaggcgactctcggggacgcggagcagaaggaggcgagattttccagggactggaggattgatgggggcggccttttcattggtgcgggccaacccggcgtatgtctacccgttttttcacattacgcccctacaaaatctaattttatactacaccttttgtgttacagagtctgatactcccttcatcccacggtaagttactccctccgtcctagaaaaaccaaccttactgagaatcacctttggtaacaattttggtcaccaaatccttactaagattggattttttttttaaacggagaggaagtaaaaaagtactggatatgatgcatactagtaatatattaacttattggatgaaggaagtaattggtaaacagtcagtgagaatctgtcaaataagcaggtttctaggttgttatgcctactatagttatagttcatttctaggtctcatgtttaggaattcatttatagattttgcacctacttaatctcaaaatccaaagtgcgaatctatagttgtttgtaagaactcaagattatcgaattggttgcatctgtcggaaactctctcgaacaaagcctattattcctggtgacacatacttatctaatcataaggtgtatgcgaagtgagcgtatctcaactagttaggttctttatggtgaaaccaatttatccgagtttaaatcctagatttgtcacgggtgcacacgtttacaacttattattctttcagtaagaagcgacgtactcgttgacggcgagacgtcacttcgtcaatctcaagatatatcggtccagccttctgaaggaatggaggtgcttatagaggcatggtgtgtgtgcgtgtgtgcgtttaaaaggaatgagtgtgcgtggggtgtctacatttattttgtgtttctaacaaaaaaagttggtgcatagaataaacatttggtctacttatatttgtgacccgagggatcaacccttatttgacattaggcgagaatttgggcccctgggtgcaaatattcagttggtctgtcatgcctatgacaggtgggtcccgcagcattcgttgtcgtgtcggcaagtgacgtggcaggtgcaggtctggtgccacacacggcacatgcccggaaatatacggcgtgattcattccgctcaaagtcattcctaccagtaccccgcgcagggtcgcgcaagtatcaaccgaatcgtcaaatggtccaatggcccaccgccacgtgggccggcctggttggtttctactgctaccgagagagatccagggggacattgactgtggatttccacgtggatttgcagtcttgcagagggtgcggcatcatggtcatccatcaatactgtagcagtgtagttgcacacccaacagagcagccattgatgcttgtgattgatgctctaccagcgtttctcaaacagtttagggtggggttaccgtggtatataccatagttttaaaaactgagaaaattatcgcacgtgatagccgcgatagtcacacgattttgtaaatcctcttttactcccttcagatgagacttgagagtgaagttgatggtgttgaatcactaaattggtgaggttatctgttgcttgcaagatacagattaactaactaagcactagctctagaatccttttattctattcttcattttattttgttgttttactttacatttgtttgtatgaactactcctaacaaacaaagcacatgctctagaatccttttatttggtttttgttttacttttacctaagtggagtatgtgcatatctctactcttcatgtccatatacgagcaattattaaagttctgataaagaaaatggttgttgaagtcttaaatataagaaaatggctttgtaccatgtttaataaattggaagcacgctaggatagacaacttttgcagtgtactgtttcacaatgaaaaaaaaaagagaaaaaaggagtctttacgaaatagagtcaggacacagaactttgttaatgtgttagtagtattacatacacaatgaaaaaagaagaaaagagtcttcataaagaaaatccttttcacgcaatgattcaagtggcatgagaatcatgattttaaagttgtctgatttatataacaaaacttttcctcaaagttagctatatgatcttctttccaattatatcgtgattaaggagtacatttaataactattatgtaggtttctaagatagagcatacatgcttttgactttattacattatagtaattacttctcctttggggatatctattcgggggttatgtcgatggtcgctagtaatgctagctatatttttccctaaagaaaggcagtgctcctattttctcgcgtggggatttaatctgttttgcacaattgcaacattattaatatcatcataatatagaaattgaaatgtacatgatgcaatatttacagttgtatacataaaaacgattatcaatgctaaatactagtagtacaatataacgaacaaccaaccccgccaatgtttcactagcactcctatgtcattataaaaaaatgtattattagagtgtgttgagagaaggagaaatgagaaaataaaaaaatattatttttaaaagcttaaaaaaatattaatatgatttttaaagcaactttaccgtagttttttcttttaaaaaaattgcttcaacttcaaacgagagagcagtaatcaaacactcactaagaaaaacaaaatctacataattgtgtaaatcgccctgtcctccctgggacttgatttccttcaaaggtactcaggttttcgtctacggtggttgaggtctcactctccaaccgaccaccggccattccaatttcctagctagcacagtagctccaagtccttttccagccaaaccgctcctagaaaacgagaggtttccggacgctctcaccgccggtggccatcacactcgctgacaaaaccgaaggttggtacagtggccgtaacgctctcgctaatcaccatccactgctcatgctctctgctcttctcttttcccagcattgggtgttaggttacgcgcacatatcactgtatatataataccacactcatatcctctcggatgtgtcccctaacacatattctacgagacgaaattcagcgactcatcactggtctcattaaaatcttattgaaagtctacctgcatgtgcgtaatatacatgtacattaggatttaaatcctggtgggtggagtcatgtactcatgactctaagcaccatgtcacttatacttcccctaattgtttttttggtgtgatggtgagaaagtagagaaaaaaaaagaggtcgctttagcaattttggctgtttattttactactcttaacttttccttggatctatccatggatcgaaaggaaaggtctgaaaaaactctgaattctgatcatgagatgagatgacacgagaggagaggcagacgctgacatggtgacgtgcatagctcaggctcagattctgggatctttgagtggacccacgaggccataatatggcagtgccggcccaagttgggagttggtcatcgtctaaatgggccgaaactggatagttacctgaagactgcaccaattcatttctgcccagggagctccttttttttcctttttgaaaagaaaggagcttatctttgtttcttcagaaattcagatagttcagcttcagatggaacacttcttgttactacgaagcagcgaagagatgtcgagattattgccattttagcggacagtacatgaactgaattcaaaccaagctgacaaattgaggacacttttattcatcgatttgaaataggacagacggatggccgacgatactacagaaaaaaagacagtgagatttatcatcatctcaactaattgactgacacgtgtcgaaatggcaacaacacatattccctccgtccaaaaaaaaaaagtaaaccctgaatttctgtgccaacatttgactgtctgtcttatatgaaatttttttataattagtattttcattgttattagatgataaaacatgattaatattttatgcgtgacttatctttttaatttttttcataattttttcaaataagacggacagtcaaacattggacacggaaaccagggtttgtctttttttttttaacggagggagtaaccctgaacgtgtcgtgtctgattattttgtgcgtgcattcacgctctgctcgtacgattcactcactggctgccgatgctgaagtcgaagttgccgcacctggtcatggtgccgagtagcaagccgctgaacccgaactgccacttctccaggtcgaacaccaccaggttgtcctccatctgatgcccgccgatgatcaccgccggcgcggccgcggcgcccatgtcgacgaacgcgaagcacgccgcctcctggctcacctccaccacggcgctggcgccgacgatcgtccagttctggccgccggccagcatcaggtcgacgctcgccgtgtacgggccgatgcgcgtcggcggcagcgccgacttctggtagcacaggtcgaacggccccgccgccggcgcgcgcgcgagcccggccgtggccgccgcgaacgcgtcgcgcaccggccggtagatgtcggagcgcagcgcggtgtacggcgtcgccgtgctcaccgcgacgccgcctgtgccttggcgagcgctgagcgacagggcgcccggggggagggggacttggacgctgttcacggcgacgccgatgacgccgatgtagtaggcggtgttcttggggttcttgagcaatggggtgtacctgagacggtcgctgacctgctgcggcggcgcggcttggagccagaacgggccgccgccgaagatggccgcgccgacatcaccggcggtggggaggcacagtgcgaacttcttctccaccttcagctgcccggcgacctgaagcggcagcgacaatggcgcccgggagaggccagcgacgccggcggcgccggcggggagcgagcccagcagcggctgcggcgcgcacgacgcgacggcggagagccacacctggaacagcgggttcttgccgtcggtggcgttcgccgacagctgcaccgtggtaaggtcgccgtacccgcactggccactcgccgggttgtacgcggtggcggaacacgcgcagcgcccgccgtcgccgccgttgctgccggcggcggtgtacgggcagttggggcggtggttccggttggcgacggcgcacacgccggcgccgcacgggatcgtccggtgcttccccgggcacgtggaccagacgagcgggccggcgaggtcgaggacgagctgcccgccgccgttcttgacggaggcggtgtagagcgacgtcgaggggtccttggcgaggcgggtcagtatgggcttggaaggtggccggtgctggccatcgccggcggcgagcgcgcacagcagcggcgccgcgagcagcgagagcacgagcgcgatcttgtagctggacgacatggccgagtatgtttaatttgtgggtgacttagcatgcgtctgtatgcgtatttatagtggtttgtctacgtggacagtagaccagcagggtttacataaccacggttatcatgtgcaataaccttctcagtttttgaaaccaccgtatatatcgtgataaccgtcaaacccgattatcatgtacagtaactttatcagtttttgaaaccacagtatacatcacgataaccatcaaacctggttatcacgtgcagtaaccttctcagtttttgaaaccacagtatacatcacgataacagtcaaactgtgaggcggtgctaacttcatgtaaaacgatttggtaaacccttgtaatcactggattttcttttatttttcgaggatattggaacttcaactaggcgtgtatatgaagtctacgaagtacatctgcacgtgctgtttgtgctaattagctcagacaattacctcgtggctagtatcatatgggttttcataatgctaaccttgaggtttgcgtacgccacttgaacgaattcaccgatatctgggaaggatatgatattattcttgttagtcgtgacactcaccagcttcgattctcagcacctctcactagctagtcacgtttgtcacgaactcgcaattcagtattatccatggaccatggaccgttggatcaagcttctacggtccagatcgtgtgaacggttggcggtgtgctggtgttgggttgattaaaggtctatttgtttcagctccaacttttaaatctagatacagaagttgaatctgaaataaagttatgaagcatgctaaactcagctctactttttttttttcattttgtgagagctacattcagttctactatcatttaaggtgaaattgaaactatttggctgggctatagctccagctgtactagaccggacctaattcgtgagcctgggctttaactcggtgtaaaatgtgggtcctgtgtaatataatttgggcatgtcctgaccgttcgatcaaatttcagcggtccagattgcttcccgcggaggaaaacgttcatcctgatgatgtgctgatggaacgagagattgggaaaaaaaattaacgaagagagatggaaaaatgaaaaggacaaaatgaaaatataccgccaatggttcggagactaaaactccgaccccatttttcggctgggaaaacgtcgatcctcttttttttttggaacggttcggcgatcctcattccgcgctcgtctgatctcaatgcaatatgtgtgagagtgtcatatggcaatcacaggaaactattttaaacactcgggtggatgtccacccgttttttttgcatgtcatctaaatggttacgaaaaattttcaaaaaattgacataataggttaatatgtaatatatcactttacaaacatgcaagttcacattcgacttctgcaagttgtaacaaaaataacaaatcaaactctaattagtatacgtatattcacagtcaaatttgttatagttcaaattcgacttctacaagttataacaaaaataacaaatttgactgtgaatatacgtatactacttagagtttgatttgttatttttgtgacaactggtacaagtcgaatttgaacttgcatgtttgtgaagtgatatattacatattaacctatcttgtgaatttttttagaattttttcataatcatttaggtggcatgcaagaaacgggtggacgtctatccgagatattagaatccatcatcggcaatcacaagcttgatgctcaagtatatatggattttgaattgttcttcagagagatgtttgtagttagctaagctacatcgtcatattagattagatcagatcatccgagcaatgctcgcagaagaaaacttgctacggttgtgacatgaacatcaggaacaatatattactacactttcatatgacaaaactactcaagaaaatgctcagggggtacaaaaactgtctcaacgatgcatcaaagtatcaaacatgcaaaagactgaaggaatctgccgtcgcaagatctgtttatgaagtgccttataagctgaatccggagcccgagcattcaaggtgtgcattccattcctcacacatcacactgcgaaatttttttgacgggtatcacactgcaaaattcagtagtaagggttgcatttaaatgttaggcaaaggtgtcatatgaattttgcaaaataaacaaaataaacagttttttttcagagaagaggcattgtcagatagaacggtctaaatcctgtacaaattgagaaaaactcttgcgtcccaaacaagttcgtcaaaacctcggaaactgttttaaaaaatagtcaaacagtcataaaaatgcatgctatctaaatagacataaaaaatatgaaaaaaattgtgaagatagattaatatgtgatgtatcactacacaaacatgcaagttaaaatataacttctatgatccatatcaaaaataacaaatatatgattgtgagtatgtgtatactattcacagtttaatttattatttttgttatggattgtagaagtcatgttttaatttgcatatttgtgtagtgatatatcacatattaatctatcttcacaaattgttatggattgtagaagccaatgaggggatgtcccctcgagagcttataatccacgctctcaaaacctccttcggcccaaaggattagactgtgtttgtagccgtaattactatttggttgatcttaccgtttggtcgtttattccgatcgctaacccaccaacagtacgtgagttacacacatctggacttctgaagtactactaaaatggaagtacaaaatcagttcatctgatccccagcgtccccttctccagatcaaacagcagcagattgttctccatctggaaacctccgatgacaatcgccggcgagtcggccgccgccggcgaggtccccatcatctcgaggaacgcgaagcacaccgtctgttcgtccacctgcaccagcgagctgccgccggggagcgtccagttccggccgccgcccagcaccaggtcgatgttcgccacggcgaagccgagccgcgtcgtgccgagcgcggacgcccggtagcacgtctcgaacggcctcaccgccgccgcgcgtgggatacccgacgtggccgcgtcgaacgccccgagcagcgcgcggtagacgtcgggccggagcgtggtgtacggcgcgacggtgctcagcgtgacgccgcccgtgccacggcggacgtcgaggtcgagcgcgcggggcgggatgggcaccgcctcgaggttgacggcgatgccggtgacgcggaggtagtaggcgccattcttggggttcttgaggaggggcacggggttgcggcggagaccttcggcgatctccatgggcggcgccgctaggagctggaacggcccg

SEQ ID NO: 4422 - DNA, 33817 bp, Oryza sativa
agaatttggacaaggtccaggaaatgattgcaaattcaaatcatgacagtaattttctgatgtgtatacgcccatctgtttgtgaggttggtggaggcgtggagtctggttggaccggggaccctaatggtagctggcttggatgcctggggtggacaggtgacctaaacagtagctggggtgtgaaaaaatggtactgtgtgctttactgctttctggaggagattttggaaagtgcatgggtactgtttgctgcaatgctccctttgtccccttctcttacttcatacttactccctctatcccaaaataactccaaccctatcttcccaaggtggatttaagaccaaaatacccataattaataataaagttatattggtgggtgggtaggtttggggtattgaagggataaaatttctcgatttgcggatcaatgataggtaagaaggtagaagctagtttattttgggacaattttcaaactataaaattaatttattatgggacggaggagtagttcatatctaacactgaaaatatgtaacttgctaattaattgttcctcttgtggcttggacatgattggttgctggattgtggctttcctttgtatgatgaaagatgaccaagggcatctccatgcgttgttcacaaacatagagcatgatactgctacagcaaccgcaacattgattcttttgtcgcagcgggctggtttggtgctgggtccacatttttatcgttcttttctccttaatttttctcatgggcgatttctttactaactctggtttgaacgagcataccatctatcttgttatgcaggctcccgtggactgagtccatctcttctaggttcggtcatttgcatacactggagatggcctaagctagatgtgctgctctctcggatgctcgggatcactcactcttggcaggtcctatattatgaggcatcaaatggcttacaagagcatgaaatatttgcaaaattcatatgaaactcaattgttccaagcagagcctgcattagctctggacaggatttattcatcattttttttcttgcccaatttctaaccaatcaattagtcatacttgctacctatcttagcaagaagatcagagagctccctcggcctggagcacatgacggcgtggtcggccccggcaatctcttcgacttccacgcccgggctcaacgtaatcatgtaacggtgcacctccttcaagtcatcctccatggccatcaggcacaccctctttaccgaaccgtagttggcactggtaagcagcctgtcatccttcatcgttggatcatccacgaactggctggtaggtctcaccaataatttcgccagtgtcaagtcctacaatataccgtagatatgctaatgtaatgagatttgagatatcagttagtctgaattctcaaattaaatgcaaattggaactttcaagaaaccagagataatatgctagttcattgcctcagctggacttagtggataacccttctccgccaagaaatttgggcctaggaggattgcagttcctggaccttgtttgttgttgatcggtatcattttgctatccaggagcatatctttgggagctttttcccttatcaactgtacaaacaagaaaaaatatcagtaattgaataaatgttcagacatcagagtgagtatttatcagtttgctgatcagtgatcacctcggggatgatgcgcttgccgacgcacggcacggccgcggcgacgaacacggccacagcaatcttctccgggaacctttccatggcgagggcgatgctgaggccaccgaagctgtgcccgacgaggatcagcctctcgccggccggagcctcagccactgcatcgaggagcggctgcgagtactcctcgaaggagtgcacctcgtcaacccgtgctgggtggacgccggacgcggcgaggtcgagcgccgtcacgcggtgcccctcggagcggagcatggtgaccaccttgtaccagcaccatgctccgtggcagaggccatggacaaggatgaaatgcttgctgctactgctgctgccctccatttcctgtaagtgtttgtggtttgctcttctgcaagtttctgacgctgtgatagtagcgatgaattgatttatacatacattatcgagaaatatatatgacagtggcatttataattttatatgcagtaggtatcatttagattgatgatatatttactggcttgaacgtgctaactgtcagcctttgtaaagaaaattgtgtggactttgaacgtactaactgacagtgatcactagtttagtttggtgtccattacatgttctaaaataaaacccgacaattttatatggataattagctccaggtaccttcaaatttacttgggagatgttcacctttttgactttttctggattttttcctcaaatttctaccgtcccttctcttttcctaattaattgagctggtccttcccctctgttttctgcactaccctccttatctccttctctttgttcatagctaacactgaatattatttgcatacactggagatggcctaagctagatgtgcttctctctcttatgctgtgactgtgagcctgtgaggtcaatcactgttggcaagtcctatattatcaggttactacgacttgtctttgctctcttgtcgttgtcagattgatatttttcttattgtagatttttttaatagatttcatcaattattggcacacaagatcaaacaaagcaatgagaaccaaacttctattatttatacttgtagcgatggactgtaagtaggcttcatgacgaagaagcactgattatttccaaactggcatttttctactcgtatttgttggctatcttgatcagaatgtcgcagagttccctgggcttggagttcatgacggcgtggtcagctccggcgatctcctcgacgtccgtgccagggctcatcgccaccatccaccgctgcatctcctcggtgctggagctgtcagccttggcgatcacgtacaccttcttcaccgatccatagttgccattggtgagcaagctctcatctttcatcaccggatcatccatgaactgattgccaggtctcaccagcatcttcgccagtgccagatcctgaaatgtgtggtagtagcatttttttaatggaaagatgattacatgggcatttgacacaacagtgtaccgatgtgacaggtgagcaaaacccctaattttggaaactgattaattaaaaataactttacgggagatgaagaagatattgcaacttgtaaccggatcaggatcctctgcagtcgactataccgtgccattcctgatcccttgtaacctacctctgctggactttgctggtagtatttttgtgccaagaaggttggtcccaaattgattgcaactcctgagccctggctattgtttatggccaccatttcgcaatccataagtaatccttcaggtgcagttcttctcatgaactaagcatatcgatcacacaacaaaaaacaaaaatattagtggtggttaacctagcattagtagtcattttgcattaaaggacaattatagttcactggtttgattttgtaatttgctaatgctttgcctatagcttatttgaagcaaatgccaaaataaatttcattgttaaaaaagagagtaaatggtaatcccttcgtttcatattatgagttgttttgactttttttctagttaaacttttgactttaagtttaaccaagtttatataaaaaattaacaatattttaaacataaaacaaatatattattaaaatatattaattgttagtttaataaagccaaattcgtgttgcagatgttattattttttttcaataaacttgtcaaacttaaaaaaaataaaaaaaaaatcaaaccgacttattaatatgaaacagagggtgtaataatctctttaaattacgagacatgtcagtttatttttacctcctcggtcgggacgcccatgtgcttgccgacgcacggcatcgcggcggcgacgaacacggcggcggcgaccttgtccgggaacctctccatggcgagcgcgacgctgaggccgccgtggctgtgcccgacgaggaccagccgctcgccgggcgccgccgccgcggccacggcgtcgagcagcggccgcgagtactcctcgaaggtgcccacctcgtcgacgcgcgccgggtgcgcgcccgacgcggccatgtcgagcgccgtcgcgcggtgccccgcggcgcgcagcgcggcgaccaccctgtaccagcaccacgcgccgtggcagaggccgtggaccaggatgaaatgcttcttgctgctgctgctgatctccatttttagctcagctgcttcgaaattcttggtgctgtgcctcgatggattagctgaatttatagaatcacagtttcttactctccaagaagctcggtgagatcatcttgtgctgcaagaagaagaaatggctatcgcactacctgaaaaattagcattttgcagggcgacttgtccctagccctcctgtgcctgccttcgacatttctgcgatgctgccggtgcatgattgcgcatttggaaattaattaagcaatcaaaccaaggttgtgttctttttagtgaagataacacgatgtcgcatcccatcaacttaatccgcaagaacaaaggttgaaagcagaggatgcgtcatggtcacgtagcatcagggatcgatcaggcgaccagcaacgatgacaccacggacacacagtaagccgccgctgaatctgattggttaagagagatcggtcgatcgccactggtgtggataaaccgttgaagtgggcccaaatctcgtgatccaaaattagcccattggtaattgggacgaaatagcccaagttgaaacagatcctctgtagtctgtagtattgttctcttactttgagtggctgatatatgtacctcacatccaacggaactatatgttagtgacacacgttagaggacaatgagactaaggctttatttgaagagtttaagatcttaaaaagtagttagatggtactagcaagcttggctgattggctctgtttgaagagcttaagcacctaagtacaacatctgtctcgtaataattgtatttctagaatttaaatttgtttcaaaatagctattacaatagagtactaatggtctcattaattacttctcattcacaattcttcctattttaccctctactacactctcactcttacctatgtaccatttaataagaagtatcatagtctttcttatcaaaccttaatatatactaaacaaactagaattacaattattttgggatggagatagtagttagatgcaagcaaatttttgagaatttggaaaaactaaaaaactcggtttctgtttagctttttttttttgtatctacatttctcaaaatctagatgaaaagttatattgtttgagtaaacttttaatttgagagaagccgcggctgccaaaaactcccccgaacacgctctaaatccaccacaccgcacacctcatatcaagagggaaaatgcggcatgaagcgatccaagatagccactgtcgcctcgccggcggcgacggtaggagataaggagatctaatgcccacgtccatacagatagacgatcgttcgatccaagaactgaatctgtacatttgttcatcacaagatcgggataaaattgatctggtgagatattatcattagcttcacaaaacacaaccgaaccactgattacatgtttctcttctgcttaacactgatagaagacagatactggaatcgtaaaaaaattttaaccctgctaaaaccatttcttagtcatacttagctgcaatcctgagcagcaaatcacacagctccctcggcttggagcacattgccatgtgatccgctccggcgagctcctcgacttccacgcctgggctcagatcaatggtccaccgctgcatctcctcgtcgctcgaagcatcatccatggcgaccaagaacaccctcttcaccgacccgtagttgccttcagtgagcagcgtctcgtccttcatgatcggatcatcgatgtagttggtgccaggcctcaccagcatcgtcgccagcgtcagatcctgcaagaaacagaatcagatgatctgacgcttttttcaggtagaagattgagatgttttcctttttgttacctctggtgggcttcgattatacagtttctctgccagtaatttggggccaagcagaactgcggttcttggttcttgattcgtgttcaggacgatggttttgctgtccatgaagaaatccggtttgatcctcctcatgaacttgtgtcaatgcaagaacatggaatcatattcataccgatgtctgatcaagctctgaaaaatggtgaagctgagctaatcgagcatggagtaatcggtctcgttgtctcacctcttcgagcgtgatgcccatgtgcttgccggcggccggcatgcaggcggcgaggaacacggcggcggcgaccttgtccgggaacctctccatggcgagcgcgaggctgaggccgccgaggctgtgcccgacgagcaccagccgctcgccgggcgccgctgcggccacggcgtcgagcagcgggcgcgagtactcctcgagggagcccacctcgtcggcgcgcgccgggtgcgcgcccgccgcggccatgtcgagcgccgtcgcgcggtgccccgcggcgcgcagcgcggcgaccaccctgtaccagcaccacgcgccgtggccgaggccatggacgaacacgaagtgcttcccgccgtcttccattcggaatctgggaatcttcgagcacgctctgtgatccagggctgcaagaacaacacaattacaggatcacgacacatgcggtgtttatacgcgcttagattcctaggacttaattcagcttctagaatctccggttttcaaatagtctaaaaattctcatacagatttttcaaatctgtagttgtggtatcttataaaagtaaactagaaacaaaaaataaaaataccagtttcatagtttgtctatatttttacgagttacttcttagaatttggaggattgtttatattcttacatgttacttcctccgtttcatattataagattttcttgcgttgtccatattcatatacatgttaatgaatctaaatatatatgtgtgcctagattcattaacacttatatataaatgttagcgatgctagaaagtcttatatcttaaaacggaggtagtacttcttagaatttcaagcttctccgaaaagggcctagtcacgtaagagcaattgagcatgccatgtgatggcacgtactaaggacccaatttcacgtggaaacagaagttgttagacacctggagagtggagacatcgggcgtgtacgtgctgttgacaacttatggctttgtgttcatcatcgatagatcattgatgtggtggtccaagtcgaagtgtttatcctgtcatcttataaaaaaaattggtggtgtttatcagtcacactctcattacaatgcatatcgatatctgtatgcaacttttgattcttcttcagagttacgctttgcctaatttgatccatggcgtgctgatgaatgattcatgttgtcattatgttatatttctgagggctccttgatctgggtgaaaaaaagaagatttaagtccaacttgcggttgtcatggtgcgtagatgatatgcaagacatcccctcgagggatgaaaatccatatcctagaaataacaagatttcatagagctggaaactcttaccttgatagcaagattgcatagagctggaaacttggaaacttttaccgagatagcaagactttatatagatacaacaggattgtgtagaggtggaaactcttgctgagaaaacaagattgcgtagctctgatggagaggctgaggctacccagacctgctgattcttttcctgaagatttgaagctgtcctctgatgttcttctactgctgtgggagtgtttgaatgttatctcctctttttttcatttttctgtcagaatttgctctatgtcaaaacaacaaatgataattttgtcgttgacagcagaactgaccaacaggggacatctatcattcacttctttcgttcaattgaaagcacaactgaccaatgggtgttttgttcgtacctctagaatcgttttgtgtgcagaatctcttcacgaggaagtctgaagaccctctgaaccttgcacttgcagaactggttgttgatagggagtatatttgataacaagggaggctctctctctatgaagaacttcataaattacgcttaaccaaaccatgccgcgatttggcagtttctacctgtgaactgtaacttttccaaggtaccaacattttgatagtagttgtagcatgtagctggtagagccgtagagcaaattcttgaattccagttcacatttggtagcagttcctcaattacgttgttctagatgtaaaatatcaatcacaacctggatagtcatactggttcttgaatcaagtttttctgggaaatcaatgttaaatgtaacctgcaaattgtaatgttatttagtcgttcttttgggtttagaaagttaaaaacagaatataacagccgcgaaattgcttcttaaatcagtttacgagattaaaagaaaaataggaagtgtgggtcaaatccaggcccgcgagatcaaagcccgaaggcatcaccgcaggcagacatgcagaccaacaaaatcaatccatctctgtacacactaccatgcttccttcctcttctcatccagagcatcggcttattgtgcacagtttacatctaatcaaagtgttctttgcaaagaagataggcaaaaaaaaatgttcttgatttgaaagcagaaaaaaagaaaccccctttagcaagatgtctgagttgatcagataattgtagtctgaattttgggtcaacacatacagtttctgtgaaaggttatcatcccatcaactgttacgaatcttgcttgcttttagaagaatgcaatatacgaagacaaatcgaaaaagccgaatacaaaactaagaatctgaagatcttggcaggctcagaaggatccattggtttctatcaatcagaaggactggaatccctcagaaaataggtaggtattttttggtcatcacagcctccaatcagccagatccatgacaaaaacaaacagaaacgcaaacagaataaaactcaacaatggaatgcaacagttgaaacctcatggacaaatctgattatctgaagaactgccaggagggaggcggcgaaagcggacggagcaaggagaacgaacacaaaggcgtcaatatataaggggattggcggctagggtttctgggaataagaataccggactcgttatattgggctggcccatttaacatcttcttgggctgaaattgttcactaataagacggcccatttaattatcatgcccatttttctataggctaaaagagacaatactccctccgttttatattataagtcgctttgattttttttatttagtcaaatttctttatgtttaactatatttataaaaaaaattagtaaagtaaaaaaaagtcaaaatgactgctaatatgaaacatagggagtatttttctagccatggaggcatggaacattgggatttaatatgtttattctcacctaataaaaaatatttaaactatcaaattttctgcagaagttcaaacaattgtctcaacacgaataaaaaaaaaggtaagctcgcctcgtgttaactccatttcatcagattcaaactccaatacgtactagtacatcactacaacatttgcgttgcatcatggagtggagtggattaggcccatgggccaatatgaggcccaaaggggcccacgccatcgaagcacccgtggtcgtcgtcgtcgtcaacgcccatgtagtccacgacgcgcacgccttcccctcgccggcgatccaccacaccggcgtgctggtcgccgccgtgcatcagcgacccgatggccctcgtcatcgcgccgcctccgccgccgtagagctggccgggcaacagcccgcccaggtcgaacccgaccagctgcgtcgccgtctgcccctgcagcgccgccggcacgacgacgtcgtcgtacggcgcgagatgatggcctatggcgggaagccggtcgagaccgccggcaatgcccatggccgggaacgcgacgccgccgtagcagcccgtcgacgtcgtggcgcccagctccgccgccttctgcagcagcgccgtggcggacatgatcgccgccgctgacccggccggcggcggcggcggcgggaacaccatggcggcgtcgcgcgccgcgtccacgccaagcttgcacccggggaggaacggagacgacaatggcgcggcgaggctggacagcatgcatcccgccatgctaagcggcggcggcaagagcgggtttccggccgtggcggcggcgacgatgttgtcgacgtcggggaacatcttgaggtgcgggctcttgacgcccgcggcgtcatcgtcgtcggcgacggggtggtgagcctgctgctggccctgcagagcggaggtgaccgccgccatgttcatcggctgcgcgagcttgttgttctcctgcgccagcgcgtcgcagaacgccctgtgcgtcacgaagctgtcgcgcctgcatgccatggacacagtagtacaactcaagctcatggacaaagcggaaaactcaaaccagatatcctctcattttttacatctcacttaaaaagtcataatttttttaaaaaaaattagtagaatagatcaatatgtgatatatcacttcataaaaatacaaattcaaattcaacttatataagtggaaaacaaaaataacaaatttaactatgaaatgaacgtgtaattcacggtcaaatttattatttttgtttcgaattgtataagtcgaattttatctcgtatgttgcaaaaagatatatcatacattgatctatcttgacaaaattttttaaaaaaattaataactttttaaacgacaagcacaagacgtcctctccacttccagagaaagctagatctcaacaatggcgagcgcacctggagaagacggtgccgcagtcgcacttgtactcgcgggtgccgcagaccttggagtgggccttccagtcggagtggacggcgtagcgcttgccgcagcggtcgcacttccacttcttctcgccgtgcttgcggcagaagtgcttcttgatgccggtgaggtcgcccagcgcgcggctcgggctgtggtgcacgcacgacgcctccgggcacacgtacacacgcttccgcggcggctcgccgccgccgccgccgccagcgccgccgcgctggcgcagcttccacggcaggttgtggcctcgccggtgcagctgcaggttctggtcgcgctggaagcccttgccgcagatctcgcacacgaaccggttcgtcgccagcagcgtccgcggcgacagcgccaccacctccgcgctcgggtctgcatggcatgcgccgcgttcacaccaacgaaacgtgttagttaaactctactaaaatagtactccctccatcccataataagggattttgattttttactagcactgattgaccactcgacttatttaaaaatttttagaattattttttttacttactttattatccaaaatactttaagcacaacttttcgttttttattaataagacgagtgatcaaatagtgcaagcaaaaactcaaaatcccttatattatgggatggagagagtacttgtagatttttaatgcatgacatcattgacttttgaataaagtttgaacatccatatatattattcaaaaataaaaaatgtgtaaatataaaaaacaaaacaaataaattaaatgatagttatcttttttaaaaaaataagacgagtgatcaaatacgtgtcaaaaatcaacaacttcgtacattaaattaactggaggtagtactaaaatttacgttttatttatgtgggcattgcttagatggttgtgggtgatctagctagagcaaaattttgcagatgtaaatgccactccatgcaagatgagctagttacatttctattgcaccaataacttggtaggttgcattgaacttgtatgtgctatcattatcttttaaataactgcaattatgttttgtccaagtgataaagatctaattttcaatcactcttttaaaccaaacttccaaatataaatcattttgtgcgtgcacctaatttcatatagatattgcagttaactgtcctaacaggcgatggtactagatctgtatgtatatacacagagccaacagaaacaggcaattctctaaaaaaaatagcacgctggataaaaaatgtatagcttgatcctatgtgcacttaattaaccaaaaaagctttatgctaattacatacaacgagcttagctgaaatgatgaggtaaccactatccatctattgagaaaaaacaacaactagctagaggattcagaacttgaaatcacaaaatattcagacaattcaactaagaatgctggccttgtaaaaaaatgtcgaatttatctatctcaagattctgaacgaaactaattaaatttctgcgaaaagactaacacaaactacagttcattatggtcaaaatattctgtcacacagtatatgcgttgtcatctatcgtcctagttttcagtgaaagactgaaagaagatttagactgctaaatagtaccaccattatagactttccctatcaattattgcagtcacaagatcgatcgtcaggtagggcaacacaagaccaaaattcattcaatttatgatccacgcaagaattcagacgaactgaagaagtaatactagatgtttgcatctgcatgcagatggtcttaacatacatgaacaattaactaagtggagaacatatatatgcacctggtgtccctggaaggcttctcttcttcttcttcttcacggccgtcggcggcgcaggcggcggatccgagggaactccggcgacaagctgcagatcactgtcgtcgacattggcgatctccagcgggctacccaggagcagcttgctgtaatacggctgctgctgcagctcaaactcctccatcaattgcttcttccacctcttcttgttgctcagagaagataagatcacggtgcaatccaatccctttcaacaccggtcgacatggatgtcatgcagttagctaactgattcaagtttgcatatgcacatgcagagtttcagcaattggcaacacacattcagagactgaacttctcttgtgtttcttgctctttctctggctgaacttggtatgagtgacagctagctagaggaagaagagggagctggtcttctatttatcctaccaaaattttcaccatgttagtgtagctatttttcccttagctttcagagagaattgaacctgtctttgtctgtgtgtgtgtcagggatgacttgagtgtacaggatgctatatatatacagtagctaactgttaggaaagattaatctagaagctagtaactatgcaccatagatacactctagctagtacagctacacatataatttataggtaaaatttttatatatgtgttcttagcgacttaaaagccaatgttaaaaaaactaaataaaaaatatcctaaaatcaacttcaaaattaagtacgaaaatttaaattttggttttggctttagtttactagggtacgatggggcctatagatagctaagccgcgtggacctgagaagagagcttgttcttgtagcaaagaatttttttaaaaaaaagttttagttttatataatgtgcatagtttggatctacctttgttgtttgctcccctcgggatcggccggcaagagacaatgctcaagttttcctggcagagagtataatactggcttgtcatgacagcaacctgtgaatgcatggtcaagttgatcggcttcttgttgccttgttttcttgcctaggtctcgttttataatctgatcgcaattaacaccgccaatttgaaattaatgtggttttccaatccccaaaaccactcttcttatggagtgctaactctcagcttgaatttctgacagagagtgacaggcttctctccttaatctggctgaattcaatacgaactacggtagttttactgcaacagagctattgtaattttaacttttaagctgctctacaagaggctcatatatattttggtgctcttgaatttaaatatagttgactacctaaattaacaaacatagtttatgcctcatggatgatcaagagctcttactaggtacgttattgaattgtttaaggaccttgggatttgcaagggatgataacgatgatgatgcgtaagatggaggttgaacacccatgcagaagtgagctcagcctagctaagttggatagacgaattaacaaacaactttttgaaactaaaattgccctacattttaggaactttcagaaactaagttcacaactatatgcaacattccaagtattttccatgagattttccttcactgcttgatctcccaggaacaattaactgtaactgtaaggtatagtttttttcagaatgaaatttctagaataactgaatattatcaattttctagaataactgaatattatcactccctcatttgctttcaggaacacggcatgtttctgtacatgcatgtactactgagaatctgagatatactacctagcagatatagtactactgcttactcctatttgcttagcacatctgaaaacgactgagcctgaaccaagcacagaatgacaagaaacaatcctgaaagcaagaggaggtgacactgttcaatttcttgaaccaaaaataaataaaggagcttttccaccttcttgattgacatggatggaccccatatatgttcccagacatttaattagtgcggtgttaatttgacatacatgtaacctacaaatgcatttactcttgacatactactacctcagtgacgcggttaactttattaattcatttgaatattcatatttttaaaaatatatgtgcaaatagaaaaacatactactaggcatgttaaaattaagtttgatgagagaactagtgttactaatttcactttaattaactaagtaattgaataaatattattggttgaagttcaataaaaatatgtcaacagcgtcacatattaaaaaaccgaggcattatatcatcattaaattccctccatatcatggccatggatcatgaactaggcagatcaaagcgtcagctaattaaccagagctgagagcacacgctaactagctactatttgatcacctttaaactctagttgatggagtggacaagctaatcgatcgacagggaggggaaaattcagatgcactgaaactacacctctttgctgcttcgttgcttagttaatttctgaagataccaaggttggttgcatccggccctgatctgcatacagcgaaaatgtcgagtcgatgatcagctcgcgaagtgatcgatggagagggaaagatcgagagcaaaactgtcttattccttcgtgatttcaattcactgaaatcgttaaatatattgacaaatagacagaacgagcccacaatgcatatccctgtcgatctcttgagatcaggctagcgatcgagttgttgatgatgattatcaagtgatgactaatcgcttagtgagctaattactaattaattaaacaaatgcatagttgttttcgtattagatgcctgaatattaccattgtcattgctgcgcttagtctgtagtagcagcgatggttacattctcactttgtcctctctgctcaactgttctttcgccgtaacactgaaaaattgcatattttaactgaacatttggaaactgtgcagcgtctattctttacgcggagactagagcacgcgattattggtaagatttgtagctttcctcaaagttaatcaggctcagatcgtagatgacgatgaacaatagcctgcaccctgctgagcactcgcagatatgcatgatgaacagtagccaataatgcattatatcttttcttgacagtattgaacatatattggtaaagagaataaatcacaattgcagaattagtacacaagtgaggatacaagaacacaattacgattatacaccttgccttaaggataggtagtaggtagcaaagaatcttcgtagggcaggaaagcatttctacacgggaaacacaaagagagagaataatatagaaacaaggtccaagctctagaaccctaaaagcctaaaaagtggcgatatttcaaagaaacagattagacaagagagagctacacgcagcctacgtctaatttacaccgctaaacattccgctatggtcatacagtaaatcattggtggccgaattcataaatgtcttcctgaatcttcgccgcttcatcgatcatatgtcaacacctaatctccctgctcattattagtagcttacagtggcaagaaaaagtttaaacaggcctattaaccagtaagatgtccagcaagtctatctattggtaccaataaattttaaggttggatccttcacttgggataagtatgtgacagcgacttgagaattgctacctgaacatcagagagagcgtttgagtgattcttcagatgaacaaccccagaacagtgctcaattgttctgaaactgatcaagctgcccaatcagacgctaacgtacacgatctttcttccattaattccgcatcgtctgacagctccgattaggatccctcagcatcatggtcgattctgtctgtcagtgtggccacattattcccaaggaaacagcaaccattttggcagcacactgctcattatttcagtatttcagttctgaaaaaaaaatagaaatctttctagaatttcatgttcaggaaattctccctgaccctgacttgtcatgatctttagtttctccagcaagtagtagatttgacaagacaatctttctgacgagagcaattatctttggaggaggagggggctataaagtcaaggctgcctgctactgctaagactaacaagaacacaagaaccctaccagtgaggtcagatcttgcgggcaaaaaaaaaaaaaaaagaaaagcagctttctgcagaagcaacggacccatctccagctgctcttctgcttctgttcagctcaccggtgcacatcgccgacgtgaaccgcttgcctgtttcagaaaaaaagcatcggcgaattgatcgagtagttgatagcaagaacaagctaggccaatcgatcgacagcttggccaatttcctcgccgccgcgtgttgccattccatttggttgttgcttttcgattgacagtggcatcttgcgagcgcatgattgcgttatccttttctcttcctctgaatcctgaaattgatcgatgccagcgttatgctgctgcagacagatgaggggtgtgttcatccgatcctatcctgttgttgttggtggtggtggtgctaaggcacatcttttttttattatttttgggggtctggaaacatgatgatgatttatacaatgtcctatcataattgcattattagggtgacattaatttgacgcgaaatggcagcagccaatgtgcagagttgcagaggcaaatccacatgcaatgcactgaccctgcaggttggcccatgggctgaaccgaccagttcagcccatggagaaatgatgggctttaacggccctgcccgtaactcaacatgggccgggccatcaaagagggttctcttcccgactcgcattttcaggggaaaaatatcgctgtttggagcagagttaaatattccaagtgggatacactggcagtctggcagaggcgtggagattcagttaagtttcacctccacgaaaagagagttaacaccctttttacctgcaggggagattttgcagtgggtgtgcccgtgtgggtacatctatacaagattttactctcctcatttgttatacttttttttcaaaaatatttaactcattttttgaagtatcttttttttctgaaaacgttttttaaaagtattttgatctcttgtttgaaaatcaaatttgttacggttctattgtatgtgatatatatatatatatatatatatatatatatatatatatatatatatatattgagaaaagtacatctttttaggtttgtagtatatagtaaatttatttctattttctaatgtatacggtaggaaatcggacacggaattaacacgtctcaaccacataacatgggcttcttttatctaataaaaaaatatacgtgacattgcatagaccaaatgatcatagtaatattcaactaagtttcatggtcggacaatgcttctaataatagtataccctacacgacaagcaacaataagcagacaacgtcgataaagtgggaattgccgcatgtgaatcttatcattctctgcagctctcgagagacgatttatcgggtagtgcgcttccacggcaatcttcacttcgcaacttgacacttgttgtcggacatcattatactttgaaaaacacctttctgcacaattaggatatattagtcacgcatgatgtacaaacgcgcagagacttttcttgtaagaaaaccacgttcaaacgtcagaaaaaaaaccgctagattatatatgcctctagaacatttcttcatggcatgcagggtccccacaaaacctttattgtgaagtgcaaattagccctgagttgcggtgccctttttgagctcttcaatccaacattcttcgtttgccattggagcaactcgagtttaatacaaaacccctcttggaacagcgtaccaaaaagccttctgcacacctgagagcaatcaaaagacacaaactgctcagaatgtgctggatttctttacccaaaatgatgcagcaagtaggagcatcccttgcttgtttggtctttaattttgccctctaattttctctccccaaaactttcaccagacgtccagatggccgccattattccgcacgataaacgagggagaatttgacgtgtctgcaatgtaaaaaccaacgatatttttttcacataagtaaatatgtatgaccatactgccaagtgccaactatgcatcatatcaattttacgtttcaaatatgcatgaccatgctagggcctcatcttttcgatcatgcctatatttctcagtcaaaatttaaattttcaaacagtgctatatttggttcttggtagagtgcactatgcagtgggcatatttgatttttaattatagctagttatactccaaaattaactggatattcacgtgcattatgtaacttgaaatgaaaactatacaaatcacttgcaacgaattgacaaactgaaactaatcaaacctgaaatattacgtttaaaagtatgcacgcaacaaattaaaaaccatacatatatcatatcagtacacctttttttcttcgaaaccagagcagtacaactttggtacaacacatcgtagtactcgcaccggaaaacacatcgtagtacatagacacaagccagattgcaacacacacacacacaaaaaaaaaataactccatgacagtgagctgctcagttgcatatatatgtagtgcaaagttactgcaaatttgcaacctgatcatcttgatcaagaacagctatgatcaacagtagcatacaatgcatggttaattgtttggacgaccttggttgttgcctgatctgaagatggagagctcagctctcacgtcgatctgtatggcgccaccgcccctgctgccggcggcggcggcggcggcggcggcgctgctgctgctgttgagcgacgcggcgagctcctcgccctcgcggtacctctgcaggtacctgtgcatggcgtcggcgtagtggtcgaggccgaggctcctcatggcgtggcagacgtcgtcgccgttcaccgtcttccgccgctcccgccggcaccgctccgacgcctcgccggtgacgaagctgatgaactccgtcgcgcactcctggatcgtctccttggcccgcttcgatatcttcgcctgcggcggcagcccgtccttcatgatccggcccacgttggcgatcggcagcaggttgtcctgcccgttcgtcatcgtcacgccgccgccgccgccatcgccatcgccgccgtctcgatctctcgacgccgaggttgacgacgacgacgccctaggaagcccttgcatgggttggaggcgacccaattggttaaatccagagaaattgagatcgcggctcattttctttggtggaaaagggggtatgtatcttatctcccttataagagaagagagtcgtatggtataaatgggccgcaccgtcgtagcaaacctcgtgatattgttaccgactgtgctgaagggaattggctgactatgctgaagagaaccggctatagctctatttatgcgttgagcggcgggtttttttctacttgtttattggattttctcgatcttgttgaaaaaagtgtggaatgttatgttgtaacgtagggctagcattgcccgccagcaccacatgagataatgattctttccctttccttacaaaaatatggtgcgcccgcagtatttatttgtctattcaattatttatatccaacttgtttggaaaagagttcttttttttacaattttgaggaaagaaataatgggaaattacatgcatgcaaatttgtttgatatgcatgtggactgatttttgactcactacaagtacgcggtaccgtgctttttcatgaacataatatacaaaagtaacataagccaacatttcaatttgttttatatatacttttatagggcaacaattttgtatactactgtatatatatgtagagtgatataaaatcgcatcgatcgatgggcaatcaagcgtttacgtagacttgtgccctgtatctattcatcgctcgcaaaagaagttatctgacacaaaactacatgtacatatattcagttggcgtgtgtagatataatcaaattaatcttcggctaattaattaacggtcgttatgataagaaaaatgttaatcaacggcagtttggactcaactagcagctgcagatcaattaaagtcacaagaagatacccgcataatttttttttacatatatacgataaaatatgaaaaaagtgacagagagcacacactaacacacatgaactttcgatactagtactaattaaagaaatgaaagtgcagagaagaataactttttggcccaagctaattaagcttaagctaatagcactactaattaagtttagccaatcaggctgcgtcctttacaccggcgatggtgtgtatagtcctctaggcgggcgacacctgccggccgacaagccgtgcggccctcccatggcggcgatgatggcctccatcgccgcggcacgtggccgtggatactcccgaatcaatgtcgagacgacgacgacgacgacgacgatcgaggaagaggatgacgaggaagacgagatggaggagaaggcaacttggtcatataaaaggctaccgatttgcagctttctgacgccaaaagggggataattaagcaaatggtagttacacagcaatttgctgtggccaatttggaggagtagtgtgcatatcaagttttcatcttttgatgcgctgattcctagctcccaatcggatggaaccatccttgaatttttctttattatatggtttcattttcccatggacattgtgaggaattaactaacatgtactagacggtaccgacgaagaggctttcgacacatatcatgtgcatgcatgtacaacctcaagtgttagctagctacatacgttagagtttgtgtcaaatatatatacgtaatcggttacagtttaagacttgaagttgaattagataaaaaaaatagagtaaaagtcagactctatcctaaactctctcttaaatagagagatagacatgttgtaaccgtatagcgacttagcataggcgagagggagcggctatcgatcagtggcatccggtcaaggtcgttgtaactctaatatgttgtaatatgctgaaccagggaggtcctcggaatataggtgttggctgaactcgttatcaaatattgtgtctcggtatcgtcatcagttttggatctcctatggcattaaataatccacataatttggagttacataattaaaaagttataaaattttgagacaattaacccacataattgaaaatcgacaaaggattaaatgtagttggtgtttagggattgggattgcatatttggagtacaaaaaacaagtatagtttaattagtgacacacacatatatactactaaaaattcagcagtacagaattaattataactaagaaacatgtactatctccgtttcacaatataagtctttttagcactgcccacattcatttaatatatacatatgtctagattcattaacatctatatttttttacgaggattaacatctatatgtgtgtgagcagtgctagaaagtcttacagtatataacactatatgtgtagttggaacaagttaccagaaaaagtcaaccatgcatgtggatatatacccttacagtactaaacaataatcaaacttaattcacatcaatggtgaagcacgggctggatatatacatatatagtcgatcgacaaaaggttaattttcacaaatttaacacgaatgactttctttccgataaatatgtatagcataaagaaatatcatattgtgtgcatgatgcttcgctttggatcgaaaggatgaacacacgagagagcgcagagtagctagtttcacatttggaaaaaacttgtttctctacctccctctagcaaatctgtaatctagataaatactccatccgtttcaaaatgtttgacaccgttgactttttaagtacgtgtttgaccatttgtcttattcaaaaaatttaagtatttatttattattttcatatcatttgattcatttttaaatatactttcatgtacacatatagttttgcatatttcacaattttttttaataagatgaacggttaaacacgtgctaaaaaatcaacggtgtcaaacattttgaaacggagggagtattagctttgcaccacaccttgacatatgcatgtattcaaccacctgcatatatgcaaatgagcagggtactccgggatagaagcaacaaaaaaaaatgaagctgtgccttatatgttctgacaggagagagaaaaatattcaggccctctataaacttggatagagggagtactctgcatagttttgatctccctagctagcttccagtagtgccatatccaactatcccttatcaatccagtcgatggtgtgcctggtgtatgtagtgtgtgtgcgcctacgaaataagctggagtaggtggtttgtttttggtgatcttgcgatctgcaggtactgagtatcaatcgactacctcgtctcgccatttttcttgctaactaatgtggtttcataacgcgttttggcttgctctcgcaattacttcctcatttcctcctttcaaaagtaaattcattatttactcatcccatgtaccaatacagaacccaaaatgacaaaaaaaaaactagaatagtcctaccgtatcaaatctcaatacaattattttttcactttatctattttcaacgtaattattttctactttcacaaactccagtgcaatgatttttaaaaaataaatttattttataacaaatggaagaagctaaatatgaacttattatgggacggaggaagtagtagttagtttacaaacaattaattaaaaataattcataactattatacatatataatggacttataagtccacattatatgtattgttcaaggtttaaaaggcaaggctataaaataagctacaatgaaaaataatacactctactaattaagtttcaaaattcaaattcagattgcggctgaaaattaactgtcgagatgaagctagaaatttacataccacaattaatgcatacaagtactgtactgattaatcaataaacagggagtttaaaactgtgtatatatacatatatctttcaatgatactccctccgtttcacaatgtaagtcattctagcattttccacattcatatagatgctaatgaatttaaacatatatatgcgtatagattcattagcatttatatgaatatagaaaatgttagaatgacttacattgtgaaacggatggagtactacatatataagtatagtagtactaatcatatattccctccgttttataatataagactttctagcattgcacgcatacatatagatgttaatgaatctagacatatattgtgtttagattcattaacatctaaataaatgtgggcaatgttagaaagtcttacattgtgaaatggaggaagtattaattagagatgatgcatgcatgtaaatttctatggtacagaccagacgcagcttgacaagaaatataatccaagtgaaatatgtaaacttacatttagattgattgcaataacaaaaataatcagttttgttttataaaattaaaacttatgaatattataaataaaaaatacaaagaagtatataattgaaacaaaaaatcactgtatataaatttagtttagaattctacggacgcgatgaacactatactagtaagtgtataattgaataagagtatttgttaatttggattttaccacgtgggtgtggttaattacatatatatatatactaccacaaaaatactcaaatttatttaagagtacactagctaataagacaatatatcaacagctgcaccaaccgattgggtgctgacttctctagctagcttaattgaaaagtacatctctagtacattttcttgaatactcgtatatggtacatatatagtactacttttttaaacgacatatatataagtacattggtgggtatatgtatgtatatatactccatatataggatgcattgtgacttgtatatataagtacattaattggtggggtatatgtatagtacattaaacaaaaagtactatcgatctttgagtggtcaattcctgcttgaaggtccctttgcattcgaaatcgttattagatgaagtactaatttatattagcatatattgtccaagtgtatagctagaaattaagtcttttgcagatggatcgagggggtatatatgaattaatttgaatgggtatatagtctatatacatgatgacagtcatgcatgactaaaataacagatcatcctactgaccaaacagaggtaaattaactgtttaatttacgctgaagcaaaaagaaatgcgaaaaaaaaacccaaaaaagccctgcgcatatcagagagctagccatctagcgcaactccagggctaaaaacaaaacagttaatgttcatctgcaaagaacagcagagaactaggctgggccagcgctggccaattaactcgatccaaataattaaaacaaatccaaaccaaaaacttgcattgaactttcagttcgtctctagtcctaccaacactgcagatatatatatgattcatatgcatggcttttaggacatgaagcataaatatgacaagtatctgtaactaatgaatgggtgtatactgtataggagtataagttgcgtgtataggggacacatgtatttacatatcgaacactgtttgtcgtgcagacatgcattgtgcgtgatgcatgccagcatccacctaaattattagaagacacgtactcactctctgcaaccacttcatagaacatgccatttattatgtcagcaattaaagataaaccatcaatttctgcgtcctatgaacatttaagacagtatacataagcccgtttagatctcgtcccaaaatttttcaccctgttacattgaacgtttgaacacctccataaaatattaaatatatgcttaaaaaataactaattgtacagattacgattaatttgcaagacaaatcttttaagcctaattgctccatgatttgcaatgtagtgctacagtaaacatttgctaatgattaattaattaggcttaataaatttatcttgcggtttactgacgtattctgtaattagttttttattagtgtccgaacaccccatgcgacatcctatataatacccgatgtgacatgccaaaactttacacccttggatctaaacacctccataaactacgagcgaatatgaccatatacttatatctattgcatcgcactatatatgtaagacaacagatctctagaaaacaaaaatggaaaaaaggaaagatttataattaatataatccaccatttttgaaaaaaaaaagaagtcaagaaggttgccttatatatttttttggcaaagaaaatataacttctggcactaactaagaatatacacactatatatgttaatttttgtagacatcagaatttgaactctatgatctataatgaattgatataaatgaacgactagcataattcaaacattaattcaattcttgtaggcatagaaacactctcacacaattacgacaaggcactctctatgtcaaagaaaaaaaatcaaattttatataggaatctagacataatatgtagaaaagttgatttattttgggatggacaaagtaaataaaaactatacggtgcattttgctagcgacatatatacctcggtttgtgtatcaatcaaccatacaagcatattatgtagtttaaattaaatctgataagaaatactattatttatatatataagcaatgaagaaggtcaacacacaatgcaagaatgcataacacacagggtgcagaagttatatatgtggtgctcaagaataagagacagtgcctaactaatttctcaagagtcaaaacttatcaaactaaacccatatatgcatgatgaaatagctagcctaggaatatcaatcagcacaatattatccctatataggcataaggcatgcaggaacctagaaatcaacttttgatcaaatctagaattaaatttactcagattcaaaaatacccaactccaactatgtcaatcgtcataacgtgcagatcaaaataattaatcactacaaaaattaaattggacgtacaagaattattcatataaaatcgatcattttgcatactccgattaattactccatatccatcatgtcgccgggccatcttagctgctagcttcttcatcctaacctcatcttccatgtccttcaatcaatctcagcacatccatccccacctagcttctcaccatcatatcacaccatgaacacagattaattagctaatctagctagctactagtagctaagcactggctactcttactaattattaattagcttagccactgcaatagctgttcatatggaggagtaaggtaagatggagtagctagagacgatggagtagcttagcttaattaaattactgacctctcaagattaggaggaaaggttgggtgttgggtgagaagaagacgacgcaaagaacggtggctagaactgcctggagctatccgtcgacctgtccatggcgttgaacatgaaatgaccggcggtggcggcggcggcggaggaggaggaggaagggtggtcggggcccgcggcggcgccggcgccggagcgggaggtggcggcggcggcggcgcggtcgccctcgagctcgcggtacttgttgaggtacctgcgcatggggtcgacgtagtcgtcgaagccgagggcgccgaaggcccagcagacgtcgtcgccgttgaccgtcttgcgcttctccttgtggcacttgtcggaggcctcgccggtgacgaagctgatgaactccgagacgcactcctgcatcgtctccttggcctccttggagatcttggcgttgggggggaggatctgcttcatgattcgccccacgttcgcgattggcagcaacctgtcctgctccttgatgatctccgccgccgcctgatccgccgcctccccctgcagctgctgctgccggcgatgcccgtcggcgtggtggccgccatggtggtcggccatggctaagctcgagctctctctctctctctctcttcagtggtggtggtggtgagttcttgggctagtggaagcgctacagtatatatgacgatttagagggcagcacgcgcgcggccgccgttggttgtgtcttttatatgcggttgggtaatccgattggcgagagagacgaccagatcgattcacttgttattgttgggaataatggacttttcttcatctgctttcgctaagctatacgcatcacatcctaagagccgagtataataaggtgaagaaaacgggctgtataattaagttgtcacctcatatttgtgcttatatggagaaaagaaaaaaaaagaaagaacaaaacagactacaaatttacagccaactgcagcacaaacttcaatgtattaggtattaatgatacgatgtatatctacaattaactattgtatgagtagactattaggtgtattattaaatttgctctaatactacaagtctaaatagtctttatctagatatccaaatttttagtacaagatgaataaattatactccatccgtcccattttaagtggccatgattttccgtgcccaactttgattgtccgtcttatttgaaaaaatttaaaaacataagtgacgcgcaaagtactagtcatgttttaacaataaaaatactaattataaaaaaaattaaataaggcggtgtcggtgatatgggaccgggagtatcgtgaccagaggcttgaggcagacacaatcgcccacgtggcctggcaccttcggggacgtcgggcccgagggtgaggtgtccgccctcctcctgatttccccgagggggggtcgggtgactcctgccccggccccgagggccgaggcgccccgaccccttgtggagttagcgccacatgaatgggttgggtgaacacggtgagcctcacctaaccacatttattgcggtctggtcgaacgtgtcacgctgcatgcagcgtagtgcagcgcgttcctttatccgctctgtgaccagtcacagaccggtcagatcacgggttaggtggcgactggcggtctgacgcacgccttgccccatcccgtcaagacgaaagcctctaggcactcgtctcaagccggagctagcgtgtaatctcttagagatggcacgttagccctggttagatttataccaggcttcatcccaaccattacagcctatatgttgtatgaagaagggcgaacatgcagattgttgaactgacgcgtggaggacaagaatgaccggtctgacactggtcatgtcgtcggcagacagccacgttcccacgacgcgcctgccttcggcagaagtggaggtaggtgtgtgccgtcccgtcagaaggatgttcggaggacaaccgtgcaaatctccgtccatttatgaagagaagaaaagtccagtttggaaagagaggggtgcatgtggtatccccttgaagtataaaaggaggaccttgcccatagggaaagggggatgatcttttccagattcggaacttagaacaagtgagaggttggctcacactttgtagctccctcatacacagatccaccaaaacacaggagtagggtattacgcttctcagcggcccgaacctgtatacatcgcccgtgtctcgcgtttcttcctggctcgcgatctttccacataccgagagagcttgagatttcaccctaagcccccggccgaactggcaaaggggggcctgcgcggtctcccggtgaggagccacgagctccgtcatctggcgcgccaggtagggggctcagcgtgtgtcttctgagctctcgtactcctccgtgtgcgccaagtttttcttgttcagcctaatggccgagcaagcaaaggtgcacgacctctctccgagtgtgagcggcgacgacggggagccaaacccacgccgtcgagctcgtactcccccacctcctccacaccaaaatcctaagcagggggaggcgctcgagagggtcgaaaaatccgcagcatcgccagtcgcgggtgatgcaggagaacggcgagatggggagcgtcgcctcctcgtctacggcgacggcagcacgcctcagggcgcgcttcaggctgttggcgcgctcctacgtcacccgcccgtcgtccctgacccggagtctccagcccagcgatggctggacgacgtggccaacttggtcatgacggcacagcagcgcctgggtgctggtggacggtccgccaccaccaagacctccggcgccgccactaccggctccgtgtcgtcaaggcggagggcgcggcgagcggcggctgttgcacgccattcggctgccactccctcgtcggcacctccgactcgggaggatcagcatggagagccggatgctcgcctcgacatcgagcgccggcgtaatagccggcgtactcctcgcgcaacggagggcgcctcttcgtccagagtgtcacctcgacatggacgtgaggaccagccctccgtgcccccggctggtggtgtcggctgtagagcctttgtggcgagtcttcggaatgtccgttggcccccaaggttccggcccaccatcaccgagaagtatgatggaagtgtcaaccccaccgagtttctccaggtctatacgaccgggattgaggccgctgggggtgacgacagggtcatggcgaatttctttcccatggccctgaagggacaggcgcggggttggctaatgaacctgccacctgcgtcggtccactcttgggaggatttatgccaacagttcactatgaactttcaaggcacttatccgcgcccaggcgaagaagcggacttgcacgcggtacagcgaggggatgatgagtcacttcgctcgtacattcagcggttttgccaagtccgcaataccataccatgcatccctgcacacgcggtgatctacgcgttcagggggggggtgtgcggcacaaccgcatgctcgaaaagatcgcttccaaagagtcccagactaccgcagagctttttcagctcgcggaccgagtggctcgcaaggaggaggcctggacctagaacccctccggttccggagtggcagcttcggccgcccccggatccgccactcagacagggcggcgtgacaggaggaggaagaagaggtcagcccataccgacgacgagggtcatgtcctcgccgtcgagggcgctccgcgggccacccgaaaggggaggcctgcgagcgacaaaaagaaggaagccgacgctccctgacctcggctacttggaagagcgaaggcggcgcgcggcccttcgagccgcgcgctaccagcagagcctgcggcgctaccatcagcgccacgtccgggcccgatcactctacgtcgacgacctcgtcctacgccgcgtccaaacgcgtgctggattgagcaagctctcaccaatgtgggagggtccgtatcgagtgatcggcgtcccccggccgggctccgttcggctggccacgggtgacggcacagagctgcctaacccgtggaacatcgaccaccctcgtcgcttctacccctagtgggggtcgggtgtcaggtcttgggctcgggccaaccccgcgcccccccccccccggggcgtgcagggttggccgggggcttatcttttttctcttccgtatttcaataaaaacattttcgatttcctaaggactgtgtctgtgccattgtttccttttgaagaatattggcttgaattagcacgctcgtgctcgatcctgtcctcgggggctcgggtcggctaaaatcgccaaacggggcccagaaccgagccgtgccccggggcgtggtgaactccgagggggaatcggcaaaaacccacaatcgggtcacccataaccctcggtcaccacgctcccggcctggccagtctcgacatgtggatcttcccaggcactagccccgacccgagccatttgaggactaggacctgggcacgagcccttgttcaagccaagacacagaaggaccgaggcataggccatccttgtctcatacacacaacaaatagaattgacatagaaatttcctctttatttggttgcagattaaattagtctatacaagaagggggcccgaaggcctcggaagaagaaagaaaaagttattcaagattggcgggggcctgggggctcactccgacgcgcccgggtcaccagccttgtcgtcgctgtcgtccgcaccaccgtcaccgccctcctcgtcggagtcgagggcgaacgcgagccgaggggccgtaccctcgaagctgtggacgatgtggtcggcggcgtcccggacctgcgcgcgtgcgccgtcctcagttccggaagggaactcttccagcgctgcccacggggagaagtcagggtccgagaggcccccaagccgaacggcggcccaaggcccccgacggccggagctggccctctgcctgcttgttcgacggtgccaggcgcccccgacccccaggatggccccgaggccactgcgggaaggccgcgcctgtcgccctccgaccccgaggtcgtcggcgcagaagccgagggcgccccgcgctgcctctcggaggaagagcgccctggagatgcggcccctagcgaagaggatcggccccgccgaaaggtgcagcggcccgtctactttgttagcaaggccctccgggacgccaaaacccgataccctcaggcccagaagatgctatacgctattctgatggctccgagaaaagcaccatcaccatatctccaggcgaagcaaatcggctcgcccagattcgtgcgctgctcaggtaatgtggcagtcttgaagagaccgcccattattgacagccaaggtaccattaccgatgtgcatggtttgagaccgttgggtttttgcccaaccatggagaccggtcccacctgtcaccaggctttaggagtggcggtcatgcccgaccgcttcccttgagaagggcgatcgccctggcataacgccgggggctactgtcggtgatatgggaccgggagtatcgtgaccagaggcttgaggcagacacaatcgcccacgtggtctggcaccttcggggacgtcgggcccgagggtgaggtgtccgccctcctcctgatttccccgagggggggtcgggtgactcctgccccggccccgagggccgaggcgccccgaccccttgtggagttagcgccacatgaatgggttgggtgaacacggtgagcctcacctaaccacatttattgcggtctggtcgaacgtgtcacgctgcatgcagcgtagtgcagcgcgttcctttatccggtctgtgaccagtcacagaccggtcagatcacgggttaggtggcgactggcggtctgacgcacgccttgccccatcccgtcaagacgaaagcctctaggcactcgtctcaagccggagctagcgtgtaatctcttagagatggcacgtt

SEQ ID NO: 4423 - DNA, 21028 bp, Oryza sativa
aaatcaaatcaattggtaagtaagtttctgcatttgcctgaagatttacttaaaccaaatgcaagtgttagtgtgccagttctccaaggtagcttaggatggactgaattccatgcaaattttgcatgaaaaagttcagagcttaccgaaatgtgtcaaaatggcaggagagcatcggacaggtaggacctagtgggggtgtcctgggctagctgttaagcaggggaccactaggtttcctttgactgactgtgataggctggaaagccgggcagtatgatgcacttgtcatcttgtgtacaggagtgcgtgccatcctcaccaatgcatggcatggctacctgcatcagaaagggaggagaagcattctcttttcggcctcctcaaagtttcctgtcaccagaaagtgaaaacctgtctccagtctccctgttagagaagaaaaataaataacaacagagagagattttcttggaggatgaaagactgaagactgaagaatacaatcttggaacttgggagctttgaaggttgaaatttgcagcagctgctgctgcttctctgattttttttttttacttctgtaaataatgattgtggttcagtttctagttttcagaataattgtctgtctgtacatatcatgttttggatatggcctatgcatgctcgaggttagttcagtttcattttatgctggcaagtggtagcaagttgttattcccaaatatttatcctcgcttaaactactgcaatttggtcatgtcataacaagaaacaagtatgttcagttgatcgatctggttagaaaactatatgcatgaaaacgtttgatacaaaggcacatgctgacctcaatcaaagaggtctcgagaaaaactgatgtaaccaatacgacatcaaaaacattgggttcatttagggtcttaaagaattgagcaggcataatgtggtggctaccactgggaaataaagattgaagatcatgtctaaaatgaggacgacctttacaggcatttcagatgggatttggtaggtttgaaactacagagttctatattcgaccaaaagtatttccatcgaattgaactctgaacagttcatgctaatcttgataggtcagaatttggtcactttttttctgcagcaaattctcgtgctgtttcgagttcagattttttcagaaagcattttattttcagagtacattaaagcaagacttacctaacagacacttgctacgtttagttgatggaagaatctaaatgatttaggcgacaatgtgcaatacaactctttgcaggctagcagaatgcaagttgttttatattttaaaccaatgcgagttgtaacaagtaatagggggtccagtcagatactccctgagatccaaatctgaatccaatatattatcagatttgctcgctcgtacgtacacattacagatagaaaattgcaggacatctgaacatttgtttagttccaaatctatctatagtaaattaagatttcattctgcaggcgtacgtttatctgaatgcaattacaaaataatgcagttacctggatcatcagactgactaattctcagagttgatttacacatacctcattaatttcggttcttccactgtcgactgaagtaaaaactgcaaatcaaacagcaagctgacatcagtatcgttaattctactcactttatccaaaaaagtattgttaattctagtctaagtggccaagtacagacattcaagtgatccggttcatccatggattaaagtcaattttgagttttccaacaccaactagaccttaaccagtcttagtagcatataatactggttccatataattatatgcttacatgaacactgcggctgcaatgaacctggactgttcatggagattatctcagatgcaaagttcaattgatttccagatactaacatatatcgatataaacatcttcagtgtgcctaagtgaccagccaaaagccaaagaaaacaaaagattaaagaagaggagcacatgcaccatgtccttctgcagatgagaatccaatgactgccacaaaaaagaaatactcattgcaacaggccaacttccagcctgtcttgtgcagaattctagataacttcttaccagatccatataaactatatagtccgcaaagtattgccatctatatcaagtatcataatacctaaactacaagtatataggaatccgaaactagataactgaaagcctgcataaggagctttaatggcaggtgtacttcatttcaagtgttaaaactgtagtgtatgttaccatcggattctactaatgattctttcatgttgaagtcagcttcctgtataatatggtgaacccagagactgtaaaaggatcagtaggctggcttactcctgctgtactgctggatcttgaaaaaagattaacatcaagataaaaactgtaattcttgaaagttgcatctgcaatagtgtgctggtaagctggttttctaacctagaaaagcaccagtgaagctagccaggttttcaaacggactggagcaataaaactgaaaagtatctatagtcctatagggctgtaatgcatttattgcacaaatttcctgaacaccaaatgttgccatggattcaggaccaaacaacattaatgcagcagctccccttgtcaagcaggagaagagagaaaaggacagatggacagaccacccagcatgccagcaaaggtgagcagtcaagaaaaccacagccgtgttgcctactctcggtgcaaaatatagcaactactcgattagacatcacctagtactatgaatctgaacagaccttaattcgtagtgctaggtggcaagtggtgtctaatcgagtattaagtcactatattatgggacgggtggagtacatttcttttgcaggcgccagcccattcaccacatggtttgcactgcagcaggccaatggtccatagatatgaacgctgaaatcctgatccctgcagctcacaagatctgaaaaacaaacaacaagaagaagaaaaaagaatcaaaaatcagaaatgtaatagtaacaaatataccaaaatctccagtctgattcctgttcttcagttagtgcctcatctgaacttatagtattccaacagccattgatatacaatctggtacaccagacagacaacacatgccttgcttcatcccaagttgccggagaggtttaaattacgggacactatgatcatagagtatactgctgaccacagctttgctgggacactggtatctgctgtctacatccatgtctgaacattgtatatgcatacgcctgtacctagtcagctgctggtcgtcgaaacttgagtgcatattgcgtctcagctggggcctgggagatcagcatgagattttgtgttgcagaggacagtacttggatctacaatgtacgagtacagtacgattgtatgatgggcagtacattggcctaactcagcagcatgaactggcctgtgctatatcaatactggatcaatgtggtctagttgcacggatttcataacagatagtatcatttttaggatgaagacagttgatgctttcaacagccaaaacaatagtgcaacacccaacttcgacagtgtttaatcatgtcagtggtacacaagagcagagaaaattgcaactggaatgatttcacaaggcaagagcaattaactccctagtggtggaatagactaacagtagctcatatattactgcaaaacacgacaactgggagcgattccagaagacgagaaattaacagaactcaaggttgatatataccattattacaaaatcaggagactttttcaatctaaggttttagggacaaactgatcgttgcttgaagaaatacattgtttggtgccttagttggccttaaatcagttcagccaaaatcagaaaaagatagcaagttggaactgcagaacagaggaaaccagcagcaggcatttgtccatcttgattattttcagtgtacagatgggtgcctaacacgtctctcaagaaactaccatgaacttaaaataaatcgaagtagacaactgtttccttggccatgattatcaggagaatcttgaagtatatgaaaacccacttcctggtgatatcgtgatggacatagtccagaaggatctccttgtagaacatgtagacttgatggaatactgatgcgaccagaagagacgtactgatgctgttctttgatacaagaagcagagttgggatcatgtaatacgtagatcgtgttagtagctctgtctgcttcactttccagctttcagatgtcaatggaccttttctgggtttggcgatgcttgcttctaatgggctgaatgccattacctttctggtggctccctcctgtgtattcagcgcatcagattgtgtcacccagtaattgtcttatgtgatgtcagtgagatagtaagaaatatctagcattgactggtggggagtgaaaacaatccaataaatgcagaagcctatataatatgcactagggatagatacgcacctgctgagcagaagatccatttgatgttccagtagaaaaccaacgaggcaatacttgtgtaccactgagtcgagatgtctgttcatatcctggaatctgtttgcatatgataacattagaaaagtcccttacaagttcttaggaacacaataaactcatgcattgaactaggggaaaatgagaacagaagtattcaagttacatacgaacagcaatttttcattacaaattcacaatgtgattctcttaaagatgtcattatcagaagacaataagcactgaatggatggcgccaaataaaattagctattcccacaaggaaagatcatcttgcataatcatcagtactaaattatcagcaggtgctacccaccacaatgaaccacttaagcatggtatcaaattgcaaatatcttcagataccagtgagaggacataacattttccaacaacaactagtgcagatagtgatgagattaaccaagggatttttttgtgtcaaggaactattctattttcagatttattagctacattccaagtcattggctcatcaacagcaattgaagccaaacaaaacaatcatgaaggccaagaaaaaactaccaaaactaactggagtgatatgcaaagattaaaaataaagacttaggttaatacacaagaggtgagcagatacatgactccacccttccctcactcgataatcgtactaacagtttgcccaatttttcatcccagaattcaacgagcctggtaacgcgatgaatcagaacaaaaggtaaataccattttaccatatgttgctatgaacttagcgggtggtgaagcaggagaatggcctacttgctgctacagtcccaggttcccaactgattcccttcgccattttcccacgacatcctatctcccccaaacctagattataactaaaagcatgaccagaactactagtagactatcaatctaagcacaacacaacagaaccaaacaataaaaatgcaattaagaaaaaaaaaacattacagatcgcgcgtggactagggcatctcgcttacaaacccatcaccccaaacaagccacacacactgatccgatccaaacagctagttcagctcgcaaaatccatacgcctagagagagacgaagcgagggaagaagaggtcaaccttggagaggccgagaggggaccccacggcgggttggcgcggcgcgggggcgggggaggcggcggcggccggatcgcgggggagggaggacagcgtgcggagccactgcactccggcggcgggccccggcgccgccgcgtcggcgcgggacagggcgagcgctagggctttggatcgggcgaggaggcgcgacgccattcttccccccttctctctctctctctctctctctctcttcacgggcagagtaaggaaggtagtagagggggagagagctagtagaagacaatagggtacacgtcatcgtacatgggccgcattggtagccataagcctggcccatataggtagcacgaatactagcccatacatggaactggaccaaaggcccatgataatcaggcccaagaaaaagatgagctatcctaaacggttttgctatttcacttgcaacagatttttggacttctattttttgatttttcgtccgtggaatctttgcatcaagatttgtgttctttagatttgatttatatttatacttagttacactgttacagtgcaccaaaattagatttttattaagtttacgattttttacatgtttattcttttttttatttcattcaaaaagggttgtatacattgttgaaaattctgtaagatttgaaacttcaaacctgttgaaagatcaatagtagtcccttctgaaatatggaataaccaaaattcttctctttaatttcttcatttagaagtagagatcgaataatatcaatcatttgtttacctgcataaatttaacaagggtcaattcaacacgatcatcacacagtacctgattaattagtggaagataattagaaaggcagatagggcggttacaacctgcttaattaattaattactactcctttagtaggcttatatattctcccgacatgtaaagggtaccagaggattcgtttattctttgagtggatgcttggcgtttgaaattcattgcttaacactaaccctgccgatttattccggcattgacgtggaaattcctggttctgttatgcggacacgtagaaaatataaagtgggatattaaacaaaaggattttggtccaatgtcatccaaaaatgaaaaatgtgcttcatgatatgtctacccccagagggcattattcgtcctgttaaaatggtaaaaacaagcaattagggcggatccaaaccttatcggcatctctaggttaatttagtatacattactgtacggtatgataaagttcagctcaaattgcaggcaactaattatccgatagagtcgattaattaagctcaaatgtgttgtaaaataatttatagattgtccagcaaatattagtgtttaatttggttcgcgcatctgctcttagctagttgtgcattttttttttatatttgctactctatatatagatcaatttgccttattatcctcattttaaaattcagaaacgtttagaagtcttccggctagttccacaagaagatgggctagttggtctgggttcgaagccttatccttataattatttgatattaaatcatttcctaatattcgtgttttgttttaggagaatggaatggagcgctgtgaattttgcaataacattagcatgtgcatttcccgagtttataaacagtacaatttttaaaaaaacaaaattatatttaaacatattataatgttgttttaaatccacttttaactttttataatagctaatttatttatctgtaccatcgaataattatcacaaagtcatccatctattcagcatttcattctattcatcacaaaaacataaatatatattttgatcatagtaaaacctcaatttgcatggcatacccccatttcaatcaaataaataattcaacttttataatgctgtcccctccggccaaaagcaaagctagagaaaaaaatccaagtactaaacctctaataagcgcacaacattcccaatcagtgccagaggctgtttattagagtttcaacttctaaatttagcttcagtagttagatctatagtagagttgtggagcggcctaaacccaactccaactctctagttcagtttgtgagagagccccatccaactccactcttattttagatggagataaaactgtttagctggagaggtggagctgaagttaaagctgtgccaacgagcccttaattagttattatctcttcttcttccttggttcagtttcccgtcacctataaataagcatcgcgccttctctcatcatcaccatcacaaccaaaactactcaaagaattttcgaaagtctccatagatctagctcgatcgagctagagtgaagcgaagtgagagctagaggttggcaatggcggagagggtggcgcggctgtcgtcgcagagggcggtggtgatcttcggggcgagcaactgcttcatgtgccacgtggtgaagacgctcttctcggagctcggggtgagctgggcggtgcacgaggtggacaaggaccccaacggcaaggacgtcgagagggcgctcgccggaatggtcggccggacgccgccggtgccggccgtcttcatcggcggcaagctcgtcgggcccaccgaccaggtcatgtcgctccacctcgccggcaagctcgtcccgctcctccgcgaagccggcgccctctggctcagagatacgaagtactcctatatactaccagctaatcaattaattaactatcgatcaattaattaatggcgataactagctcttactactgttaattctgctacatgcaatatgcatgtcatcaatcttcactgatggtcgtatgcacaatgcatcagtactgcaggcaattaactaattttggggagatcatctgtcagattaattagcatacatgcatatgatcttcagttgtacctctacctacgtacatatgtatggaagatagtgctttgcaagtgatgagtatgtgttcagctggtcagaaagatcagattagttaattaattagctagtgtactacttaattatcatgaagagctgaaggcattagctttgatcctttgctttaggctttaattaggtgccattaattcaaagtagtctgaccagagaaagggttaacttaaactactcctatatgtcagtgctagctgcaaaagtacaaatatgtcggctaatgcctttcagttttcaaaagtagccgctagatttaatgaagggtttagtagctcaatgtgtgtcccatgaagccatgatgcaaattacgcagtgcgcaccatatatactgatccagtgatcctttgccctgcatttacgaaggcaaagtcctgaaaacaacagtgtcaaattttgttagatttgttgtcggagtcgatctgagacgtttgaaacaaattctcacgacatgttatagtacctgcaaaaaaaagttactactaggtaattctcagagtcaagttgggccaaattagctctctattttgtcatactttatagtgtatctttgagaattattgaggtgtctaatatattaacgtgtgtaaggtttttgtgcgttttttttaaaaaaaatattgaagtgctgaatacctgatgatatatagcgcaagtcacagtgcactataatataaggctatgacttgttactaaatctacaattttatgatactctacattaaatttgtaatttttttgagaaatttaagatatcatccgtttctaaatatttaacgctgttgacttttttaaatatgtttgaccgttcgtcttattcaaaaaatttaagtaattattaattcttttcctatcattcgattcattgttaaatatacttatttgtatacatatagttttacatatttcacaaaagtttttgaataagacgaacggtaaaacatgtgctaaaacgtcaacggtgtcaaatatttagaaacggagggagtattgtattacataccggtctcacttttcgtttacatgcagctagaggggtagaacatattcgtgagagtaatcctttattcacaaatcgtggcgcatcgacttggtgaaaagatatacttcattcgtttcataatgtaagtcattttagcatttttcacattcgtattgatgctaatgaatctaagacatatatacctatctagatttattagcatcaatataaatgtgagaaatgctagaatgacttacattgtgaaacggagggagtacatagcgagatcgagatacgagagagatatattcttggaatccaacacagtagtagatgcaagttgatgtgtgactcgatccttggtgttgcagacacatagaatcctatatagtgtactatagtaatttactagctttgttcgtagcgattccaattagcactcggcgtaacgtgttgcacgtgtgtatttatatatatacccgcgtgctgcacgtacgtacaccctcggttcaaaaaattcgaatcttagcaaaatataaacatgaataagtactacagtgcatgcctatattcatatatatgaattaatttttgagtaaatttcataaaactatatatactttaaccaaattatcacaaaactacatatttaatattaaattttgcacataactacatatttaagatagagtatcgtaaaacttcaaatttagtaacaaagtaatcacaaaactataaatttagtgttaatttaatcacaaaacttagatgtttataactcaaacataacactagtgctaagaatttaaactcaaaaatctataggtttgtgataactttgttattaaatatgtagttttgctatacttcgtcttaaatatataattgtgtgataaatttagtgttaaatctatagtttcataaaacatcaccttaaaattttagttttacgataatttagctaaaataactgtagttttgtaaatatactcattttttttaaaaaaggagagagtatggatgatgccaaccaggatgtgtttgaagataaggattattgagaaccctttcttccgatacgtaaaatggagcgtcggattaacacatgaataattaagtatcactaataatacttaaaaaaactaatatgaacttttaaagcaacttgcctataaattttttagaaaataaaacatttaagaattagagaagcatgcgcacataaaaccatggggaaattggaaagagggagtatagcacatgattaatcgatgctcttgcgttgtgtcgtcgggttgctgatggacgacaacaccgagacgccggtcggtggccacgtgagaatgagagagccctgcccgttttatcaggcccagaacatctcgggctgtcacgtacgtagatgggccaagattttcgatggactgggccatccgagatcggacgccgcaccgcacggtccaacccaaagaggcccagtgcagtggcacgcacaagcttatcggtattatctctccccgtgaggcatcattaaccgcctgaccaatcacaatcggcataatactgtgacgctctgatacagaccgcgtactacgccccaaaataatttaattttatccatcctatactaatataaactactacatctgtctcaaaataatttaattttatccatcatatactaatatagatacgaaaagacaaaatataagaatactaatactttatccaatcacagtgtaaccatttattattttatctattcatagtataattattttcacttttataaatttcaatacaatgattattactccctccatcccaaaataagtgcagttttgtattattcacgttcaacgtttgaccgttcgtcttattaaaaaaaaattatgattagtatttttattgctattagatgataaaatatgaatagtgtaactaaatatttttaaattttttataaattttttaaataaaatagacggttaaatgttgggtatggatatttacggttgtacttattttgagacggaggaagcatgaacttaacgttgtgattgctttttttcaaatttcagcacgtactgtaccaaactgcagcagaagcagcagttgctgacctgtcgtcctggacggtttgccggcgtgatcaatttctagaaaattctcggggcggtgtgaacgcctgccacgacacgatcaaatctcgtgttacgtacacgtactactaatacagacaggcacgcagtcaaactaaaccactaaggccctgtttggcacagctccagctccagctccacccctcctggagctggagctcagccaaacagtttcagctccactaaaactgggagtggagttgggtggagctctctcacaaaatgtactagagttgtggagctgggtttaggcagctccataactccactctaaactcaactcctggagttatatttaggagttggagttataccaaacaggccctaactaaacacacaccatggatcgagcggtcgagacaccgacccgatcgagcggtggtggtggtggggcgtgccacgtcagcaacgttttggtgcgtggagcgcgccgtttccgtcgtgacagaacggaacagcaaaatccgtggcgtggcgccactttgcacccctcctgcttcctcggcggcccacgaaaacgacgccaccaaaacccaacccaacccaaaagagacgctacgctagtactaggcgtcgacgtggccaaccgtccacgagctgtttatcgtaggatctggatgtctgcttggtactttctccgtatcacaatgagtcattttagtattttttacattaatattaatgttaatgaatctagataaatatcattaacatcggaggaagtagtaacttatcaaacataattaaagtccaaatttaaaatctgctttctctagtttcctttttagtgtatgtgtgttactgaggctgttcggaaacactggcttatgcaacaatatgaaacgtggctggcagctggttcgcaagctacaaccgttagcattactgaatagcccccatcaacttttcaacgtgcgtttaactatatattttactaaaatattatataaatatgtaaaatataaatccggcttaaataacatataatcacaagaaaaaaaaatcataaaagttaacgacattgtacattaacaccagagcaagtgatttttttcatttaatataatacaaatataaaaattttgcttataaattatttttttcctttttattttgctgctattattagctgtagctcaacgcataagttattaccaccgtaactccaagcctatttagtgaattacatagtcctgttctcccatgaatttgcttttcgaaatgcttcatgaattatttctaaattattttttttctatttatttttctactactttaccagctcatctatcacatcttaactgtattttttaaaaaatcgaaattctactagccgtttactgaaactacctaccaatctaagccctatcggttggcttgataagccaaagcaaaagtcaaaatttaaaatttaaaacttaattctgtagttgattttaaaatattttcaacgtaatttctttttagcattgacttttaaatcgctagaaaaatatataagagttttactcaaagattaatttttattttttaataaaccgtcttgattatcatggaatatggacaagccatgaaggcaaattatcagggaatatggacaacccatgaaactctgtttcttgtatgactttgccttctgagttctgaaacgttgtatccatgtgaaattttttactggagaggtcagggtcaatatgacatttgtgaagcctgaaaagaaaaaaagaaaaaaagagagcttgacctgttcagggcctgccagtgagtgggggtgatgcaaacatgggccagaattaagaggagagtctctctctctctctctctctctctctctcttgccatttaaaagaggaggtggcaggcaggagaggaaagtggatgtgcccccaaagatcccctcccctctcctctcttcttcactctgccccagagctgacttttgcttcttactcctactactactacttgtctttctctttgcaccctagcctcatgttcttcttcttcctcctctcctcctccttgtagcttccacccccaccccactccctcccacccccgccgcccgcttaaaagtccgattttggggaggttcgtgcgctcagatcggggagggggtccaacaccccatttcgtcttgctgcggcggggagggtggtgaagcgaaagtttggattttttttttttggggggaaggttctgcttggatgagctgcttcctgtgcttcggatcggcccaggagggggaggccaagaagcccggggctgactccaaggacgcgcgcaaggacggctccgcggatcgcggggtgtccagggtcggatcaggtgcgtggaggacaactggatcttggaattagttttcgcggcgttttgctgcggctttcagatgttcttttttttctttccttctgctgccttgtggcgctgtggttttcctgttcatgttgtgtttgtactgctttgctgtgcgcgaacgatgatttggtgatttaagttagacaaatgtgcagggttgctgtcgtgttagtaagcttggaggctgtatttaggctcaggcacgctttcttcttcatttagagaggaaaaataggggaatgcattgtttgccatagtttgtggctaggatggctaggttttattaagaaaatctgtatcgtcctggcaattttaggagattcatgaatatatagtgttgattttgatggtttgtcttgtttagatgtgtgggtaaaggctcaggatcattttgaagttgtcttaggctggatagtatatttgtgtgggaacaatgggggtagaaagtgatggatgtgttgtttactagtccttgaactcgatactgtttatgaatatacaaatatgtaggtgtcatttcattttgtttttttgagtatacgaattgcgggtatgttggccatcgtacctgtccagtttggcagctggttcatctttggcatgttgcaaattatctgtaaggacctggggttgacatgatataataaggattgattttagtgacctaggacagttcattgtggatcttttcttcatgaaactgattgggggagggattattggaagtacatgctttgtctttacgttattctgtttatgctttgagtattgcttcacaaatggatcggtgaaatctgcttcgttggcttctatcgagtagtaaagtgtactaaatacagtactttaaatgactgatttagttttatgtttctgctgataagagtgttaatgctcagaggatagcacacaaccattactctgcccctcaaaaagaaaaaagaactgattactaactctacaacattttcttcttagataaatcgagatcacatggtggattagactctaagaaggacgttgtcatccaaagagatgggaacaaccaaaatattgctgcacagacgttcacttttcgtgagcttgctgccgccaccaagaacttcagacaagattgcctattgggagagggaggttttggccgtgtatataaaggacgcctggagactgggcaggtcagtctttcttaacctatctagatctattgagattttactaaatacttgaagtttaggttttcagcgatttagttaatattcagtaaaatgttggcagaattgctgttttgctttatccctggagcactaatgaaatataccacttcccaggctgttgctgtgaagcaacttgatcgcaatggtcttcaaggaaatagagaattcctggttgaggtcctcatgctcagtcttctacatcacactaacctggtcaatctaattggctattgtgctgatggtgaccagcgccttcttgtctatgagtttatgccattgggatcactggaagaccatttgcatggtttgtctatcttctccttgcctttctagtcttgcaagagtccatgggcgcttgaagcaatgtacataaagtagtagtactgcattattgtgaagtactatacttggtagttagtacagctgtttaatggcatcctgttatgtttaaagttcaatggcagcttcaaatgaagataaaaggttttccaatttctgttttgtagatttgccacctgataaggaacctcttgactggaacacacggatgaagatagctgcaggtgcagccaagggcttagaatacctacatgacaaggcgagcccgccagttatttatcgtgacttcaaatcatcaaacattcttcttggtgaaggatttcaccccaagctgtctgattttggtcttgcaaaacttggtccagttggtgacaagacccatgtttcaacacgtgtgatgggaacttatggctactgtgccccagaatatgcaatgactgggcagctccagtgaaatccgatgtctatagctttggtgttgttttcctcgaactgattacagggcgcaaagcaattgacaacacaaagccacagggggagcaaaacctagtggcatgggtatgtttttatactatacttgcatcataaatgcataataaatatatgccagtgacacccattgtatgcattcttcttttgaaaataaaagcattacatgtatctcagcattttattttagtactgttagtgaaatacaatcccgccaatcaaactgatgccacccacctgtttctttacaatcacacaacaaataattgtagtgtttgtgctagctcatgaacaatttgatcatggatggcctttacttccaagtgtccaaattgtttccttgtggccaggaaaagttgttgttttgataccgatatttgccatccaccttggtaattttgctgatggctgcaaacatttagcaattttgagagtttggggggcattatagttcagctgttccattctcttacaaatgatgttctgttgctcgctcaaaatttgtaaatgaaaccagtttctaatgcaatcttaattgaaaaaaaaacttcgtggacatttttattttggataatcaatacatttcatctgtttgcaggctcgtccactattcaaggaccgcaggaagttccctaaaatggctgatccaatgctccaaggtcgcttccctatgaggggtctgtatcaggctttagctgttgctgccatgtgtttacaagagcaagctaccactcgccctcatataggagatgttgtcactgcactctcatatctagcttctcagacatatgatccaaatgcccctgttcaacatagcaggagcaattcgtcaactcctagggccagaaatctagctgggtggaatgaagatcgacgcagtgtgcgctcgccaaatcatcattctccagatctgaggagggaagctgccaggtcatcaagagcagaggttagcaggactagttctaccggtgattctggccggagatcaggattggatgatttagacatgacagggtcgcagatgggtagtccagctcaaacaggaagaaaaagagagactccaaggactgctgatagacagcgtgctattgcagaggccaaaacgtggggggagaattctcgagaacggaagcatccgaatggtcatggcagctttgatagtacaaatgagtaaatcggagggtttttgtttcagaaatcagtctacggaggatgaatctgctcatctacacgaaacggatccaatcaagtaacattgcattggttccacacggttctttatctgtgaataagacccttgttcttccccggccatcagtgccactccatggtcactatgtcattgctatttgacatgtcttagatctcccggcgtccattccttgtgaatgtgattgtgtcatgtgtctttagagttcggctccgttcgggagccgataaaattcagctggaaaggtaggcaacagaagagaggaacctgatgaatgccttttcttggttacctgatcgccatgctcatgctcagcaccacctgtgttacgaatgttacagcatttcaggtttggctacctgaggacgtgaagttacttccgatgagaattcaggtttggagataggacacattacctgtgtttcgtacagttttttcttttcttttcttttcttttgagttgcctgagcacttatttatttgtattagcttactgtacctctcatgtatcttagcgtgaacgttgttcgacatgcagcaagaggtttttatctgtatcaagctatttcagagccaatgtgttgtacatgtaatattttgcagtagtagtcaatcatgtgttcatcttgcaaagccaaatgagctgtatcaaaccaaatctgattggtgtggcagtgctcttcgcattgttgctatctgcagaagctatctgatgcttagctgctactctctcctttccatattataagatgtttggattttattcttggtcaaatttcttcaagtttgaccaagtaaaacgtctgataaataatatgaaacggaggtagtactgtaatgcaacaacgcaagtacttgtgaactgaacaatgcttcacattaccaaaccacatttacagcaagcatctcccaatcctcttctgacgcatgaacaattttgacacatatgagcatcagagagaggaacacacgtgtagtagtactgtacaataatataacacatctaagctaccattatactaaatctgttccattttgaatcattggtcactgtgttctaggtcacctgacaaacccagatgctttgacaagacgatgttgccattgatgtccatccggtaacgcagcttgctgtagtccatgacgatcctgcaggagctccatgcctcggcgtgcatgctgacgccgagatagtatatgtggtcttgcacgctgctcccactcacagacctgaaaggtgaaagtggcgtcaaagaaagagagagatcatgaagagctcatcaggttcagggtcaccaaaaggagaggagatgatgaggtgtggttcaccccccatctgcttgtgtttgtgcatatggagaagaagaagaagaggggtagtacctgcagcacgatgggtcttcaccagaatcatcacagatctgctctaccgagtacactaggcttcctagtccgacgttatgaacccatacctgaagaaaaagagcatcttttttagataaaaaaaagaggatttttattgaactcggtcgattacgtcaaggtgatagaaccatattgaaaaggagcactcagcactgcatcatgcattgggaaattatggaaatgcaagatgagtaagattgcatgtgtactgtctgtaagcaattgatctcgtcagaaaatgcatatatggttcaaggtattgagtttcaggtaagcatattagacaggtagagtgtatcgtacctctcttgggaaatgatggtaggtcttctgtgggaagaatgagaagtatggtggcaggtgaggcacgatatcatgaccatgggtaactcggattgcgtgaggcaagtatttcttgaaaaaggaagcaaaagcagcattgccaatccgaggctgcccaaatgtcattagcttcacaccatctagcccatagttcacctaaaagaaaacagaattcctgtttagctgtagaggcaaaacctggaggtaagtaagcaggggcggaaccacgcctggggcaacttgggctggagccccaggcgtgggaaaaaatttaacggtcttatacctgaaaattcaacagatattttgatccttccatgtctcagccctacgcgtatactccagcctgggacttagatcgattctatccctcactaccattacttggaggcctattttaattgccgaactctctagtccatactactactatacttctttggaccggcaaaggaggcatgtatcccaacaattctacaaacaaaacctcattctatgatagcattaggtgatacatttgctaaatatgcctatctgtaggaacacctcgtgctctatcctacgaggtcgagaatatataatagcccacctaacgtactccctctattttataatataacaaatttttagttacgaatctggacaagtgttgaatccagacaattctatgttagattcgtaactaaaaattgctatattttgaaaacagagatattatataggaattttgggtagctttaggctgagttcttaagtgagtttgggctgaaaaaatgtcttatttatcatgtgcatgttttttgaattactaaatagtgtttctcatacaaaagttttcaatatagaagtttctctaaatatataaataaatatatattttaagtttataatagtcaatacttaatcaatcatacactaataagctttcttgtttctcgtaccgctaaaaatatcattctaacatcggaaatgaccatagcttagtatttagttttgagccctaggcttcgagaaatcctggctccgccactgtaagtaaggaatggaaacctacaaaccgaccatagatgtagattgctactacataactgaaaattagtactaggctggcaaaggaaagatgaaagatcggctccaagaagataaaaaggctcgacagcttcgcagactatttgtccatttgaccagaatataaagtattatcatggaagaaggtgtttccaaattccaacaaaataaaacacttctctcttttatgtgaagtcagatgtggagaataaaatgtttataatttattgcacaaaactaagcagagaaacaatatgtggtgtaattttctaaacagaaagtgatataggagctaaaagtgaacactattgaattcagttaagatgcagtactcacaacaagatcaagtgcacaaaacgaagccatagctccacccattgaatgccctgttaccatgatcggaacatctccaaacaattttcgagtcttctgaataccgctgacaactccatctcgcattgttgtgttatgataagcagaataaaatcctcggtgtacctatggtgaggtggagcacaaaatgaatttggtctgccaatgttgcaactcataatgctgaagctaacattgctcaccattgcttcaggcataccagggtagtcaagatcaagttgtttccatagcaagtcctctatccagttctgaatgctgcgaaattgaaggatcagtacagattaaagtaatactttattaaattaagagagtacctagaatagagg

SEQ ID NO: 4424 - DNA, 36979 bp, Oryza sativa
cactctcgatctactcctccaatccacaataaacaaatctaatacattcacgatataacacattgtaatgcaatatgattcgtagtactttccctaacgtcccatgttatgtatagttcattttgggatcgagtgagaattccattgaagtgatagtgtggtactagtactactataaaactatagaactatgtgtactgcactggaagcacatatgctcttgtgttgatctgaaggtaacacaagatagatggatcgatctaaagtatgagcaaatacgaaatcgcattgaattttatctgataggaaaaatcgcaatgaatcttgatccatgcaaaccagcacgacctccataactcaagtaaatggctcacaacaatctatgacctctataacttaagttcttgctagagggccgatcacagtggacacatggttctcttattcaattttagtactaactatgtactaactgtaaaccattaggcagcgacagtgaagttgaagttgctgcaggtggtctggagcccaaagaggaggccactgaagccgagctgctgcttctcctcgtcgaacaccaccaggttgtgctccatctggtgcccgccgatcaccaccgccgggccgtacccgaccttctccggcctcatctcgacgaacgcgaagcacgccgtggcgtcgtccacctgcaccagcgagttgccgccgaagatgtaccacgccgcgccgtcctcgaggttgatgttgatgtccggcacggcgtagccgagccggttcgagccgatcgtccggctctcgtagcacagctcgaacggcgccaccggcggcgccaccttcttcggccattgcaggatctcgtcccacgccttgacgaacgggccgtacacgtcggggcggagctcggtgtacggaaccatggagctcagctggacgacgagtggcgccccgtggttgggtagtggcacctggtggtggttcacctcgatgctcttggccgtgatgtagtacccgccgccattgccgccggcgagctccgggctgcggcggagcgcggtgtaggacagcttctgcatgatgtccggccgcgagtaggggaagatgaggacgaacgggccgccgccgaagacggcgacgctcgggaggcagagcgcgaacttcttggcgacgttctgcgtcgccgcgacctgcgcgtgcagcgcgaggtcggatcgcccgagaccggcgacgccgacggcgccggcggggagcgaggcgaggagggagcccggcgcgcaggaggcgacggccgggaaggtgaccgggtagagcgggttgctgccgttggtggcgtccgcggcgagcgccgtgcgcgtcaggtcccccggcgcgcacctcccggtgacaccgttgtacgggtgcgccgtgcatttgttgccgtagcggtagtcgccgccggcgccgccgtactgcatccagcagctcggcggcgtgtagtggttggcctccacgcactcgcgctcgtaggggaggacggtggagtgggaggcgtcgcaggtcgaccagacgagctcgccggagaggtcgagggcgagggggtggccgtccttgacggcgatggtgtagagcttggtggcgccgtccttggtgacggccgtgacgaggggcttgccgccgccgccgcttgccagcgtgtgccacggcaacacggcgaggaaggagatgaccaccaggagaagcggtttgcctttggatttggcctgcggcgacgacatggtgtaccgtgtatatatgtacgtgagttttgttaggctaatcgtgattagtgtgtggtaatctgatgtgatttgatgaatgcatggtttgctctttatatagatcgagctagtggtcgtggcctgtcaggtagtaagtactaattttttgttttcaatttttgtatcattcaattggaagcttcgccatgcaaattaatatgcaatcgccagatgcttacaccgttacacgtgctttaatgtgagcatcatgtatgcatgcacggcgaataaattagccctggagaaggcgtgacggtggcatatatacacgtgaacgtgaccgatggcaaatagtattgcagagaggaaatataatgcaccatgcataggaaagaaaaacgagccatgccgttgttgcacggtggtgatttacatcggagtcggcaaacgaagttgactcgtgggcagtcggcacgtggatgggctcgatcgagattcgagtgtcctagttctatagaactataaacgcgaatttattttatttgtttcaaatatagatgaaatgaatcaagcatgtgaatcacgtactacacctcactgcctcagccatcttgtcgggtatacacacaaaataatgactccaactcattttctgacttcttccttttcgtccccgagggagtagaactcaagaaaacaggttgattactcagatagttgaagctctcacagtacaatacaatggaaagcagcccagctgagctgatggccgagccaacagaaggcccttccactcatacattccggcccaacttcaagcccatgccatatggcttcgaccttttactcgtcgcgttctttagtaccgcaccgcttaatcacatcatgcacgaccactttatatagtcctccaatgtaaccaatcgcaagcaatgacgaaaagcaccagcactggtgggtccagtgcattctccatatatttaaggacgtgtgcgctactgagctttcataagtttccttttgcattcttatcttttgaaatcattcgtcaaaaaatggtaacaaatcacaattcataaaataaaaattgtttcttttatattttttgaaaccatttgtcgggaaaactgtaacagaacacaactcataaaatgcaaagtgcacctacgatatacagccttctggagtactttcctccagttaaagaccctatatatggcctatttacttgagtgccatatcaaacacttctgtaaattgaccgttcaaaaaaaaacacttctgtaaattgagctggaaatgaagcggtctctcttttctttttttgtgagaagaaaagccctgtaaatcattgcctcaacacggtcaaactaagccaagccaagttgacctcacaacggtcggactaagctcatcctagtaaagcctatatcagacttgggccattggttgttataccctacgagggacccctagcacgcacactcgctacgtttttagtaccataccgcttaatcacattatgtccgaccggtttaaatagtccggcatggagcaagtacatcaccgagcaatgacgaaatgcatcaacgctggcgggtccggcgtattcacctgatcatttaggacagagattgtgcaccactgagctttgacatgtttttttatcttcgatttcaatatgcatttttgacaacgacttcagtatccatctgacgtaatctaggaatttttttcttcaatcccaggatgatttgacagcatctggtgatttcctcttcaattttcaagtccagtatgtattgataatgacttttaactttagcatctgatgcgatctaggccgcaagagagaagttgaagttgttgcagccccgttcttttactattaagattagattttaacttaattttcattagtatgtttttcaaacggttgaaacactgtgtcttatgcggaagctttttatgtaaaagttgttttgctttcaaatatattttgaaaaaaatcaattttaaatttataataataattaatactcaattaatcatgtgttgacgattttctcattttgtatgcctacacttaatcttacggccttatcttttcgcttgtgcttatgcttattcttatcagccaaattttgatttttcaatcttaaatttgaagttgattttggggttttttatcgaagtttattttcagcctttgattttatatcgctaagaacacatatatataaaagtttatttataattttttttttcgtttgtaaatacgtcgttttgcgatggggctgttaatcttcgtagtatacatttacgggtcaataaatttgataattcgtgtatgctgtagtgtgtcgtagcccgtaccacatccaacacttctcacaattgggctggaaatggaaaattctttttttttttgaagaggcgcggcccatcgttgcttcaaaacggcagggcaaagcccagcctaactaagtctgagttgtctctgttggatgtcaccttccggcccaaccggaagccctggcagtcgcttcgatttggggcactagactttttttagtaccgtattgcttaatcacattatggccgacctgtttaaatactcccgcacgtagcaattgcaacgaagcaatgacgaaaagcaccaacaccggcgggtccggtgtgtctacctgatttaaccattcgggacaagatgggtgtgccttccgagctttgacgattttttgttttccccttcggtttcaagctttcagcttttaccttctttttttttcctgttttccttttcggtttcaggctttcagcgatgcattgatcacatctcagaaatttctgagtcagtaacaaatctgtggcctttctccattattcattgaattgtacttgtaacaaaacacaactcataataataatgaaaaaaaaatggatgcacatctgatgcatatgtgtggaaaaaataaggatcactaacgtatacactatatagtcgatcgactataaccttcctctcttcctctgccctgaatgtcttagaccaccgagcagtggtgttatctgcacgggctacttatccaattcatggtcagatcgagtttctagttgaatgcagtgcataagagaaagctgaaggacataaagtttagaaaattagtaaatgatgtctaacagatctctccaacaagttgaatcctgacgacatgtctttcttatctgttgggtttcctgtttagccccatatgtgttgaacagaatcgtcttggcgaaaagcagttctcattcccaccgccggatcgatgtcctcacctagtctggaatttgaaggtctgatgcaaaatacagcagatgatgctaatgctaaattctcgcttcctcttggtgttttcaccagatatatggggtgctaaaaactggaaggtttttttaactgaaaggtcaatatgtcattcaggactttgtttccacaaaaaatgcaggacctgatggggttcatgtagcatgtgtaccagacgaacaccgctgtaaactgctgcatttcagcttgaattgcttgctatgtttgtgggactagttcaacaatccatggtttgacaggttgttagaattcatcagcagttacacttattttagaaccgagggagtaatcttgaacgtgatctttccctttctttaagggaaaaaaaacagtacagtgctagttcaaattaactaagcatgtgaatcacaaatctcaatcatctgcgaagtgtaccatcatttctgcctttccccccaagtggtagatactccttcaggtgtgcagggcaattccaccgcgttctgtcaattggactggaaaggaaggcccggcccatcgttgcctcagaacggcaggactaaaccaagcccaacatggcccataactgcctcgcaacgtcggagttaagtttagtaccgtactgctcaatcacattacgatcgaccattttaaatagttccgcacgtagcgattgcatcgtcaagcaatgacgaaaagcaccagcaccggcgggtccggcgctctacctgatattattcgggacagatgatgcaccttctgagcttaaaccccaatttttttccctgctttcccctttgcttttagcttcgacatttttttttcctgttttcctcttcgatttcaggctttcagtaacttcgctttaagctttgacattttttttcctgtattcctcttcgatttcaggctctcagtaacaaatctgtggtattctccattattcatcgaaatgtacttgttacaaatcacaactcataataataataatgccaaaaaaaaatgcatgcacatctccgatgcaaatgcaagctatgagctcgaggaatcgactcgatctaggcggcgagagtgaagttgaagttgctgcaggtggtctgcctcccccagagcaggccgctgaatccgagccgctgcttctcctcgtcgaacaccaccaggttgttctccatctggaaccctccgatgatcgccgccggcggcggcgggctgcccttctcccccttcaccttcaccaccgcgaggcacgccgtgttgtcgctcacctgcgccatcgagttgccgccgaacaccgtccagttcttgccgccctccagcaccaggtcgatctgcggcacggcgtagcccagccgcgtcgaccccagatcgcgcgagtcgtagcacagctcgaacggcgccgccggcggcggcggcggcgtgacgcgcttccggccggcggtggccctggcgaacgcgtcgaccaccgctcggtacacgtccggccggagcgccgtgtacgggatcctcgtgcacagctcgacgacgagcggctcttgggtgtagagctgcacctgctcctggttcacggcgatcttggtcgccgagatgaagtatccggggagatccttgttgcggtggaggggagtttcgccggcgagcgtcgccgccacgtcgggacgccccggcgggaggaggaagagcgggccgccgccgaagatcgccacgccgtcgccgccgccgccgctggggaggcagagcgcgaacttgttggcgaccttctgcgaccgcgccacctgcgcctgcagcgcgagcctggtgcgcgcgagcccggcgacgccgacggcgccggcggggagcttcgcgaggagggaatccggcgcgcaggaggtgacggcggcgaacgacaccgggtagagcgggttcttgccgtcggtggcgttcgccgacagcctcgtccgcgtcaggtcggccgtcgccgactcgccggagaaggggttgtacgggtgggcggtgcacttgcaccggaacgggtcctcgacgtcggcgcggccatagccattgtgggggcatcccggcgggtggtagctgtgcgcgtgcatgcagaagtggtggtggcactccagcgtcgggtgcgcggcggcgcacgacatccagacgagcgcgccggcgaggtcgaggacgagcgggcggccgtccttgatggggacggtgtagagcgaggtcgccgcgtccttggtgatggccgcgacaagcggcttgccattgccattgccattggcactagctgctgcccatggcaacgacgaggccaaggcgacgcagagcgagacggcgaggaggaggtggagcgacattgctggttattagcctgggcaaactagctagcacgcactgtgaattggtgtgtccaagtgtgatggtttatatactcagtacgtcgcagcacctgtgcagcacagcagaatgcgtgtgacatttctctgctatcgctggggatccagacctggtgttttctaaattataaacagtttttatctccagcacgccatgacatctagttagcaatcttgatctaggccagtttagtgtgctcgggtgagttaagctatcagctattacatgtgcattaattgtcactctgttccatcacatgggtgattacagccatggaattgagtatcccaatgtcggtgatcacattttcgagcacgtagtacttccgaagtggtggtgctcatgactctgagcgcagagtgcaagcgaaggttgcttgagtgaccaaaaaacttgccaggtcgtgacagagttctacgcattgaaaacaacgagatctgcattgtttagttgatcccactagcatacaaatcggatcttggtcaatgcgcgctagctggaggcatcaaccatttccatcaagtcaaacgcgtacatgggttcgagaaattccaccccgttcgagatccatccaccggcgcgagcgccagatgccatccaagaaaatccccatgtttcgtgtaggattcgcgttgaaattgtagagatttttaggctctcgattgggcggagccctgtgaattccggtgcgcgcggccgcgtgttctcccgaggattttgaactcgatctgccaaactgggctcacgtggactctgctaggccaaaggcccaattgtacaaactgggccttttgtgcatcacgtcaggtagcgagcaggcctttgtgaggcccagatttcagggcccaaaacggccttcatttcacgttcaaattccatcctacggctaaattaatccaagaacatttcatcagcgtgtttaatccgatatcaatttcaaatgttatgaaatgataggcaaataaacgataaataacaatagattaatcacataaggcacgagatttaacgtgaaaaaccctcctataacataagagaaaaaaaccacaggcgtcagccagcaaaatatcttcactatatctgagcgaggttacaacgccgcacggcggcttacaagaggtatatatatatatgtggaaccttaaaagggacgatgatccgtatccccggcctaaccctaccggtgacgggacgatgatccgtacccccggcctaagcctaccggtgacgggcctccgctccactacgacataaattggcctctattaagtacaaataaatttggatcacaactcaacatcaaatattcgcatcacgtggaacatttttcaaatactgcatgtagatggtagatggactatatattaaaagcaaagttcttaaatgggtgacagatacgggcatatggcatgccggacaccgacattacagttacagttacatggccgcgaaacagtggtaagtaagtaaattatctactgagtcttggtgaaattgaagttactgcacgacgtgtagaacggcagcctcgcgaacccgagccgcttcttctccgagtcgaactgcagcaacatgttctccatctggaaccctccgaggatcaccgccggcgaactggcggcgtcgccggacttcatctccacgaaggccaggcacgccttgccccccttcacgtccaccatcgagttggtccccgtcatcgtgtagttcttcccgccggcgagcatcagcctcaccgccggcacaaagtagccgatccgcgtgttccccagcatcgacgccctgtagcagagcgggaacggcgccacggcggcgaccttcgcgtcgctccggttcaggcccttctcgaactcccggacgaacgggcggaacacgtccggccggagttggccgaacggcacggcggtgcgcagcgccacgccgccggcggcgagcgcgccgctcgggaggggtagccgcgcgtcatcgagggcgatggcgttggcggtgacgtagtagccggggttgtctctcttggcgacgagcggggtgtagtccagcgtcgtcgtgaagtccggcagcccttcgccgaggtatatcgggccgccgccgaagatggccacgccctggccgtacccgagcctcgggaggcagaggaggaacctgccggcgacgccctgcgacgacgcgacctgcgccgggagcgcgaggccggaggcggcgaggccggcgacgcccgtggcgccgcgcggcagccgcgccaggagcctcttgggcgcgcacgccgccacggccttgacggagacctggatcagagggttcttgccgtcggtggtgttggcgatgaacctcgtgtgggcaaggttcccggcggcgcactgcccggtcaccgggttgtacgggtacgccgtgcacacgttcttgctgcagtcgccgccgccgccggtgaccttgcaggtcggagcacggtacgcgttggcgaccacgcacgtcgggtcctggcaggacagcgacgccggcaggtggtcggcggcgcacgtcgaccagacgagcgggccggcgaggtcgacgacgaggttgtcgtagtacctgacggggatggtgtagagcgaggtggccgggtccctggtgacgggaaccaccacggggtcccgacgacgaggcgccgcggcggagcacgacggcggcgacgccagcagcacgagcagcgcggcggcggcggcggcgaggacgaggttgccgtttcgtggcggcatcttgaacgatatgggtgatggatgatgaatgttgtacgtagctaagcttgtgtgtgtcttggtgcgacgcggccatttcttctttatttatagtacacgtgatgaagtgaagctgcaaatgccacacgttttgcaaccaggctggactccatgaagatgaagggagagttcggctttggtcacttggttaggagttaggacgcaaatctggaacttttgttgatgggaatgtggtacagtgggacgtttctttgtcacggacgttcccttctgttggattcaacgattgtttattcactgccgtttgtgtagggtaggaagttggtgtagcagcctgaatttgacactggggacacaggagatcggtttcagaattgcagaggcagcagcacacagattttgacactagtgagattgggtttgtttgccggttcaattcagtgtctgctttgaacttgaaggactgcaggttacaaatgtgcagtaagccgaaaaaataccttccaaacaggccggtcattcctgatctcaagaatttacaacgaaggttgtgtttagttcacgtcaaaattgaaattttggttgaaattggaacgatgtgatggaaaagttagaagtttatatgagtaggaaagttttgatgtgatgaaaaagttgaaagtttaaagaaaaactttaaaactaaacatggccaaagcagattgttccgatctcaacgaacgccataacgcaggcatctcgaacgcatctccccgatctctcaccacaacagcattgcaatctgcatcgactgcgaaaatctggattgattattgggggttcagacttcagagctgctaccatgtcggatcttgcgatggagtaccgagcaatacgcggcagagtcaacggcgcaaacacagcacaaacaacacaaagctcttaacgaaaactcatctcatcttctcgcgcaggaacagacagtgccgcgccgacacaagagtcttctccccaaacacgccacgggaccatcaaccttatcttctcactttgccaagacaaatcgaatcagatgcaatatggtttagtacttcaggacccctttcaatcgcaggattaagaaaacagagaaataggaataacgtaggaattgaatgccacacttattgaattcctatgggattttgaaacacgggtgtagtttgattagcacacagaaaaaacgcaggaaacttagacacatgaagaggaaaacatgaggtgagacctcatgcacctcatgcttatttttctccaaaattgctctagtaagattgctctagtaagtttcattcaataggaatttcaaaggaattgatagaaaacaatcctttgtttcaaaagactatagaattatttcccataggataaaatcctctagaatttctatggtttttccattaattcaaagggcccctttgaatcgtaggattaagaaaacatagaataggaaaaacgtaggattttaatagaaatgtaagagtaaaacagaggattgcaaaatgtaggaaaaacaaaggaatgaccgtttgattgaaccacagggaaaacacaggaattagatgagagatatagacttaaaggaaagttagcaagaggttgaagctcttgctaaatttcctctaaaatctctataggattgtccattccataggaatttcaaaggattagatatgattcaatcctttgtttcaaagggcttcataggaaattttcctataagattgaaatcctctaaaattcctatgtttttcctccaaatcaagagtcacagtttgactaccaaaagagaagaaaaaaagatactaatactatggtttacgtgttagagcaaaacgcattcacggccattcaagatatccacttggtcccaacactgcacaatcgtaatgcttgtatcttagttcaagcgaccaatgtctcaccaatacaagctcttattcaaagttacaaatggtcacgacaagttgacaacaaaaaaagcgagaattatatccttattttgaaatttgaattatagtggcaaacggtgagcccattttagtttcttgcgaagttgaagttgccacaggtagtcctgatgaagaagagggtgccactgaaccctagcctggaagcggcctcgtcgaacagcaaaaagttgttctccatctggaacgcgcccacggtcaccgcgctccgcgccgccctcccgccgtcgacgaacgccaagcacgccgtgtcgcccgccacctgcgccagcgagttcgacccgaacaccgtccagttccggccgccggacgtcacgaggtcgatcggcgccaccgcgtagccgaccctggtgaaccccagcgcgctgctgttgaagcagagctcgaacggggccacgctcggcatgcgcgttatcctcgccgtcgccttggcgaacgcggcgacgaacgggcggtacacgtcgcgccgcaggacggtgtacggcgcggccgtgtcgagcgtcacgccgccgccgcggctgagcgcgccgggagggaggtggaccgcctcttggttcatggcgatgccccggagcttgatgctgtacgccgaggggttcgtcgggctccgggccaggtcggtgtaggagaggacggtgctcgcgtcgaacagcgtcggcggcatcaggttgtacggcccgccgccgaagaacgcgacgccgggcgcggccgccgtgctcggcaggcagacggcgaactgccgcttaagcgacagcttcgagtagagctgggtcggcaggctcaccccgccacggccgaggcccgcgtcgccggccgccatggccggtaacgacctgaggaggctgcccggcgcgcatgacgagacgacgccccggacggtgacctcggaggtcagcgtcttgccgtcggtggcgttggcgacgatgtcagcgagcgtgaggtcgccgacggcgcgttcgcccgtcaccggattcgtcgggcgggcggtgcacgcgcgtcctccgttgttgcaggacttgtgcgcccccgacgcggcggcgcactcgccggaggagcacgggacggtggggtgggagggtgagcacggtgaccacagtagctgtccggagaggtcaagcaggtagttcttgttggagatggagagcgtgtggagcccagtcttggtgtccttggtgatcggagctaccaaggcttggattgcaggagatggagaagcttgcaactgcacaagaatgaagaagatgatagcgagaaaaaatgcttgggaaatcatagccatcttgatggtattgtagctgagttgtgtggttgcatgtaaaaggtacagacatgcaatgagtactagttgggatcttgttgagtttttatgtaagatcaagggtcaaagcttgcttatcctatataaaaacgcgcttgcttatcgataatataagtatggttgattagtataatgatttgaagttctgaatctatttcgttgtacagctagctacagtagttctacttcctggttatgtagccagtggtatttgaccattctgattgactgaagttatatatacatggatttgttcatttgataactataatttgttcgttattatttcaagttatatacttggattacgtgcgtacaactgcacaaattaaatcctacagttcactgatatgatacgcatgaattaggtagggcaagctcacatagtcgaaggggaaaatggccaatccatttaggacaagaatctgttgattctcgaaacggcccagagcaaaggcctgttcgaattcgctgccacacaaagcccattgcatcttaacagttgaatcatcatgtgattatttgttctgttctatgttctttatggtgaactggaaatgcaatgtataaggtctcaatgcaaattagagcttcagtccctgagagcaagctacacggttagtcattactggagagatgccaaatgtgctacaacatgagtagcaagtgaaaactgataggacagaacatggtttaaagcagaagggcacaataatcattctattcgtaaatgagaggaacaaccaaagaaacacagtacgggggctgcgatatagttaccttaagatggcagcatattcagaaatcactggaatagacatgcatgtagagcttttcttcgtcttgcctctcttgtttatgttctctgtcctgagaagaatgcccacactctgccgtgttctgcagaaattatgacatacgattaaatgattaatacgaatcacacctgctgccgaaaatatcacaagttggaaaaaaactgacaattcaaaaacatgcacagctagcgagggatccgttaatccccgttaacacaaagtattcgtacactaagcagtactcaaatgaggcatcacaggcacacaacacactaacttggcatgcaagagaactgaactaattgcacaactaagagatagcacctaagaataacatatatcatagagaagataaatattatttgctgaattcctaggtcatcaaatatactgctgaagaaaatgcaaatgaaatgaataaatattactgggtttttgggaggttccatacctttgatccttcggctgtttgtcccggtatgaatatttcattattaatatgattctagggatgtaagaaatattgctggcatcctccccttggcacctctcaatgagtcttggacagttccaaatgttatagttccttcaagctggtatggttccgtatgctctccggtaaacatgtcatgttgggcgaatcaaagatgttaatttgtttcagacaaatgaacttccctatccattccggtaggctactgaatcctcccaaccatagctcatcaagagcaataagattcttcatgctttcaggtaaatctgtcaaatcgggacaaccttggatttcaatgcattttagcgaagcaaggtgtccaaacaattctggtgatatctccagcccttcacatccctccaacagcagttctgagagcgataatattcttcaagcgatcaagtggaaaagtcaccttggcagttctgagaagcctcagccattctggtagcgtctccagcccttcgcatcccttcaaccgcagttctcttaaagcggtaaggttcagtaagcttttaggcagagatgttagcttgggacaattaatgatggtaatgtattcaagggaaacgtgctgccccaaccattctggcaacatttccaagtcctcccaaaaccccaattctagtattctaagagcaggagccagctgcaaacatattttaaggaaataaatgaggagagagaagagcagcgggctacagatttgtagccagctatagcacggactccaagacgcagtgtgtgtatgacagatgggaccaggtattaatagtgtagtacataactattgtatggatgggctattatattggctataattgaattggagctagtagttggctatactattaaacttgctctaagagagagaaagcactggatgacatcgggcaacgtccgcaagccgctgcaacgatgtacttcaaaaatctcaagggtggcaagtctgccccacctgtcaggggaaaagtggcaattacctatgaccacacgaaaaggaagagtggaagacacaaggctcctgaatcctcgttctggcaacacctcgtcgctactgtccaagtaccagttcatacttcttgggggatatggtaggaaactcaactttgggcagttatctaccttcaaaacatgtaaattagggattaagaactcttcatcttctttaccggaccgtgttgtccaccactcttccaagttagtcattctttccaaccaaataactcttaatttcttacagtttccttcctctccatagaattccttgccaattctcctaatgctgggcatgttattcatcctgaaatgtcttaggtttggcaactggccaaatgcaggaagagaatcacatgttgctaaattacagatcctaatgcacatgagataagggagataggaggatatgccagtcaaccaggatgggaaatccttgcacatgtacccatccaacaaaaactcttcaagagtccgaggaggtatgaggttctccagcaccaatttatccttgtccacacttcttgtgccaccaagttcccaggaaaattttaaccaacgaagctccaccatatcccgcaagttagctttcctagcatcttctagccgctcaacattttcaagatgtctaacttccagctcacgacaacgcagtctcccaagctccactatactgctgaaatcagcattttctatctcatgcacatcatgttctacagtgccaggcaaatttaaatgttttttaataatttgagtcttatgaaacacacattctgatcctgtagcagtgttaagcagggtgagactactcatattactgatactatctggcaagccatgcatattataacaaccagtaagatccaggacttgaagacgaaggtcaccaagtgaagatggaagactttcaagacttacgcaatatgacaaattaagatgcttcaaattaaacatgttgcataatgaccagggcaatgactgtagcttagaacaacttgtgaggttcaaagactggagctcagagagatcaccaaagcattcagggagttgtatcagcccatggcagtctgaaagattaaggtatttcaaatgcttaagttggcaaaaggtttttggtagcacttgaaccctgtagcagtcagacatatccaaaacctcaagtctataaagattaccaagatcttctggtagttgttctagctcatggcagtctgagaggattaggtgctctagagactcaaggttaagactatctggaagtttggttagctttgaacaacttgacaagtttacaaatgagagtttagcaaggctaccgaatttaccagggagcttttgaagagcacaacaacctgatatgtctagatgctgtaagcatttaaggttgttaattgattcaggcaactcttcaagcttagcacacccagataggtttagaaaatatagctcaacaaggtctgtgactgatgacggcagtttattaaggttactattccttgataggtccaaataacaaagtttttggaggctaccaatgttggcaggcaatatttcaagagagcaattggagagaattagactctgcatattttgaagtgtgtggaaagatttagggagggatataataggaaagcctgagacatcaagataccccagcaacatcagtcgacgaatggaagatggcaggactggattgcttggagtagattgctcttcattggacaatccactcaggtccaatatacgtatgtaactggtttgagagaatgcttttcggggaagttgcatttcaggacattctctaaaacagagggttcgtatcttgcagggtatatgtttaaaaatctcagttcgcttatggtagttgaccaactgtgcatgtcgacagtaatgctcattagctttgtcccatgttgttggtttgttggcatccataacaaggacttcatcagcagcaattatttttgcaagatcatacactaaatcatgcatggtgagctttcgtggagctttggcatgcactgggctaacctgcaaaaatataaagcagacattgaaattattaggtaggagtatcaatgaaatacatgtcttttgaacagctttcatggatgtcgaactcttacatgtacagattgagaaatggcaaaatcaaagaaacaagacaaaacagattacaaacacatttatatctattattctccaggctgtcaaaaaacacaatgtaatttgtactgcacatagaccaataggaaaataaaagaagatatttacaaggaatgcacatttattttgtgttggaatatgaaatatggcatgtatcagtgaatagactataaaatactataggtaataattagggttacaggtgataataaatactcactacagtctcaatggaaataaataggggctatattacgaaaggtattgcaacccaatttcaagcacgagtatagcaaagtaaaaatataatatatattgagaataagtgtaattaaaatagaattatgaataaaaaatgaagatattgaaatgtttggttacgaatgtttgaccaatcatgcataaaatattctatcagaaacatatgttcctagcaagtaatgatgaactatctatgtaaccattacttgtaagttacctacaagaaaaatgtaaatataaagtcactgtttcattttactagcaaggcatactgccatacccccaaataataaatatacagtgcatgaatggccaaacaggaacttaaatacttactgatgaagacttggaaatctgaagaaaggacatccccagaagataatcaatacaactttgaccagtatgccttgcttgaatgtatccaagggcgctccattgcaggatcaggcggtcactgtccacaacgaagcccttcgagaatgatgcaagacatgtaaagcacattttgtagtttggcttcatgtagtaatagctcaacaagacgcgttccaaagtgtctcgccgattatctactatgaaatccaaaacaatctttctgtctcttatatctctccatgcctcaacggtcctttgctcagacattacttgcccaagagcattagccaccagtggtagtcccccgcacctcccagcaatttgccttccgatttcctctaagccactttgatcatcatcaggtccaaatattctttgcttcatcaccttccagcagtcatcaggtgataaaacatccaaattgatatgatcggcctcatgcacagggcatattttccgctgatttgcaagacaaccagtgtgtagtacttgcactacacttccattgcgtgtagttactataatcttgctacccttgccgccatgttgtaacatctgcttcaacttttccaaattttctccatattcttcccagagatcatctagaccaatcaagtatctcctattggcaagttcttttatcagattatcttgtacaaactgcaagttgcagttgtctaggctgatacttctgtttgctcctctgatgatagctttcccaattttgagcagatcaaaatcctctgaaacataaacccagattttcatatcaaagacacggacccttttgtctgcaaaaactgcttgggctaaggttgtcttccctagtccaccaagcccaacaattggaataattgagatatcctccttggcttcagttttcaatagaaggctgattattttttctgtttcagcatccctccctagcattccaatctccatatcatcactgacagtaaaagtttcgttgcttctactcccttttgcatgtggttcatgacgcacaagattgagcatcttgccatccttttctattgcaactattttatccctcaagttcttcatgttgcgtgctatggtcattttctggaggagcggattgttccaggaaaagtataacttgagctgaaaaataaaattggagtcaaagtcactgtctatattagtgtcctttgtagatcaattttcatctactcagactagtctctgatagtccgatatggatcgggaaatggcatggtagtggaaaagatgaatttcctttttaattttagaaattaatcgggctggtatgatgcaaaaaagttccacaaagaaaatcacacatgtgcagcagctgatccgtaaagttgaagcatataacatttattcaaacacgacaatatgtggaagtaccttggattgatggttcctgatgagctgagcagcatcgaattcatccagcacgtcctcaacgtcgtaggcgacggacttaactttggagagccaccgccgtgccactgctccatcttttcctacttggcgcaccttatcgtcagcatcttgcatcacagcaaccagatctctcatcttctccttcatgtcattcacatcatccttgaacctccacagcagagtggcctcctccactgcgaggtcgccaagcttgctggcgacccgtctcgccacggaactcacaatcatctctccaaccccgctcatggcctcgaagctaccagccagctagagcacaaactccctatctctcccacaagagtatatgctgccaatttgtttgtgaaagctctcttcccacaagtgcactccgtctctttgctttagggaagaccctaccacagtccaccatgagcaaagttattccatgcgacggcatgctccacctacatgtcgcttgcatgagcaaagttattctatttgcccaccaaatagattttaaaatttttagtgcgttttccttaatgaaatttggtcgaccgaacctttcggccgacccggcaaaaaattttttagtgcgcacactttgcattgacacctgatgtgctgagtaggcagtttcagtgcttgctatatcgtctaaaggcaaaatgcactgattctgataaagcattaagatttgcaagtatcagcattttgatgaaaggaattcatagtttagtccatggcatagtgcgcttggtaggtggtgcgtggtggccttcctggagaggatacatatttaatattttacagaaaaggttaaagcgatggagtccaaattaattggaagataaaattaaaatgatttgcaatagccaaacaatggtgaaacctgggtaatctgtcaacaagaagaaatgactatggagacttatccaacaacttgccttagattgaatccttttcaagccttacaagacatccattttggaaggatttacccggcccgtgcgtgaggatgaggaccacacactattcagaattactcctccggatggaatgggactgactgaggaacagccagcaagaaggcaagaatcagggtcgcaactcgcaagatgagattatttccaattttttgagttgtgttagaggaattcgtttcaatcccaaatgttgaaccggatatacatatttatagagagagagagcttaccgattccaacaccaggaaatcgaggcgccgccagccactgcacttccgcctgtggatagaagggctcaaggtgctcggctcgatccatcgttctgcagagggagaacccgctcgaccgcctcctccaaccccttcaccgcctcgccgccggtgtgttcgctccgcccttatggccgacacggggtgaggagagcatctgcgccgccgccgcctctgtcctcttgggctcacccccaactagacgagatcttcagccgacggcccacctaaacacctcctcttaggcccaaaatggtcgtaggccgagtggcccacataggccaagtggcccatggcgcgtacagacgaaaacgaggcggacccgtggttttggtacactgatctttttgaagaaaaaatttgctacactttataaatcaaataaggtcaacccgccttgcatgttgcaaacgtgccggttgtcatttgtcaactgacgcgaccagccctaagtttgcacatatcaattatcaaaaagcggattgtagatcgaaactcctaagttcctagcgttgataaggtaatggcgatgcctggacgacttaatccgtacttctgtttatttagcccactgtgatacatctcattaattaattcattcattcagtcaaatcagtcccaacattgtaagatcgtcaagctagcgccaactggtcacggcgacaagcgagaatgagaactgtagacaaattaactgtagtatattgacgtcgcgaataaaaagaattgttaggcatatatatgatcggttcatccatcctgatcacaaagagcgagatagtttaatttgtctcgaggttgaagttgccacaaggggctggtttggtttgttgcctaaattagcctcaccaatatttggcaatttcaatagtgtttagtgtctatttggtttgaagtcaaattttagcatgtctaagaaaataggccatttcaatagtgaacttatgctattttgacttcaatccaaatacaattttaccttaccaaaattagtcatgtcaaaacttgtcaaaatttggcattgacaaaatttggtaagacctatttagaccacaaaccaaaccaacccaagatatcctgatgaaccaaagggtgccactgactgaaccagcttagtagtctggacgcggcctcatcgaacagcaacaagttacgttgtacgttctccatctggaacgcccgcacggtcaccgcgctcatcgtcgctgcccaaccacagtcgacgaacgccaagcacgccgtgtcgctctcgccacctgcgctagcgagttggacccgattgataggaaacgataggcaaataaacataaaaaacaatagaggagagaaaaaatcactgacaccagccaataaaatatcttcactgtatcggggtaaagttacaacaccgaatggcggcttataagaggtatatacatgaaggtgaaaccctaaaggataacgatccataccgcgggggcgcttcgctccagcagaaactgatatttattatgtgcaaatgaactttggttcacaactcaacaccgatcgatcatcatccagttccccgccgccgcctccgcgtgtcatgggcgcaggtgaatcctccaacgggctcacgctcggcatgcacggtatcgatcctcggtggcgtcgccttccttggcgtcgcaggacggtgcagtgtagggcgcgcgcggccacgtcgagtcatgacatgagcacgccgacgcctggagggaggcggccggacttcttcttggttgacggagatgccccggaggtagatgctgttcgtcgaggggttcattggtcctgaccttggtcgttgtaggagaggatgctgctcacgtcggacggcgtcggcggacagcggcatcagattgtacggcccactcccgaagaaggacacgccacgccggacgtggcgcctgtgacggcgaactgccgcttgagcgacagcttcgagtaccacggccgaggccagaggacgcccctgacggagcttccagcctctgatagatgctagtactcgattagcttactgtcgattcaaaatgcggtagcgtacgtaccaaccagcaagtgaaaaatgtaatagacagatgggagtggagacttagtataccttgaaggtgaaataatattcagaagttgttggaattgactgatttagaattttgcttcgtccctccttttttgctctctacacattctgtcctgggcaaaagaccgcttgatctatggttcactctgccttgattcgctctgcaaaagtatagcatattagccaaaccttgcttgtgctgaaaatatcacaagatgaaaacaaaaacagacaagttaagaaacgtgtacagctaggtgaggactgaggaatcgattaacatcagtaatataaaatattcgttcataaagcagcaatcaaatacagtgtgacaggtttagagcacactcagttggaaattggagagctcaactaattgcaaaacgttgagggatgacgtgagaacaaataccagacaagacaaatattatttgcatcattgaatttctagatcaaaatataatgttgaagcaaatgcaaacgttaatagatgaatgaaaagaatagttattactcatatacctctcatccatcgattgcttgtcccggtataaatatttcaccatctaacataatctttgggatgcgagatatcttgttagcatcctccctttggcaccattcagccagtcttggacaaaaataaatatataataattctaaggtggtaatgttccatatgctctctggcaaagatgtcaagttgggggaatcgaagatgctaatttctttcagataaatgaactgccctatccattccggaaggctattgaacccttccaaccatagttcttcaagagcagtaagattcttcatgctttcaggcaaatatgtcaaattgggagaactttggatatcaaggcattttagggcagtgagatgtccaagcaattctggcaggaaagtcagcatggggcaatcgttaatgacaaaccttttcagtggaatgtgcagccccaacccttctggcagtatctctaatcctttgcatccatccaaacgcaactctgttatagcggttaggttcttcatactactaggcagaaaagtcaacttagggcaatcgatgatgataaactcctctagggaaacgagcatccctaaccattctggcaatatctccagccctttgcatccatccaacagcagccttatcagagcggttaggttcttcatgctttcaggcagaaaagtcaattttgggcaatccatgatgataaacttctctaggcaaatgagcagtcccagcccttctggcaatatctctagtcctttgcatccatccaaccacagctctataagagcggttaggttcttcatactttcaggcagaaaagtcaacttggggcaattgttgatgataaacttctcaagggaaataagcagccccaacccttctggcagtatctctagccctttgcatccatccaaccgcagttctataagagcggttaggttcttcatgctttcaggtagaaaagtcagcttggggcaatcgatgaggacaaacttttccagagaaatgagcatccccagcccttctggcagtatctctagctctttgcatccatacaaatacaacactttcatagcagttaggttcttcatactttcaggcagaaaagttagcatagggtaattgttgatgacaatttttttcagagaaatgagcagccctaaccattttggtagtgtctccagccgtttacagccatccaaccgcagctctatcagagcggctagtttcttcatgctttcaggtagataagtcagcttgggacaattgctgatgacaaactttttcagagaaatgagtagccccagcccttctggtagtgtctctagccctttgcatccatccaaatgcagctctatcaatgcggttaggttcttcatgctttcaggcagaaaagtcagcttggggcaatccatgatgataaacttctccaaggaaataagccggcccatcccttcaggaagtgtctccagccctttgcatccccgcaacaacagttccctcagagaggtaaggttttgtaagcttgtaggcagagtagtcaacacagggcaattgatgaattcaatgacttctaggcaaatgagctgccccagccattcgggcaatatttccaagttctcccacgagcacaaatatagctctctgagggagacgaagctttgaaggatgtctggaaaggtcctcagcccactgcaaccttcaacttgaaaaatctcaatggtggcaagatgttgaaatcttacccacatgtcagggggatatttgcagttgttgatgaccacacgaaaaggaagagtggaagatgcaaggctcccaaaccctcgttctggcaacaccttatcgctattgtccaatgaccagtgcatacttctagggggatacgggaggaaactcaactttgggcagtcaactgccttcaaaaaatgcaaattagggattaagaactctctatcttcttcacccgaccgcgttgtccaccattcttcgaagttatccattcgttctaaccaaataattcttaatttcttgcaattcccttccccatcgtagaattctctgccaatttttctaatggtgggcatattcttcatacaaaaaaatctcagggtttggcaaccgtccaaatgcaggaagagaatcacatgttgctaaattagaaagacataagtaaatgagacaagggaggtaggaggagatgccagacacccagttagggaaatccttgcacatgtacccatccaacataaaactttcaagagttcgaggaggtaataggttctcaagcacctcttcatccttgtccacatttctcgtgccaccaagtccccatgacaaagttagttcccgaaggtcagtcatatcacgcaacttagcttcccttgcattgtccagccgctcaacattttcaagatgttgaattcccagtgcacgacaacttagtttcccaagctccactatactgcaacactctccattttctatctcatgtacatcatgttcttcacggccaggtaaatttagacactctttaatggaccaagccttatcaagcacaccttttgttcctgaaataacatcaagcagcgtgaggctagccatgtcgctgatactatctggcatgtctcgcagactataacaacaagtaaggttcaagacttgaagttgaaggtcaccaaacaaagacggaagatgttcaatccttatacaatatgacaaattgagatgcttcaacttaaatatgttgcataatgattggggtaatgactgtagcttagaacagcttgtgaggttcaaaaactggagctcagaaaggtccccgaagcattcagggagttgtttgaggccatggcagtctgaaagattgaggtctttcaaatgtttaagttggcagaaggattctggtaacactggaatcttgtagcaatcagacaggtccaaaacctctagtctataaagaatcccaaaatcttctggtaggttttctagctcatggcaatctgaaaggattagatgctcaagagactcaaggttaaaattgcctggtagtttggttagctttgaacaacttgtcaagtttacaaatgagagcttagaaaggctgccaaattcatcagggagattttgaagagcacaacaacctgacatgtctagttgttctaagcatttaaggttgtggattgattcaggcaattcttcaagtttagtacacccagataggctgaggagagaaagtttgagaaggtttccaaatgatgtcggaagtttactgaggtcactattccctgataagtctagataacaaagcttgtgtaggttaccaatattagcaggcaaggtttcaagagagcaattggatagaattagagtttgcatattctgaaacatatgcaaatatttaggaagtgctgcaattggcaagcctgagacatcaagataagctagcagcatcagttgacgaatggaggatggcaacgccatactaacagggatagattgcccttcagacgaacatccgctcaggtccaagatccgtatatactttgacccagagaatgcctttcggggaagttgcgatccaatgcactccctaaaatgaatggttctaaccttgcttggtagatctttgaaaaacttgggttgcttctggtagttgaccaactgtgcatgtcggcaataacgcttattattagctttgctccatgtatttggcatggtagcgtccatgacaaggaattcatcaggagcaattattgttgcgagatcatgcactaaatcatgcatggtgagcttgcgtggagctttggtgtgcattggactaacctgcagggaaagctactatcaaaatttaaaacggtgctgcaaaatacaatgtaaatagtgttttgccatgtacaagctgcttaagttgttttttccctttttcattgcctactaccaaaactgaactacaacattatgtaccttttctaaccttcttaattaaatcagcagatgccacatttcctttcaaaaataaattgtaaatcccacaaaattagtaggtataattaatttcagcagcagtgattaatctatatatcttataaagtcgatctcaactaattgttgtgtattgctaattctctcttcccccagaaccacaccatcttaattatttctaggctacatatggttgatcgaaggtgtaggttagatgcagccttatctttaatgaagtcacactgtttaaattatttctagaattagtaagttgttttaaggtataaattgtataaagccatgaacccaagcatttagatggttgatctaattgtaggtttgaatgccctaaactacggaactgcttatttttaccctcaactttgaatactagacaaataatgaaaaaccagacagagtggcaaaaaaacacacaccacaaaaagtagcagaaacaaaatgcgcaaaaggaataattaaaaaaacaatgttgcacttattttgatgagatgaacagatatttcgtctatataatgaaatatatcttttgtagtgtaaatctacaaaaacaatggactaccctaaactaaataaggtgtgtaacctatcaaactgaagcattgtattgaatatatcattttaaacgtattaaatttaaaaataagtatttaatttggaactgaaaatgcagatgttgaaacattaacttgtgggttttaaattaaaagctacaagaaaagaaagattattggactggattaggatactctagcataaattatttatgttacttattaaggttaatactctagaggaagcatatgtataaatttatcttactagcaaagcatatcctagtgagcatatgatgcatcaatatccagacatgaaccgtagaaaggtgttctatgatacttaccatggaagacttggaaatctgaagaaaggacatccgcaaaagatagttgacacacctttgaccattatctcgtgcttcaatgtatccaagggctatccattgctggatcaagcgatcagtgtccatgacgaaacccttcgaaaaggctgccaaatatgtaaagcacattttgaattctcgcttcatatagtaatagctcaacattaggcgctctatagtgtcttgctgatgatctgctttgaaatccaaaacaatctttctatcccttatatctgtccatgcctcaaccgtcctatgttcagacattacttgcccgagagcatttgccaccagtggtagtcctccacacttctcggcaatttgccttccaatttcctctaagccattttggccatcatcaggcccaaatactctccgcttcatgacgctccagcagtcgtaaggtgataaaacacccaaattgatatgatcaggctcaggcaccggacatactttccgttcatttgcaagataaccagtgtatagtacttgcactacgcttccactacgtgtagttgctataatcttgctaccctttccgccatgttgtaacatctgcttcaacttttccaaattttctccatattcttcccagagatcatctagaacaatcaagtatcttctgttggcaagttcttttttcagattattgtttacaaactgcaagttgcagttgtccaggttgatacttctgtttgctcctctgatgatagccttcccaattttgagcaggtcaaactccttggaaacatagacccagattcgcaaatcaaagacattgacccttttgtctgcaaaaactgcttgggctaaggtagtcttccctagtccaccaagcccaacaattgggatgattgagatatcctccttagcttcagtgttcaacagaaggttgattattttttttgtttcggcatccctccctagcattccaatgtccacgtcaccatcatctgcaaaagtttcattgtctctactcccttctgccactagttcacgatgcacatgatgaagcttaatgctatccttttttattgagactattttctccctcgagttcttcatgttgcgggctatggtcatcttccggagaagcggattgttccgggaaaggaataacttgagctgaaaaataaaaatgaagtcaatatcatccgctatgttaattttcttttgtatacccacgatagtatctgatagtctggtatggaacgggaattgacagtctaatagcaaacttctagagaagtgtttatagtggaaaagacaactttgctttttaattttagaaattaattggtttggcacaatgctaaaatattccacaatgaaagtcaggcatgtacagcaagtaaattgatccataaagatgaatcatagaacttttattcaaaacaccaatatgtggaagtggaagtgagtaccttgggttgatggttcttgatgagctgagcagcatcgagctcatccagcacgtcctcaacgtcgtaggcgacggacttgagtttgttgagccaccgccgttccgcctctccatcttttcctccctggcgtgctttgccatcaacatcttgtatcacagcctccagatctctcatcttctcctccatgtcgtccacgtcgtccttgaatctccacagcagagtggcctcctccaccacaagctcgctgagcctgctggcgacccgattcgccacggaactcgcaatcatccctccaatcccgctcatggatggtatggcagattcacagtgaactctatcaacaggaatatggctttgtgaaatagaagcaagatgtagatcgggaggggaagcagccacacatatactagtagtataccacatggcacagttcacgtagtttagtccatggcatagtgcgcttggtaggtggtgcgtggtggccttcctggagaggatacatatttaatattttacagaaaaggttaaagcgatgcagtccaaattaattggaagataaaattaaaatgatttgcaatagccaaacaatggtgaaacctgggtaatctgtcaacaagaagaaatgactatggagacttatccaacaacttgccttagatgcgcaagctaccagacagctagcacatgcgcaagctctctctctctctctcccacaggaatgtatgctgcctgtttgtttgtgaaagctctctacccacaagtgcacttcgtctctttgttttgtggaggaccctaccacagtccacaactgcatgtccatgagagtttttccttgcgattggcatgctccaccaatatgtcgcttgctttacccgtttgcccgccaaatagatttttagtggcacaatttgcatctctttgtttcttgacctgtagcctttttgcatcgacacctgatgtgcagtgcagtgtagacaattcagtgcttgctatatcgtctaaaggcaaaacacatcgattctgagaaagcattacgatttgcaagcatcatccctttgaagaaagaagtattgttgagaccatggcttggcacgcttggtggatggtgggtggcggccttcctggcactgagagtaagagaaaacagtaaaaatcaattcgaagatgaatgaaaaacggaagtgaaaccgggataaagatgggggaagagactagtccagcgacaacttagcattcaatctgcatcttttagtctttacaagacatcaatttgggaaggatctaacaggcctacagtacgtgtgaagatgcaggatcaccacacacgatccagaattattattccagatggacaacggcttgttggaatgtggtggaggaagagccagcagcaaaggccgcggaatcacttccaacttttgggttgcaactgcaaggaggggattcgttccaatctcaaacagtgaaccagatagagaaagagagagagagcttaccaacaccaggagaggcgccgccgctgcacttccgcctgtaccgagccgacccgagccgcgggacacaggggcgcatggtgctcgactcgatccatcgatccggccgccgccgctcgaacggacgccgcctccagcccccttcaccacctcgccgccggtggcttcgctccgccccccgtggctggactcacgggatcgtctgcgccgccgctgccctgaagccaccacagcccatcaagctttcgagctgggccttcggctcacacgcagcctagtccaagcaaacatatgctgctctaaggcccaaagagttgtagcccaagcagcccaaaattatgtcgctcgagctatcaacagtactacacactaatataagggtgcaagtggggaagccgcttatagacaaaattagtgcataaaccgcaggtttgactcacatgttatatatattaacttgatctataaatatgtttataaatcgacccacttgcatatctagatgcggcaagttaggccacgacacaaaaacccatgaattatcatttatttgacctaggagtgaattcgcgagtcggcccgcttgcatccctacactaatatgctcccatggtgattacagacaagatgtcctgactcttagcatgccactcaaatggttaaaaaaaattaaaaaaaaaaagatgtattaacatatgatgtatcatttcacaaatattcaagttgaaatacaatttatataagttgcacaaaaaataaattaaactacagctagttaacgtatatttatagtcaaatttatttttttttattttatggttaaatttcgccttgcatgtttgtggattgatctatcacatattaagttatcttattgttttttaaaaaaatttataaccatttgagtgacatgcaaaacctaatttttagagtttaaaatagttttcctttacagtacaggcgaggcgagacggactgacgatcgaagccgtggttttgctacgccgatggtgctaattaactggtcacgactcacgaggataaccgtgtacctgtggtcaactgaaccagccagcccgaagtttacacacgaatcaaagcggagatcctaggttcctagtgttgatcatctactgtttgcagctgggttttggtttgatccatggttttgttatgttcagtccaccttgagatacatctcatcaaattagcacgacatttactacgtgtataggtcaacgcttaaccctgctaaatcgctatacaaatacacggaaaagagaccatcttatctcagcgtctctcttcatcctaatcacctcgatcattcgctacgtttttgcttgttcagagcaacgcatcgcatcatgcctcgtccacctgaacctgtgcacgtgctgcttcttgctgccatcgcagtgcaagtgttcgtccggtgcacagcacaagctgcgagtgatcagaagccactagtctccaggctcgccaaggattacaacacctcactctacaccatctccgtcaagaacggcgcgccgccgctcgtcgtcgacctcgccggcgcgctcgtctggtcgacgtgcccgtccacgcactccacggtgccatgccagtccgccgcgtgcgacgcggtcaaccggcagcagcctcgccgctgccggtacgtcgacggcggctggttctgggccggccgcgaaccggggtcgcgctgcgcctgcaccgcccacccgttcaatccggtcaccggcgagtgctccaccggcgatctgacgacattcaccatgtcggcgaacacgaccaacggcaccgacctgctgtacccggagtcgttcaccgccgtcggcgcgtgcgcgccggagcggctgctggcgtcgccgtcgctgccgcaggcggccgccggcgtcgcggggttctccgggacgacgccgctctcgctgccgtcgcagctcgccgcgcagcgccggttcggcagcacgttcgccctgtgcctgccggtgttcgcgacgttcggcgacacgccggtgtacctgcccaactacaacccgtacgggcccttcgactacaccaagatgctccggcgaaccccgttcctgacgaacccgaggaggaacggcggttactacctccccgtaaaacgcatctccgtgtcgtggcgcgggcccggcgacgtcccggtgtccctgcccgccggcgcgctcgacctcaacgcccgcacgggccgcggcggcgtcgtgctcagcaccacgacgccgtacgcgatcatgcgcaccgacgtgttccgcgccttcggcaaggcgttcgacacagtcgtgaccaggtacagcatccgacacgagacaaacttacgccataaccaatgtttgatctctagctgattacttcgccacacacggcagaggaacggaaagcagaatggcgagggtggccaggcagaagcagttcgagctttgttacggcggcgcaggcgacaccatgttgtcattccctatgatgaagcggacgggcttcgacgcgccggcgatcaccctggagctggacgccggagccacgggtaactggacgatactgaacggcaactacctggtacgcgagacgtgcgttggggtcgtggagatggggccggaaggcatgccggtggacggcgagccggcggtggtgctcggcgggatgcagttggagaacatcctgatggtgttcgatctggacaaacgcacgctcggcttcagcaggctattggaatgggacctgacgaattgttacagcagcgcaagctttttgtgaggaaataactttatcgtgtctcaggcgttttccaatttccagtgcttgtagtcattgtactcaaacttgagtagtatacattggaacagaataagctgtcacgtaccagccttgatgaatcctgcagggatgaaacttttgttgctgaagctcaaaattcaaaagtaatcgatctaaacttgttcaatcacgatgtctggattctctgtttgtgtgtgtgtgtgtgtgtgtgtgtgtccaagctcaccggatgacgggattagtatagcccaaaggaatcctggagtgaccaagcagcccagccatagacattggtactacaagaactgggtcaaataccggcgatggggctcggcaagcagccgggagaagatatgctggtgtttgaactggaatcagtgcgctgatgaactttcccttggctggctgtgtagttcctgcttgaaccgggcggttgtgacatgtgagattgcagaaatgtttgtcaccaatcaccagtggatgtctatggtataaatgattttcttaagtaattttcagaaacttgcaattatttgaacaaaactatcgctttgctactactttagctttttatttgagaaaaatgcaacaacagtaataataataataaagtgcaactttacccctatgtgcctactacatgtggacccaactttaaacaacacgagtatagcaaattctatgacatatggggctcaaatttgtaagacatttaaaagttgcagctttccgataatatcgttactatatttttgagaactgttgttgaggttctctaaaataacaggaaactaatagctttgataaaatagctattaatatatgatatatcactccacaaatatgtatgtttaaattcaacttatacaattagaaacaaaaacaataaatttgacattgaatagaacgtataatttgcggttaagtttgttattttttgtttcgaattgtataagttaaattttaacttacatggttgtggaatgatatatcatatattgatctatcttaacaattttttttaaaaaaaattgatgattttttaaatgccatgcaaaaaataaggggatgtcacctccctcgagataaaaatccatctcccgttctctgaatctttgattgtttgtttttttttttttttgcagaaatttcaagctcgttactacttgatgatacgtgaaacttaaaacttgatacatgccggaacaaagcaccttgaaaccttttccgtactttgaaccatctccgtacatacttgtaaagtttctggttgttgtttagaaacctggaatcaaaagaacatcagaaagcattcgtacaccgggagaaagtgacccatagacgatgcttcacccacctctaaaatcctatgtacttaacatctcttataatcatgtcagacaacccttaattaatacttccttcggaacattgttttgagatggttcagacttcagagaataatccagcccgatgtttagactccagagccaagccggattgtcagagaaatcctgcgggcatttcccctaccattatttgatctcatatttcacctagaaatacagctaagtgatccttatctaggttccttgacttctaaaatttaggttgtcaatgctaatcaacagtgtattgatacacatttaaaaggatatcgatcgtcaactcctcgacatgataaaccggtgacatcttgaccctaaataactgatcaaaaacgaatcgaataactccacaggtactacatatacatgccatttctgtccacatccaatcaccttcaaaatccatcagattatctgaaattctgatagacaacatggctaaccctcctatcaagtgcttgctccctcctgcaatcgtgtcactagttctgctgatctcatgcatggtggcaaccggtgagcagcaagcaccgtacaaacccctcgtcgtcccgctcgtcagggacagcgacacatccttctacaccatccccatcaagaacggcgcgccgctcgtcgtcgacctcgccggcacgctcgtctggtcgacgtgcccgtcgacgcacaccacggtgtcgtgcctgtccggcacgtgcggcgcagccaaccagcagcagccgcgtcgctgccggtacgtcgatggcggctggttctggtcaggccgcgaggcggggtcgcgctgcgcctgcaccgcccacccgttcaacccggtcaccggcgagtgctccaccggcgatctgacgacattcgccatgtcggctaactccaccgtcaacggcaccagaacgctgcacccggaggagttcgccgccgtcggctcgtgcgcgccgcagcgcctgctggcgtcgctccccgcgggtgccaccggcgtcgcggggttctcccggcggccgctctcgctgccgtcgcagctcgccgcgcagcgcaacttcggcaacaagttcgccctgtgcatgtcccagttcgcgacgtt

SEQ ID NO: 4425 - DNA, 44667 bp, Oryza sativa
actataaaaacgtactccctccgtatctgacctaggtgatgtcccatcctcaccaaggttgggttttttcttttggacggaggaagtaattatcatcctctgataatcctatccacgcacatccctagagaaaactgtttctaaaaccaaaacactacgggcaaccgttgtctcattttctcgaaatccctttgtaaggcacgggcatatccctagttgtattgaaaatttgaaataaattttgcaactacaaatgcttggactaaactatcacaaaactatatattaaggaattgcatatcacaaaactatagatttgatatcaaatttatcatgaaactaaaaatttatggtaaagtatcatatcaaaactatagatttagtaatgaatttacgacgatgctatagactttagattttaattccctaacactatagctatgcatgcaggaattattaatgttatacctttgcaataaaaggccaacgttaataaatgtacagttttatgatattgtttcaattcgtagttttgtgataatgttagatttgttgtttcgtggctgaagtatgtagttttatgatagttaattcagtcaaacaatatgtgattgatggtcaaagtcatatttttggcaccatgtcgacctctaaaacgccatgtttaaataaccggagggagtatatcattgtatgcgtgtgcgtatcttgtgttggtatattcttttgagctccgagggccaaggagctgatcgagcaagccaaaatattgtctctcccctgtttccttcgtctccatcgatatcaacacgaggcagcagctagcatacgtagccatcagctagcagccattgcattcttcgatcgtttcttcccagtgaaaatattaattaataaactagctagcacgcgtgccttttaaaaaaaagcaagtaattaatttaatcaactactaagtgtggacaaatcgtatgtccgagccttaattgcattgactgagagaggccattgtgcattgggggctgaaagctaagctagactgacacataaaccgtgtttccaggaagtgaaccgcaagctaagtgtgattaaacaatgtattactgtgacacataatgccatatataaaatggcaaattgccttattgccgcttcggctgtattaatttggattatactcaatgaaaaactatggcgtgtgtgctttgactctaggtgcatgaaatgactgctcggcgcacacgtattacataagcattttgcctacctagcttggcaattaattaattagtgctaattaagcatgaagtgtacaactgtacatgatgtactcttgctaatttagctaattaatgggtctctatcaacattggaaaggcagctccaactctatcaaagatctgtatatatagaggctatggtgtatacgtattatacatgtacgcttttttcttcttttcttgtgtcagcagtggctacatatatataaaagcaagggaggggcattcatgaaaatgaagatcagttgaagcctagctagctgatctggtgattggagtgaaaattaattagtgggtttgatattttactataataatttggcctgtgcagctatagctaacactgccatgcacgcatggacattttgctgtatactttagtacttaccatatatataaaaacataattttcctcctttacaagatacggaagattagctagaagctgctaattaattaactttttgcttcttatatctccgtacctctaagaacaaacaggggaaagtaggaattgaagggacgtaaagaatagtaatatatccatccattagtagcttagctagagccaaaaatttaactatatgtagggtttgtttagatcccatcaaaattttttaccatgttatatcgaatgtttggatatatgcatagagtattaaatgtaaacgaaaaaataactaattatatagattgcgtgtaaattgcgagacgaatcttttaagcctaattgctctatgattttgacaatatgatgctacagtaaatatttgctaacgacggattaattaggcttaataaattcgtctcgcagtttacaggcggaatctgtaatttattttgttattagtatatgtttaatacttcaaatgtgtattcgtatatctgatgtgacacgtcaaaacttttcagcctgcatcaaacacagccatagttatgtcaaagttatttgtcaagcatattaatttttgtccttgtcatgtatgcactttcgacaagagatcatacctatagctagatgcttggcaatttgtggcatgcacaaccgtgatgtgtacacgtaattagattaattaactaaactagctaattaatttcctgctttgtcaacatttgcaagcctgcagcatatccctccattgcgtgctaattaacaaaaggttgctatggttgggagagaatggtgtttttagtgctttctaattcatatgtactttttcctaaataagatgcaccatgcatgcatgcatatatcggtagtacaaatatttgacatgcacgttgtgccttttttttttctaattagtgaactatagggtcatgaataataccaagcaagtttaattcttcgtaactccccaattctcaaatagaatgtctcgttttaggatacgagaagtagctaaacataccttgaaatctcaatgccctaattaattaacatatgcagtatacactggctcatcttttgcttgtcatctaaatatataattataaaagatctgaataaaaatcaagcaacatagatcacaacgtcacacgtcatttacaaatatgcaatactaaatacaatctacatatattccacactcaagaaacaattacatatatgaatattgttagtaccaatcatgacaaaatttgtttattttttctctccatatggattgattttggacttgaaattttgcaagattgtacatgcaaatatcaacgttctcatttttttcagatctttttataactatttagtttatatttaagaaatgaggcgcgcgcaaatatgttcacaacatgcacctgagcagtaaaaatacatctcccattggcggcaataatatcgatgccctaattaacaacaaacaaaagaaactactattgttttccctaaaaaaaaagaactactattgcaacactgtttttagcagaaatggatcggagatcgagggtgtgcctgcaagaatacaagttgtgcagaattatgagaaaaaaaaacgcgccgaattcgccggattagctagtactcctctctctgctagtacggagtagtatgcacactgtagtacactactccctcacagccataataaatctagactaccctttgtatagatttgttactattatagaagatgtcacatttttttttctatgttaagttttttttacagttaagttttttttacagagggagtagtaatataatcagagtggaatcttcatgtgtaataattatattagcaccattgattaatcaacgccagtatattagtcctcgatccaggtggcaatggatcgatggattggacacataacctaattaaaaaagtaatactccatcggtcccagaatatagcaatatactccgtaggatagatgtaacgtatcctaatactgtaaatttggacatgatatatcccataccagctagtactatattctaggatggaatgagtagctatccttgtggaaccttttatgttccgatataagattatctttacccatcttatttctcctaaaataagtcaatctttaagtgatcattgtattagggagtatgagacaatttatcaaaacaaaataaagtgaaaaaaagttacgtcttaaacacgataattttttggtccgtccgagatgagtcatctctgaagagtcgcgttgatgtgaaagtcgaatctttttaactttgtatttgtacgaatgggtgaaaaatagagatatttttaagaagggtgatagtactcccccgtcccattataagcgcaaccatgcgtttccgtgtctaattttgatcgtccgtcttatttatttttttataattagtatttttgttgttatgagataataaaacatagatcatacattatatgtgacttatattttttattttttaaaaataatttttaaataaaacagaggattaaaattagatgggacgaagggactagtacagactggcatgcagtgcgcggtctccaatgcatgcagaagcaggccaatcgggaaggccggggacagggcaagggcacatgtgtcggtccgtatgtggtccttaattccatgcagccagctgcgccctgcatgccttacctggtgctgctgacagcgtgtgcgacacgcgctcactgctgcagccttcctatttgcccaaatagatcgagattatttgtcagattataattgtccctaacaaaatttcatcctctagttaggccccgtttatttcccaaatttttttcctaaaaatatcacatcgaatctttagatacatgcataaagcattaaatataaataaataaataaactaattgtacagttatggaggaaattgcgagatgaatctttttgagtctaattagaccataattagccataagtgctacagtaacccacatgtgctaatgacggattaattaggctcaaaagattcgtctcgcggtttccaggcgagttatgaaattagttttttcattcgtgtccaaaaagtccttccgacatccggtcaaacattcgatgtgacacctaaaaatttttttttcgcgaactaaacaggcccttagcaccatgggattaaggctactccctccgtccagaatatagcaacctactgaattagacgcatcctagtactacgaatctggacaggaagcatgttcagattcatagtcctaggatacatctaatccagtcctacgttgctatattctaggacggagggagtatatgttttggaagcttttggtcaaatgcagcttcctttgtaatctctggctctttctaacaattcagatgctcgcgtagattctgagaaaaagtacgtacctacctattataatgaactaaaattcacaagctgaaaaaactagtttttttccatattcttattttgagaatctcaaattctcttacacatagcttaacctagattgtgtgttgtcggacattgaactcctccaccagggaaccgtgagaccccctttgtgagttcggccgggggcagcgggtgagattcaagggcttggtgagcggagctgtgtgatcttgagggggttaggcccctccaagacgatgagacaaaagaggtttatacaggttcgggccgctgagaatcgtaataccctactcctatgcatgattgattgaatgtagaacacaagtgtttagggttgcgagacccaagcgccagttcgctcggaagtcccccctcctccaccactaggcctggacctccttttatacctcaaggggttaccacatgggcccaacaacctaacctagctccgatggagaagtattataatctttgcattaaatgcatgtcttgtctcttgacttgggaagccaagcacacgtcgtcttgatgatggggcctgtcaaatcttgtcgcctgacacggagggtgcccctgtcagtcaccatttaatgggtgaagacttctgggctcctattacaccgggaaggagccttgctttgaacagagctggaggaccgactccggctgggataagaggatgagaacctctcaccatcactatttgatgggacatgttaggctgcatgccgcctgacacacgagcaacgcacaggcgcactagccagtcccatcggtcattcgaccggtcacagaccggttgagtgctctgcacgccgcattaaatgcagcgtggcgcgaccactcgggacgccataaatgcgggtaggtgggcacctggaggcagacacctaactcaccgtacgtggtgacctagagagggggtcgggggagcccgacccctagtcacgggaggggcagccgccgcctgacctcgggcccgatcccccctcgggggggagccacgtggcgcctggggcggccttctccctctagcctaggccagggagtggccgccgccctacctcaggcccgacccccctcggggagggccacgtggcattggagggcagcctcctccatccaatctctgggaaggagtggccgccgtcctacctcgggcctgactcccctcgggggagggccacgtggcatcggggggcagcctgatacccccgggaccatatcaccgacatgtgtgtttggcagtcgtcccgtgcattctgctaataacgatgatgtgttaatttggaatgtgtttttttgtgattgatactgataatggcactataggtacagaactccagatagctaggcatatgcctttcttcttttctagccagtgacagtgactaatcttactggctccagtgacttacaggaggagcaggggagtctagctttcgttgctgtggctgcttttctatccattcatggaccataggaagtgcaacaagtggcatatggagttagcactttgcatatatatgcttcatgccaaaggggaaagggaaaaggacctactatacataaagtttgggatgatgcctctcagacatctttgaggttggtccactcttgttgtggattcctatgcacataagagtactacagcagatgtgcttgacagtggaaaagcgccccttaatttcttgtagagattaatcctctttgtttcaagcaaagctagactagagcataaggaaatgtcagcttcaatcatctgcattatctgatctagattctagcttaaaaaaactctatgcactaattcacattgagttatatgtaccactcaaattctagaacataagcttaagttgacgaggaagctatacatgtagatgtagttcgtttaagcagcttgtttttctttgcataaaattaagttgtagattactgtttcaaattgattactgttttcaaacaatacacataaatataaaatggtttgacaataaggtagaagggactattggcttagtggtggtaaagttgtgggtgcacggctttatccatttagaactcaaattcatatgtcctgtttttgattcaatagatattttgagatgttaggatgtactgttgacctccatctctatatctgagcgtgtgtacaagtatggagtgtcttccatgtaataacaaaatgtagagcgggatatatatgtaatttccatgctggtgaagtgaaaaaacagagatagaaggtccaatcaacggggagattcctgacatatatatattggttttggtcagaactgaatgctccaagaatcaacagttaaatatacttacaaacaacatgcaaggaagcacagattccttgttgatttgattattcctctgttttcatccatgcgtccatgctattaactctaaacatctcaacaaatggggccacgagttgctttggcaactaggtataattcaactctttggattctagcgaccaatatacaaccttgaactcaaaggaatctccatgacgacctgcaggagatgcatgaatccattaattgaactgcaatatatatggagcctcttagtgccggcacgatgactaattaagagtttaagacccaatgcaagcaggctcgtttaattttcttatcagatccaccactaaaacctgagaaattctcactatggaattaactactagcctaactacctcgattgcacatgccaacgagcgcctcacgcattcatgttctatctcttcagacatcggtttgattattggatagttggcaagaaaagtatggaataatcttgcagcaaattaaaagattaccaaaacgacatcagcaacgagatgtgaacctctgaagaattcagaacagagatggacagagagcacgcgtgcaggaccacgcactaaggcgatttctgtggcgcatgtctagctagcagcatgaaattaaatcaaatatatatccatctcaggtcatctctaacatgtctcgctgcaagcagatctggattaaagaaacggagaagcatatgcagttgcaagttcatgcaggtataagattctgcaaaccgagcgctggattccaaatgatccatggaccagctgcgagagaaattaaaggaatttaaaagatgtagacgacgacgaaaccaagccggccaatgcgagaaataataatgcctgatatatgaattaagtcgagggttttgttggtgtcaggtgtgattttcatgcaccttgcggacgtcgccctctcctattcacaacctagctatcggccagtggctgattcagctctcgggtagatcgggtgaccgtcgggactttggcattatcgtcatcaccatcgatagccatcgacaccgaaaaatattattaagttgttagggcttaatgatatcgctaggttcactacttacctcaacaccacgattctcctccttctccgatagctcacactgtagatccaccaccgtctcccaatgcctcctagtgcctccaccaacaaattactagctcttatcgctaacatatggtctctctcccgcgactaaggtagcgtcatcgccacctcgtcgccccaccacagccacccccattgtcgggccacagtcacctcggctaccgcctgttgacacgaaaagctatcgcctccacacgaagatatgggagttgtgtttatctccaatgggttataaaaattcaggttactatatatgtaagtaatataagtttcagcatatatgctactacctccatcccaaaatgtttgacactgttgacttttttaaaaatgtttgaccgttcgtcttattcaaaaaatttaagtaattattaattctttttctatcatttgatttattgttaaatatatttttatgtatatatatagttttacacatatcacaaaagtttttgaataaaacaaacggtcaaacatgtttaaaaaagtcaacggtgtcaaatatttagggaaggagggagtatatataaaccgaaaatactatatgtgctgaattatggatgttaatcgctgcaaaacacgtactgctatatatgtgagattaattatatttgctgttctggcgtgttggcgtgaatgcgtgatgcatgcatgcatgcggagatgcaaaacactgaacacacatgtgcatgcatgcatacgtactttctcctgtttggactgaagtaacactgcatattttcatgcacgttttcgttgtgaaaacgtactgttcgaccgtctctgcatggtatatgcatgcaagatatatatagctggtcagatgattaattattgcgacgacacgatgtgacatacaaatcggccgtatcttcagagagcaaacaacaacagctagctggcgagtgatatgatcgatagggaaggagtactcctgcatgtcttgatcgatcatactggtggagaaaccatatttggtcggtccaaccaaattcacaatagtcccggttccattaaaaaccgggactaaaaagcatttttagtccggtttataattgtaatgggactatatcatctttaatcccggttcgtgttatcaaccgggactaaaaatcatctttagtcccggttggtaacaccaaccgggaataaacatcatctttagtcccggctcatgtcgtatcagaggctgccagtccctaaagatctttagttccggttgatgttaccaaccgggactaaaatcctgactttagccccggttgttgttcccaaccgggactaaaaatcaagtacaccgtatataatccattgctgctatcctcaaaaaatttctatctcctattcctcctcctctctctcacacttatccttatcttcttctcagacttctctctcacaacacttagccggaggagctcggccctggagcgcggcggcggggaccctggcgcggtcggcggctcgtgccgggaggcggtgggggccgtccgcggcaggcggtggcgacggcccgcggcggtggccgcccgcgcaggaggaggcggctgcggcggccgtccgcggtaggaggcagcagcggtggccgcccgcgcaggaggaggcggcggtagccgcccgcggtaggaggcagcggtggcagcggccagatttttctttttttaataacttgtgattcaatggatctggatctgtgttatttgatctgtgatgtatttgtgatctgtgatgtatatgtgattgtgattgtgatgtaatttttttttagaatttgtgatgttttttttctgacaatttgtgatgtgaatattatgatttgtgatgttgctatttgatctggggatgtagggagcatcttgatttcgatttggaatttctgattgattttgtgattttggagagattggtgtgaaatcaatattcaaaagaacaatggaaaaaaacctggaactaaccctttagtcccggttagtgttgtcaaccgggactaaagattcttctctttactcccggttggtgttaccaaccgggactaaatatcgatctcttgtcccgagtatttaaaccgggactaaagatagtgatctttagtcccggattgttactcccggttggaaaaccgggactataggggattcccaaccgggagtaaagagcatttctctacctgtgttaatttcagctctagcacaattacatgaacatgctacatgcacatggtaattaatcatactcgttttactatgaccaggttacagggtccggctatatatttagaggaccttacgtgaacttcgtaacataaactctcaaaactagatataattttacttgtaatatatatttttataaatcatatacagtaaaaatgatgcaaataaacattataaacacctaaaattacgatgtaaattaatcaaacgagaaaaaacaaaatcacagcccaatttttagactatagatatatagatgcaaataaggagataagaaaatcacaagacttcactttaagcccctaaccacaatgaaataaagtgtgactgtgtgggagtcggacattctgatggctgggttggttggcataggcgaatccaggggtagtccggtccactcgggaccacctgaaaaaatcctgacccaatacatatatatacatatgtgaaaagaaacttttagaaaaggaaaaataacttctttattaatatgttatgatgcacattagatcagtttatagttataactttgttatatttagagtatttaaaagaattatataagttggatcatccatataaaaaatcctagatatgccactgttgattggtgattcacattggtagtttggtaaagttagtatgaaatttaaaattatgtcgtcattttaatatattatatatattaataaattgagaaaacatatatgttattatacgagaaaaaaatataatgatgctagcgggtaatctgcgcgggacaacatgctagttcaacttatacaactatacaagtagaaacaaaaataataaatttaactatgaatataatgtgtaatccgtagtcaaatttgttatttttgtttcgaattgtataagtaggatttttaacttttatgtttgtggaaagatatattgcatatattgatctgcgttgatatttttttttcaaattttatgataacttttcaacgcctctccttgagtcctcgagcaagtctaatagtatagcccactgctagctccaattcatttatagccgatctaatagccaattcatataatagttgtttactatactattaatatatggtcccacctgtcatacacatagtatgtcttagagtccgtgctgcagctggctacagatctgtagcccgttgcttttctctctcatcgtttatcttattaaaatatatttatagctggctaatagttcgctatcgtaactgctcttaggatgcacggggtacgaccatcctaccgtcgtaggtacgcacgtactgtacgtacaatggatcgacgtaaatgcctaccccaggtccaatgtaaatgcatgcctcatgcacccattcactactcatgaaattagtgcttcacctgtcatcttatcttaaccatttctcatttaattttacgtgaaaattttttaaaaagcgtttataatttaggatgtagcgagtacgtactgtattactgcatctgcatgcaatgtaattagtggtgtaagtaggtcagccgcgaacctactttttatcaaaataagcgggtttgtggtttattttagcttataaatgagttttgtgggttaatcacttactccacccctaagggtgtgttcggcaccccttttcccaacccatctccctcatttttcgcgcgtatgattttcaaactactaaaaggtacgtttttttaaaaaaagttgtttaaaaaaaatcaaattaatccatttttgaaaaaaaaaagctaatactgcgaacacaccctaagggggtgtttgggaaagaggggctaaactcaaaaaaataagtccctcccctagggacttacggctgtttggttggagggagcttttaagagggattgagagtttagagggatgaggctattaactgttttgtttggttgaaatacatgggaattttggtgggatggggatggggaattgagggagaaactccctccttttcaatacatgggtaggggaggtaattaggaggaaatttctcctttattttgcctaaacaaatctcagccatccattttcattaatgacctaaactccaactaaactccctttcaatttccaccacctctaccaaataagatactgggattaaaaatcaaattcccattttaatatcaccatcaattccctcgtataaactcccaattcccttccctcaagttaccaaacaagctgttatggttttgagagaggggctactctctcccaaacaccccctaatacactccatgacgccgagagagagaaagacagatgacgcagatgaagttggtcgctagctgccgtcggcatgcgtttctccggccgtccaccagctggtttctgaaacttttgctgaatctgctctgcaaatgccggaggagagggaccgcgcggccagcgctctgcaggcgacgacgacgaagaacgacagaggcgtcagaggcagagtaaatgtaggagtaatttaaacattgaccaggtgaatgatccatcattcgtggcacctctggcaacaatggaatacgatgacgacgtcacttttgcgcctttgaatgatccatttaatcgacagttatgcatcaccagaagagaagttaattctgcattactgaacattcaaaatgatgttttttgttttttttgtttttgtttttcctctctccctgcatttctcttcacctcaagagaatatcccccttgtgatgcagagaaagaagagagagtttcagagatagtaagaaacttatcgagttttgttgtttttatacactcaggttttgatttctcgagtgaagactgcactgatgtgagaattaatgtgggtgacagagatccctgcaactgcaaatgaattaaggttgatgattcgatggccttaaatctgtcaactgttgcagtgctgaagaagatgctggacaaaggcagcagcagcagagcacgttttcgtcactcgccagcagcagcagcagacgtcgggtaatggtttacagttactgttcagaacaggttcagagaaaaagctttggcgaaattaatgtgagaattccaaggcaataatacacgtaaggtacagtaggtaggtacggccctgcaatgcatgcagctcatgatgaggccacgttttattctgggagcatgtaagaaaacatgcttagcacagtgcttaaaactttaatacatgtgccatagtataaacagtagtagaacacacatgggttttcagagtttcagacttcttcagaactttctactgcaactcgttatctgaacatggaattcctctgaacattgctatggcagttcagatttaagcccacgaattcggcagataagcagagcccatggagaaaatgagatgaatttgggctgaaagcgtgtccaagatatatgggcctatgaatcctcagaaagatatatgggcctaaagatgaatttggtccgcataaggttttctcacctatgggcttcagagatttttcagccatttttttcttaagaacatgtcagtacaatacagtaattgctaaagtttatctctaatatttctcgacgagattaatccatttctgatttatcgtagataataatccatctaaagcgaaaatatttttcatctcaaagagaaataaaattattttaacaaaatttatctatactactactagtagtaataaacaaatgaggaggaaatggtagagcactacacataaagcgatcttttcagaaaataattttgtcccgaaaaatacggattgtggagatgataatatagtacgttaaggcactgcctcccggggcccacctttttatctgcgttcccacctgcgacggaggagaagagagagaaacccctcaaaaccctcctcacccgcttgacctcgccaatcgccggcgagcgacaggcgagacgagagcccgcggcggcggcagcggcggcggcgatcaggacccgatcctcaccggcgcacttctcctggttagaagctcctcctcctcctcttcctccccctcgagttcctggttgattggattgatggttggttggttcgctttcccccctaatctggttgaatcgggttgtgttccgagcaatctgatccaatccgatgggcgttctccggcgaggtggatgccgcccgcccgccccctaggttatgcgagattttctaggaagtagccctcgccccttcgccttcttcggtgctcaacacgtagggatgaatcgcggctatcggcttccccgttagtctgaccgatccctcaccggcaaaggctttcgagtaggcctccccgtgcgcaccactgatccatcgctgaggggatggatttggataggttagtacgtttgttggtggtgaactctaatcaaaatattttcgtcttgcgtgggttctcatcttgagttttggtgtgggctatctaatcgaaatattttttctctccagtcatccagtttgttgaggattcgtttgatgcgtggtggttttgttcatttcggaagttttttggaaatcggcttaatccccatgcccctacgttaggttgtcctctgtctactgtaacgattgacatggatgctgaattgttgttaggtcctttatatgtatctatctgtatgacatcatttttatagctccttgatttggatggaaatagggtttgtggtacatgacaggttgattgttatgtgtcgcatactgcacatggatgaaatttgtagttggatactactcaggagtgctactgtctattgaattaagaaaaacaggagtattattttcatgtcatcatgcaacattattgaaatttttaataagaaactactttgtgttattttgcctatttgtataaaacttctacgttctctgaatccccttgcataacaaacattgctggatacataaaaatcgattcctcttattgatatttccatcgcttcagttcattgcaggagcaaagcagtaaaaatgaacgagcacctccgctttgaggatggctggaagatcctggaacaggggattgtgaaatgctcaaagcttttggaggattgccctggtggaaggccaactgtgaatgagtacatgaattactatgagtatgcttctatcttaccactgcacattatgcatgttctcggttatccacatggtattaaaaacttgctgctcatcatacattcctctatgttttccagttgcgcttaccggatggctgtgcagaaagaccagtattgtcaagagatgtacaattcttacaaagcaacacatgaaagttgcgtctgtgcaatggtactacagtactagactgttgctagtttttaaatccacaatgtcatatttctagacatagccaagtaagtttattgtgttgcataatgatgattgaaatcctcaatttgaatctaatgaaatgtcaacttcatttacctccatagatcatctgttgtaaaatctgttgttacagctcactgtcttgacgctcacatataaaatcttattaacatattgtttgatgtactgctgttaggcctagggaagttaggtcttgtacaccatgcctcccataaaaatgaagctcacatgcacatatgattgtatcggtacccatggaaaaaagatagcaacttagcggtccttctgctgttgtgaaacaggcatgtttgatttgactaatatgtgttattatttgatatgcttattatcatttcacatattattaatttaatacgtgaaacaggcatgctcacatataaaatcttattaacatatgattgtatctgtttgcatcttgtgtgttacaagttcctttagttggagaagagagttcggccgttctatcccttggttcacttattttatgtatttaggttttaccccatctgatgcataagcaaggtgacttattttggagagagcttgtgaaaatgtggtcaaactattgtgccatgattagattcacaactggctttttggcctatttggaccgctgctttgttacacataagaaactaccttcgcttgaagacgctgctgctacttctttcttttctccagtgagtgtcacgcaataattcttttagttaatattccatgtgcatttgtgataataatctgcttacgtatctatttctgtacacacaactgatcatgtccttctgccaggtcttttcctacttcaataatgaaatatcagatgttctactgactctggtaatctgacatggtatacattttattacccttttaactgcattccttctgtgcataacaattaattcatcccagattcgccaagagcgtgatggatgcaatgttgatatggatcttttgatgggtattatgcgtggcatatgtcgttctgaagtcaaaaccaagctgaaaagtgctgttattcaagatacatacttgtactactccaggaaaagttatgaatggattgtgcaataccctttgcaagattaccttgctaaggtaacctacttcaatagaactacgtagtgaggcagtgttacttcctttgtagtttctgaacactgtttatatgtgttatcttgtaggtccaggaaactgtgcagaaggaaatgaagagactgattcactatctgtgtatttctgaggaagagggttcaggcctctgtttgaaggtaagctaggatcattacgagtacagttttatgacctcgagttcatgtgcacccatcatactttctacagtttaaaagattctaaaaaagaatatatatacattgacaatatgtaatgacatgttgacctgcaaaaagaaaatgggtgttacaaaagtcatttgtatatacattgcatatgagaccatattttttcacaaatttggtgcagttgctagtgcatagatggatgaactataacttgggtgcatatgagctcaagttcttttctgcatttcatgagtgtactgtgtccagtagaagccaagcagtccttatctatcccatgtttttgatgtttcaaattcaattttcaatttgccccctgcacctgataaggttatgattgcttaaacttggaccactgcactgcatcagctaccatgcttgtttttttaaaaaatatctttaattaaattttgttactttagactttgataaaaattgaaaagaaagaaaactgagatactattgtttcttatactctgtctgttctgtaacaggctgttagtgctccattgatgcaagcttatgaaaactatacgaaagagaaacatattggtggtcaagttttgcttcaaacatacaaggtaaactcagctgcattcccagtatcgtttgatagctcatttccttttaatagattgcaactaaccattcatttactcatagcagactgtagaggatgatcttctggacagatgcagtcgcttgacaattgacaatggcttggacaacaattctttcagtcacatggagtagtaaggtagcattagctaacatctgcctataagccaggttacatatagaagggttttagaacatggtctacatgaacgagaaccttttgtgcagctaggtttttgcgatagctcgaagctgccacgtatagatcttgttgacctatcactgatctcattggcaagattcagttagagttctatgtgcacgctatactgaatccatacttcttttttgcatggacacaagagattaattcttagtccacctaaacataatgattccggctcctttgcctcatggtgcatagcgttccgcagaatcagatgcgctcgagatgtacaggatgctagacagcattgtgtttcctgttactgcctttaggtgttagggtgagtgcatgtgcctgtccacatcaaaagtttgtggcatgacatctgatgaatgggtacgcgtaatctgttgccttgcctttgcctgcttctgatgctgttcattgttgaagtctgctcatctagttttctgtgacttgattctactctgctttgattgcctgtcttgatggaatgaccgttagaagacgtcacagctcgaggcctgtgaggctgtgagttcctgtggttcattctggccaattgattacaactgattgttcttctattttggagtaccatggtgaatgatgcttgaaacttattggactgacattgaatgattctcgcagcatttcaatgccgtactttaaaatgtttatcagagaaaatggggcctcatgaccaccaaacttctgaaagaaagtgctatctgtacatatcttggcctccgttaatgttccctgtatgattcgtgccttaccttcaaggtatctaaaagtgtgataagctcgactaagatcaatcataatccatgtagggtcatctcgtcttcctttttgccgaaaccattcgaagcgtgctagtcaaatgcttttgcttttccgttgtctatgggtttaaagaatgatcgtagtttaaagcacctttacctgtacttttgacgcacaaatgaaaaagctactacagctaacttcaacacgaggtagtgctgatcatcttatccagcactgtagatgaaatattgaataccaaatgattatgaaaatcgttcaaattatgcttgtccatttttgtggaatactagtacatacaccagacatagtacaatacttcttcagacttcagagtatagtaacattagtatacttcagattatcataaacaataactcaaacgcaagtattgtgtcaacataattgatctttttaggttgattaattatactgaattactcggtgatcaatcgatcaacttaaatctttgcaaattcaagcgtcttcttgccctggagccggctggtgacgtagtgccggctgtactcgccgtggttgtacgtccggtacctgcgcggctccccgtcggcgacgagctccggcagcgggccgagctcgacgtcgtacgccggcgcgtagaaggtgacgacggacatgcggtcgtgctcgccgctggccaccgcccggtgctccacgctcttgtacctgccattggtgagcacctcgagcgtgtcgccgacgttgacgacgagggcgccggggacgggatggacggccacccagccgccgccgccccggagcacctgcagcccggcgaacgccgcgtcctgctggagcacggtgaccgcgctgccgtcggagtgcgggctcagccccagcaccagctccggccgcgggcacggcgggtagaagttcatcctcaccgcctgcaccgcctccccgaacatcccgttcagcctcgccggcgccagccccagcgccgccgcgatgtgctccagcagccgcacgcacagctccctgatctccaccgagtacttctccagcgtcttactgcactcgagatcgccattaaaacatgtttaaccctttgtcttattaaaaaaattaattaattattattttttttctattatttgatttagggttaaatatacttttattatacatataattttatatatttcacaaaagtttttaaataagatgaacggttaaatatgtttaattaaaaaagttaacggcattaaataaaacggatggagggagaagctgttacctaaagttggccggagttgtcggccagaggttggggcggcggatgaaggcgggctcgacgccgagggcgagcatgttgcaccagtcgagcttctggtcgtcggagaagacgaaggcgtggccgtagccctggatgccgccgggctccatggggtacttctccttctcctccagcggcagcatgaagaactccctcgccgccttctccatctcctccatcgtctcctcctccactccatggttcacaacctacaaccaattaaatcattcccaaacacaatctagctagctaattaatcaataaacttgtagtggtggaggtataatttttcgttttcctggttataatcttcagaaatataatcttaatttttttctgctatatcaatagaaattcgcacttcttgtgcaagtcgtttaaaaaaataaactcgtagtgttaattacctggaagaagccccactgctcgcaggcgagcctgaggttgtcgagctcgtcctcgctgccgcgctgcagctcgccgacgtcgatcaccggaatccgctcctgcgcgcgctcgtcgtcgacgacggcgtgatccggccggtcgtcgccgtccctgatgtaccgctccggcacggtggtggcggagcacagtcgtcgctgcagctcctgcacgtcatcaacctgaccgatcttgatgatctcactcgccttctccgcgcagacggcagcagcaccagaatccatgccaaaatttgcccagttctccaagaatctatgccctactccaaactcaccagttgatcagagtatcttggttgagtgtggtttatatatagtggctgccaggttcatcaccgccgtccattctgaattggtaactactgtaccaattagcgacagttcaaaattagttgcataatttctgtcttgtttggagatgactctgcgtcggacatccgatattccatcaaatatcggacgcatgatgtttgcgtgtcatcacaccacctgcgtatgcagcatgaccaaaaaaaaattggtccgtcaaatgttccagttgactaacgagtgaaatatcaagttatataggatgaaacaaaaaattagcaactaaaacatttaaaaagcttatgaaacatgatgaaaatacacgttgaaacatatcgctatcacatatgaaacaaccagtgttagtggattgaaacatatgtttttctttcatcaaaatataatcatacgatatcttgttataaagatttaattatgaagaatacagcggtgtgatcggattatagattagataagtaatttaagagaaaattcgttttgaatatcattaaaggtgcatgttatatggttggagatagagatacagacttggatatgtgcatatgtgttagagactgcccgtccgatttttcttggtggttcaagcattcgagaagaagcattttctgtcttgtttaggtgatcaacttgcgtttatcgattggtccactggcatggtggtgaaagggagatcgagaaatgcatggttgcacttgtattggagatcacttgcagtggcagagagcatagtgcatagctagctgcaaagctactgacactgtagcagttcttagtgcagtgttgtgtcacatgtgagctcaccggtcagcattctgtccgggatgtgtcggtgacacgtcaggcagatgacgtgtgggcccaagggggcaagattattgaggtccagaaacatccactgaagattcaggaatcagaggaaactgttgtcgctgaaacagctgcagcagcctactaggatcaggaattcgtcagaatcccagccggcgactgtgagattcatcgatgatcatgcagagatatgtgaatcatcaaattttgttttgcactttctgcttgtcaccctgaccggattcactgaccgattaatgcaaaaccattagtgcgctctaggcttttaattttagtctttgtaaagccttttgctttcgcctggttgctgcttttgacgacgctgctgcgccatgaatcgtggttttgtgacgcaaccgcaattatctccgatctctccatcgagtgacgagttggttcagaatcttcagatctttgtcaaactctgaccgatttcacatctctcactcttctctttctctcccctttttggagattgagatttagtttatgttatcgcctgataatcatggctagtcaggctagatgatggtggtgcacctttgaactttttttaacaataacttacattgaacaaagtaactataactcatttgattcacaattttgtgtattccattatcttaaatactaaaagattttgtctttagaagaagagtgtgttacatgggcttcatggagccccagaaaatcgaggttgcttggcccattcaggtcagtctgtttcatcttcttgtgggcttttctggtgaactcaattcaatgggcttttatatgggccattttgcttacaaacttacgacggtccaagtttcggcagctgcgaacaattcctttttattttgtcttcttcctcaattcgcaatcatagtttgtctctgcgcgcggcgagtggccactgctcgtcagtcatcatccagctatacaataattcatccatttttgttcggttttataaaaaaattgcaataattattcttctctttagcagctaccccttcatagattcaattttaaatttcaaaagacccacaaactcatctatgatcctgatcggagagttttaagattctgataagctagctggtaaaaatccgaagaaactgagagtatctgattgaaaatctatactgtttggggagcttctactagctaatctctagctgccagtagctcccaaagcataccctacatctgcattccctcgtgatctcagatttgctcgagatatgcaaaaacaccctaaaaagatggcctaattacgaattgggaggggtaaaatggcataatggtaattaataatgatagtgatagtagtacgacgccatctgtgatccatccataacccgttccgttccattcctgtctcctcgtgatctctacctctcgacggaatcgcgcgccgcgctctcgcgacgccgccgccgccgatcgatcgatggacgccgaggccggcgtcggcggcgccgaccagctgccggtacgcgccccccgcctccggccgctctgctccctccccccctcattgccctgtctctctgctctccttcacgcgcgctctctctctctgtgctggtgcggattgcgctttgggggggggggggggggggcggaggctggatcctaggtttggtaggttaagtggattacgagggatgattttgggggtgggattttgtggatttgagttatgtttcggatgggatcaagggtttcattgcgaggaatttcacccgcgattttttttaaaaaaaatcggcgttcgatggcgagggtttcgcttggaggaatcggtcgtcattgggtttgtttgtttgtttcgcttggtgaaatccttaggtcttcattttgttctggtcgtgtagagtggtttgatcgtgtaggtggtccagggattcgattatgatttcaaaaattgattcagaggggacgtacgatcacacctgctaagcagatagatttatcattcgtaatggaagatccccattggccactttgcggtagtccacatactactatagtcacatgatacaaaagcctgcaattcattgtaaatggaaaggactgtaacttgtcgggatgaagttatcgaattaaattgtagttttctttggttagatttattcgcagatataagttactatattaccatctgttatcggtaaattcagaaacatcagtatacacttaatgcctgtccctttccttaatgctatatactaaacggtaactctgcttgagtttgtgaacgtacaagtgttgataattttgattagtcatatgatgcttgcaagttttattaatatcagcctgttatatgtaaaccttagtacttgcatattcatggtattggtacgttctctttgatcatttttttggttatttgatgattgatcattatggtacttaagagtaactagcatgaaaattcatacttccaaggaaacatttcctgatggtagtttttttttccacatattttcagtggaggcaacactacaggaatttactgcttttagcataccagagttttggtgttgtttatggggacctaagcacatcacctctttacgtttataaaagtacattctcaggaagactacgtcgatatcaagatgagcaaacagtctttggtgttctttccttgatattttggaccttcacacttattcctttgctgaagtatgtcactattgtattaagtgctgatgacaatggtgaaggtacacagtacacactatttcttggaaatttggtataaacacacctgaccttacattatctatcatcttgatgaatcagcttacagtaaatatattatcaatctatttgctggagtatcacactaccaggcttcttcttgtctttttctttttacaaatttactctgtatctttgttcaacctgaagaaaaataagtaattcctgtcacttttgtaggtgggccgtttgctctttattcactgctttgcaggcatgcgaaacttagttttcttccaaatcaacaatcagcagatgaagagctatcgacatactacagaaatggttttacttcacgtcatggatctttaccttggctaagaaggttcatggagaagcacaagaatgccagaaccgtgcttctcctcatagttctgtgcggtgctagcatgatgattggtgatggtatccttactccagcaatctcaggtggatagtgccatctctctctgttagttcatgtaattcaaagttgttacatatcaacctctttgtatgttgatgtgctttgttctgcttgtttttccccctccagttctgtcatctatgtctggattgaaagttcgagctactggtttacatgatcgtaagtacaatatacctctaactcataactccttagtgcaacaattttagaacacatctaggctgttgagtgagtattgtcaatttcaaatttacagccctatgtaattacgttcgtaagtattaatcaatagaattattctttctctgaatgcattcaaaagtaggcacctctgttttgactgtaatttcatattattgtggattttttacttatgtgaacatctgaatgcacttgatttacttccctgagaatattagtttgtcatgtcaagatgcacctgcacagtatcttgcaaaatttaagttctgtagtgtctgcctgctactaccatgtattttgtagtgtctgcctgctactaccatgcacctgcacagtatcttgcaaaatttagtattttgtatttaccatgtcaaaggttggccagtataagtttctggctactatattttttttctggtgactatttctatatagtgagacttccatcctatttgcgtgataaacaatttcctttaggaattattgctattctacttttgggattaagtgtaataacttattttctgtacaggttctgttgtactcctttcatgcattgtgttggttggtctatttgcattgcaacaccgaggtactcagaaggtagcgttcatgtttgcaccaattgtcgtcatctggctcttttgcattggtggaattggtttatacaacataatacattggaacccaaggatataccaagctctctctccatattatattgttaagttctttaggacgacaggtaaagatggttggattgctctaggaggcatacttctttctatgacaggttggttactatttactccttactcttggggtataatctgtattcttgttgtactttactttggtaagtaaaatacttgttgggatttaaggttcattttctgtttcaattttacaggctgtgaagctatgtttgccgaccttggtcacttcacgagtgcatctgtcagggtgagttaacttatctgtctttagttgctcactttgtggagatatacttctaggtctgttaatatatgttatggtgtgatattgtgttgcctagtaaagcaaccatggaaacttagagaaagcaatttgagggaaaatataacggaagcaaaaagttaatgtactaaacagccttatctgaaaataaatttagttagcttgtgagttgtgactacatatttgaaaccaaccagaggctcaaaaggaatggaggaacctagtcattttctttgttgtggactaatgttgctcgtacaagttctctcatgtgacctatctggttcatttttattttgaagcctcctcctggattccatatagtattctttgctagtaattataatttatgtttactaaactttgcttgcttcttctgccagttttgctcattattttttttctattgctgaaatatatccatgttttgtccttgttacagctagcttttatcaccatcatatacccatgtcttatattacaatatatgggtcaggcggcatttctgtcaaaaaatatccttgacatgcccacaggtttttatgattctatcccaggtttgcactgtcacccctctctctcacatgcatgcatgcacacagatatgtaagtgtaatgttaattttaattgtcatccaggacctatattttggcctgtgtttgtggtggccactctcgctgctgttgttggtagccaagctgtcatttcagcaacattctctattgtgaagcagtgccattcgttgggatgtttccctcgagtgaaggttgtccacacatcaaggtggatctatggacagatatacattcctgaaataaattggatccttatggtgctctgtgtagctgtcacagttgcattccgtgatattacacttattggtaatgcctatggtaagcgcctgtaaccatgatttttcacgtgatcaagagctccttgcatatagccttttgtatatttccagtatactcaagtgctaagagtctaagcactgccattgccatggtttgtcattgcaggtgttgcgtgcatgactgttatgtttgtcactacattcttgatggcattgatcatgatcttcgtttggcaaaagaacataatatttgctctatctttctttttattattcggatccgttgaagttgtttatctctcctcatccctcatgaaggttactcagggaggatgggtgccgcttgtgcttgctttaatattcatgtctgtcatgtatatttggcactatgggacaaggaagaagtaccagtatgatcttcagaataaggtatcaatgagatatatcctgtccctgggtccaagccttgacgtagttcgtgtcccaggaattggtctgatttacacagaactggtgactggtgtacccaacatcttcacacatttcactactaatctccctgcctttcatgaagtcctagtctttctttgtgtcaagtcagtaccagtaccatatgtgtcgccagatgaacgataccttgtgggcaggattggacctagagcatatcggatgtaccgctgcattgttaggtatggttacaaagatgttcagagagatgatgacaattttgagaacatgttagttatgaacattgggaagttcattatgatggaagctgaggatgcatcttcttcagcaagttatgatactgctaatgaaggacgaatggccgtcataacaacatctgatgactatgactctccactagctgtgagagattccaatgacctagctgactccatgacgatgaggagcactaaatcagagagtcttcgaagcttgcaatcctcttatgagcaggaatcacctaatgtgagccggaggcgacgtgttcgctttgagctgccagaggaggatgacatggatcaacaggttaaagatgagctgttagcacttgtggaggcaaaacatacaggggtaacctacgtcatggggcatgtctatatcaaagctaggaagaactctagtttttttaagagatttgcaattgatgttggctactctttcctccggaagaactgcagaggtccatcggtcacactgcacattccacatattagtctgatagaagttggaatggcgtaccaagtgtagcgcgatgctcatcgcaggtcacgacgtcacgtggatacccggtagcaacaaatcatggtgagtactagccattaaaccatatgaacttacaattgttccagttttttgttcttgtaattatcatttggatatgcgccgcagctatatccctggaattggaagatattccagagagaacttggtgagcgaaagatctttttaagtatatgctgttctttagaggaaccaattaactttggcaacatcggatctatagcaatggaagttattatttttggttttatatcatttgataattgactaatcatcttcatttctccctctccagtgctacctgtggccgcctttttggagtcgaggctttgattcctatgctttatccatgcgttttcagtttcagttggtacagatgaagaggctctctatgttaatatgatcatttagctcaaataaagcatcagatctaatgatcgtagtttgctcttcccttttggtatatttacatgcatgctctgtaatttttatgggagctatgtaatggaaatatgcgtccccgtttttattgcagctatgtaatggaaatatgcgttctcgtagctgatatatcccaatttttgttaggaagcgattaccacatatattctttcatgtatgaatttcttatggaacagaacatctgtagatatacagtgcctcgtggaatttctctgcaaataaaccagatactagataacatcagtatgatttcctttttcatttggaactccacttttcctgagatcccttgggccgggatctttgtaacgcaaactggttttttttatctcgtgtgaaatgtgagattcatacattccaaacagcctgcaactcaaggggaagcaagatgaaaacagtgcttttattaagagaaaaatatctacacacaaccgaggcggctcaaagagctttgggaacccgaaagctaaaccttctgcaggctaaaaactctgccgatttgttacttatgtactttccagaggagctccatagccgtaggagggaaagacgcttcaggcagcagcagacgaagtagcagctgccactgtcttgttgagcagcacgcggagagcgtctgcagaggtcaccggagggctgcacttgaagtcctggcagacgtgcgccaccgctggcttctccggtgggctgctacgtgccatctgcgcgatgatggcgttgttgctctcccagaatcccatttcctcggtgttcctggggtctatttggatcacctagatcaacaaacagggtggccagatcagtaaaaacagtagagacgctacgtcgaatgtagaatttatgatcaactagttcatcgctcacagttctatttggatcatatgtcgaaaatgcggcagcaaccatgtcacggaattcagtcgattctttgttccccaccagaaccacctgcttcctggacgggacagatagcatgtctgccgcacaacacatcaacggcagtgctataccaagttccctcagcctcgtctggaagacagcctacgaaacaaaaaaatgtataacacgcatgagcaaatctcttgttcccagatgcttagctggaaacgttacttcttgttcgccaattgacatcagaggctaaccttgagcctcatgttggaactattttttatatataattaaatcagtcttgataataggcttaaatgtgtttacatgaaacagcaccatctggtgaacaattcccaaacagtaccattactttctatgaaagatcaattcaagattcagaaatcacaaggcactttttttttttttggaaaatggattaaaacccagcctctacatccaaatcggatgtacacagccacaatttgttttacattaatacaaagtgtaaacagttatgatatcaaagcacactacagatggatagagaaacatgaaataatcacataccaggagatgctcaacattgcatttgtaaccatcggattttgctgcatcaaatatactggacaatctgatcaagttgatagcagctactgagttaccagaaggctccgcaccatcataatcttctttaacacgcagaagaacagaagggtcttctccaggagtattgaaatagccaccaccttgtttgtccaagaacaattcatcctgcatatgtcaacaattatggcaaagaacaaagcaaattatgcaagatataaaatagaagtggcaaacaagtacaaattccttgcctgaatgacttgaaggtgagcagcccacataagccactctatcttaccaccatactcatagagatccagcaacccgtttattaggaaagcataatcatccaaaaaacctggtgcttttgctggcccatttcggtaactatgattcagcctgtttgagctgctatcatatagtttttcctttataaaacgtgctgccttttctgcaactccaagatattcctctggctgcaaaatatccacatacataagtggtgaaaactcaagaaataatttcagagcgatgggcaatggataaatatgatgatgcagaccaggtaaggaaaagatttatcgcacttaatgaggtagctaagatctggatatgaagccatatgaagcaacaaagagcgccacatgtgcagaaaagaatgttcaaatacaacattatgctactttcatcgtcacccaaggaacaacatcataggcaacatttccatttattattaaacagatcatgtatgggcatgcacatccaagagactgtttgaccaaggaaaactgccacagcaaatcatggaaaagattacaagagaacaaagtgaatgacaaattaatcaatcatgtgcattacaatgagaagcaatatctagagggtggagcagaaaactttacgttgcacccagtaattgggaaacaaaatctggttccagttggttctgatttcagaatttgggaagctcttgcaaaagcagatatagctagtccattccatgagacaataacctaaaatagactgtagttagtacattatgtgacaataaaaaaatggatgtgccagacatttaagcaagaaccttatcatccaaatgtggccttggcctttttgaccggacatcaaacaacttatgccgacaatcccccaggatttgagcatattcatcaacagacttgccacactttgatgccatcaaagaagcttgttttctttctattagcacatttttacccttgaactcatcgtgaggatcactcatccgcgaaaggtcgcaattgccagatgatttgacatagtaatgattcttgaatagctctgaattctccccaagtgtgtcttcaatctgtgtgaagaacataatgtacctatttaatgaaaagatgcatatctctagatctcaggcactataatgtaagtgtgtaaattcaatggaattattaatgtaactactaccaaacagatactatttatttttttaggagctattgtataaaactgagtagtatttacaaaattcgtttccttcaatgcttacatttggtatggaacaaaagaatcttcaggctataatggtactataaatcaagtggaactgggactgaagagtttaatatctatattagcaggatgtgatagcagtaaaactcaaatcaactgaacatagggttaagcctcacaaattagtctaagaagtttaaatcattaagcccaccttctatggactgggaagaggtatttatgtaacaaaatgttcacatgcactagtaagaatagttcatggatgatggacgtacctccttattagtccacacatagaaagctccctccctttttcttggagcaccatcatattctgcactatcagcatcttctgctgagtaaatttcaccttcttctccgatcatgtctctcctcaagtaatcaagtatatcacgtgcaactgaagaataatactcatctcccgtgatcagaaatgtatctagatatacattagctatctgtccttggtcgtacaacatcttctcaaaatgcgggactaaatacagagaggagatatgtgaggggaattccacaaagtggtatgacggaaaatttagccttgaacttaccatgccagcactcatccacactatatctatgaaagccacctccaacgtgatcatgaactccaccccttgccatacattgcaatgtatgagttatcatcttcattatattttgggattcactcacctgtccagattccaaatgcttccgaaatttatataacattacacaattctcaacaggtcttggaaactttggagcagagccatatccaccgaattttggatcataactgcctgctaactgcatagatatgagctgagaatctgtaagcgcacatatatctgatgaataatgatgctagtaagaaaataatgaaaaagtaagttgtgcaacccaaggttttcaggctctctataagcttcattccataagcagtgtttttcacaaaaaaaaaaggtcacaactacaacatagttggctgcttacatatactaattgaccagaacaaaatccttgtatgctgatattcaattctaattcagaagtgtatcaatgcaatatgtcaaaaaagagtgtaccagtacagggaaaaacaatgttgatagactactcaataataacataagaataaagacatacaaatatgtaccatcagccatcgcatgttcaaacataaacacctgcaattgaagaccttatattatttttatccctatttttgaacctcgtctacatcaggcacatttgtagaagttcagacaacagagcaaagtccattttgtgacagcacttttgaaaagttcatcttgcttaaccacatatgaacctaagatactgatttgatctaaccaagcttccggagcatacaagtataggatgtttgtatcactaaactgtgacgcaaatcttacaaggctaggattcatcatcctaaaaaaataaataatctagctactgcaatactgttacaccattaaagaaatcaatttggtcagtcagtttcaagtagaccatgccagagtttataaatatgatagcgtggatatatatggagtatttctcgaaccttttcaacacaattatccacagaaacaacagccagatcatttggcatatcttgagagctagctttagcagataatgcatctcgcagttgtttgatgaccacatttcctgtcttctcaagcgcatcgcgtttagtttcccaggcctccttaaccttcctaaagaaggcaagtgtaggcgtgtcaaattacacagaagctaagcacttacagtaaccaagtccagaattagtaaacttcagctgataccttaaaatagtcttgaatcctgttcttccgtacttatcatctggaggaaagtatgtaccacccatcaacggtttcaaattaggagacaaaaagacactcaaaggccaaccaccaccgccatacagtgctgatacatatgtcatgtacacctaaacgatgatataccatgattaataaagaacaaagtataacacttaaggaaacagaaacacaagggacccttttagtctgaagatacaaaataagaaaaaaaacaactcagcttgggacacttaggaagattaccttgtcaacatctggtcgctcttcacggtccacctgtcaaaactaataatcagaaggaaagcaatacagttacattgattctttttgaagcatcattacattgcatttacatatattttcacacagtgaaggcatgtattattttttttcgccaggagtgaaggcatgtaaaatgatatgactataaaaatgctactggaacacttcaattaatatcagaatagccgtaccttgatgctaacaaacccatcatttagaatctttgcgatttcatcattctcaaaagactccacttccatcacatggcacctttgaaattcaaccaaaaataatagtaaccaatactgatgttaaacatgaagtgtaagatgcagaagagagtcacatatcacacataatacgaatatacatgatattaataaaagcaaaaggagatactaaaggcaactcaccaatggcatgtgctatagccaacttcacgggcacatcaacatttgccatgaagcaaaataagcggttagaatacaagaagggagaaaataaatatggaaagggtgaatttgaatgaatttttagcttagattccacttgaaaacagttcaagttacaatgattgtaaccatactttaccacggcacactattgtattattatatttgagagaatgcactgttcctattgttgttttagacacttcatacttgatagaaagatgggaacgtcctttctgcgagccttctcgaaagcctcttctccccaaggataccaatcgacctgcattaagtaaacaagtatgtcactaatctagtttcttctataaaatttttaaaaaaaacaatcaaacaattttctcggttagcttcttacatgtctaagaattagataatttttttaaaaaaaaatcgctttatctccataaccatagggtcatcgtcgactacgtgatactcaaattaattcgaggaaaagctcccacaagtggtgtgctcagtgattctctacaaattacaaattacgagatgcctcccaaagcggcggaagagccgatcaaatcccctcattctcaactcaaagagagcgcaaggtgctcgacaaaatcccgcagagaggaggcgaagacggcgtaaacgtaaatacgtaatccgcccccgcggagactcactcaactcaccgggttgtacgcgtgctgcagcaggtaggggctgtgctcggcggcgaggcggttcgggctccgccccacgccgtgccgctcccctgacgacgaggaggaggacgcgccgcccgacgacgacatggcggcggaggaggcggcggcgaggcggcggcggcggtggtggcggcggaggaggcgaagcgtggagagcataggaggaggagggcggcggcgacgaagcggttggggaaggttggagaagaggagggcgaaagcggcggaggccgccatgtggcctcggcttctggacgacacctgcctgcctccgctgcacccgcgtccacgcacgcacgcccaggtcgttgtgacgctggctctcactgcctgctgggtcccactcccaggagaaaggaaaggataacattgttaagactaataaaattttaaaaagaatatagtaattttttcaatataaaatcaaatatattcaatgttatagaaaaatatttacaaataggttctcgcttaaaaatatttagtgactgaggatctatttgtaaatatgtttttacagataggtctcctttttttacaaatggatccttggtgctaatgttcatattagcgacttagctttcaccggcagacgagggagatggcgccaatgttattggcattgtcatgttagaccatggcgccacgaaaaaggttcattccgaaaataaacttttctaaagatctatttgtagaattattttttttaaaagcactgaaagttgaaaaatccagctccaatctctcactgctaaaaactaaccgaccaatgtctgatttaattattagttgataataaaaaaatataataatataggaaagttgtaatgctagatttaacaagatgcttgtattgatagctaattattttttttagtggtaggcgacataacatcgacagcggggtatctgtagtgacttcgtcgaaccgaagatatatcgagcccttatttcaaaatagtacccataggtgtgtgtatgtgtttatatggtgagtgtacacacgttgtaagcgtccgtccatgatgacttcattaaactcaagatatgtcggcccttatttcgaagatactaataaaggtagggtgtgtaagtttattgagcccttatttcgaagatacttataaaggtagggtgtgtaagtttattgaggcgagtatgcgtgcgttacgagcatatgcgtttataccgtgtttttttaaaaaataattagaatatttaaagagaaagtggtggttaatgaagcttaaacatgccgccgtgtcgatgcattcgctcgtgcatcttcaagcggccctcgaagcgccacaaagcccacgtagaaatggagaattaccaaaatgcccccttcgtcttccatctctcgattctctctcacaccttcctcctcctccatctccctctccgtttgactctccctgatccgcggagctctcgagcgcccgccgccggcgagcggggtgcagcgccgcgcgggcgacctcctccttccacctgcctccatcatcgctgcttgaatcgatccgaaggtattcgttcttctcccgtactccatcgtctaccacttccgggccagttttgagtagatagatactttgtactagattggtaatccgttcggatttggaactatccattttcttccggattccttcgatgcgtggtcggatggaaattgagtccacaaggggcagtttcatttcaaaacaagaggaattcggggttcagttcaatctccgcgacactagtttggcccctggtagtggtaggcgacagtgtaagatgatagtatccgtttatggggatttagggaactattatcaaatatcgttcctagtgtttttgtgtgagactgtcgcactgtatctctctctccattcgttacatctactgatgcaaagttaaataggagtataattgtgatgcaagtctgcaatcctgaaattttgatccctctgtttgtgatgcttgatacagcattgtaaatggctgctgggaggggcatcagtcagcttttgaagaaagcatttcgtccatctgtaagtactgtgagaacttcggttcccccctattcttgtacatggttcttttgctaaaaattataaatttattccacgtcctttctactactgcctctgttttagatttcaagtttgatcaagtttgtagacatatatactaatattacaatatcaaattagttttattaagtctataattgaatatttttcataatatatttgtcttgtgttgaatatcttactacttttttcctacaaacttggtcaaacttaaagcaataatcaaaatgacttataatctgaaacggaggaagtattgtatttgtgttattatcaatcaaagaatctccatcctactcgtccagacatttggattactgttatcttggtagttctagatttttccttgtaggtactttgtttggagtaaagcagctgccttctgttttagcctagttgtgttgtatagactataatgtgggctcaccaggggatgagaaagttggtgtcatgatggcagataagggcagcaggccagcagggttagggatactgtgtagttttaagggtgcgttcgggtttcagggatgggaattaatccctcccgcacggaaaacggagcgatccattagtgtgtgattaattaagtattagctttttttttcaaaaatggattaatttgatttttttaagcaactttcatatagaaactttttgcaaaaaacgcaccgtttagcagtttgaaaagcgtgcggcggaaaacgagggagaggggttgggaaaaggggcatccgaacacacccttaaacagtcaggcaaaagggcaatgcttctccaatcggtagaagaaagggaaaaaaccccacaacagctggagttatccccgtgcttggaagtaaaacaaggaaatgaaatagtgatagaaaacaaaaaggggtcaactgtcaggctctaacttaacaagaaactcctaatttatctcctacaactcttttataccatttgctttgctttgtgtcggttcctctaataggaatccacaacacctaaatgcaattgttgaatgaatggctgactcattaatactgcggcaactgaacaataatggtttaacttaattgactatttatttaagttaattcgctattgttatttgaaaccataaactttgcagagctcatctccgctctcttcatcctggataaatcatgaagagtcctctggcttcactggattgagagcattggctattctgggagttggtgcttctggccttttaagttttgctacaattgcatctgctgatgaagcggagcatgggttggaagccccacactatccctggccacatgctggcatccttagctcatatgatcatgcatcgtaagtttatcgaatagacttatttttgttaaatagcttgttctgactagagactacttgacttcatttcaagaagcaatcgtgcatctaatatataatgattaactagaaaaacatactccccccatcatgtggtacaacataaaagaaacatcagtgtactatgctgtttgttattttagagataagcaaatgttgcagtgtcaatgttactgttatatgcccatgctgctgaggtagtcttttgagctgttcttttttcatatttttatcttttctttcacctctttatttatttattttaaaaacatatgagcagaataaggcgtggccatcaagtttatacacaagtgtgtgcctcttgtcactcaatgtccttgatttcataccgagatttggttggtgtggcctatacagaagaggaaacaaaagcaatggctgctgagattgaagtggttgacggtcctaatgatgaaggtgaaatgttcacacgtccaggtaagctgagcgaccgtttcccacaaccctacgcaaatgagcaagcagctcgattttcaaatggcggggcataccccccggatctcagtctaatcacaaaggtgagactcacaaattgctgtcagtcacatgtggtgcaatttctcatctctagattgtatctaactctttgttttttacatattttcaggccaggcacaatggccagaactatgtttttgctcttctcactggttatcgtgatccacctgctggtgtttcggtaaccctctctcatacatattgttttgttattttagtgttggtcgctacttgtaggtttcacatatgattctctgagtatctgatttgttagatttgtagggagtggagataatttggtgtgtgctctatggttttgtaacagtttatatcaatggatgcattgggcagaccatgccacacattttttactggactacgagtccttgacaatgcaatatgtgcattcattgcttaagctacatctctatccatcatgcactatcttttttcatggtgatgaatacggtgtttcctgttctagtttagcgttcatgtttttcaaggtttctgtcctttcttgaattaatgcaacatgttatacttttttctttgttggtgctgttgaaaattccctctaggcatagttaccggctttccagatcctttcagagctttgtttttccttttagttctttctcttttactccctctattacaaaatataaggcacaactacttttcttagatgtttcataatataaggcgtgcatgcatgcatgcaattaactagcacctcttctccactaaattattattattttaactctttaattattaaaatctctaattctattgggtgtatgcattatatttattaggatgattcaaacaatgaggtgataataattgtttcttggtctttgggttaagggtgattatgccttatattttggaatggatggagtataaggttagttggaatgacgaacaccgcatagataggcattataccagcatgtaatatacaaaataccctttcttaattggttatgtactgtgtgtgcaaaaacttgtgttcttggtttgttttttttgaacaacgttttcaccaattttgttctactccgcttgaaattttggtcagtaatacatggaatcttggagtgtattgtgccactttctggtcaggaaacctggattatttcatagaacttgaaaggatctagcagcttgcaaatagtactgttgaatattctaatactgaattaaggatttaccagcttgcaaacatttccagtgaaacacatttttcgctcttggttgagattgcctgctaaagtgcttctgttattgttactcctcctagtgcactccctaaatttgcttttgcagtgtcctaaccttctggcgttgatttgaaatttagattcgtgaaggcttgcattacaatccctacttccctggtggtgccatagccatgcccaagatgcttattgatggagcagtcgagtatgaagatggcactccagctacagaagcccaggtagctcctgtttttgagttgtctgcactctgcaccgtttagttaagctgtggtttatcactgaagtattagactattttcatatgtaaattgtagatgggaaaagatgttgtctcgttcttgtcatgggcggcggagcctgagatggaagagagaaaactggtaaccctcttggaacctccctgtagaattgtcctctatttctactgttaattgtctaatttcttcatactggaattgtgctagatgggagtgaaatggatttttctactctccctcgcacttctgcaagctgcatattaccggcgcatgaagtggtccgtctacaagtcgcgcaagctggtccttgatgtggttaattgaggactagttcttcattttcttcaaagcatcggctgataatttgaagtattggaataatgcgtacatgaatcatgatgtacattttgccgttggcatggttaacatgcacaatactcttttcctttgttacatttactcccagctgtgctgggcattattttaaaattttggcctgtcaaatgtaccagcaagcatctaacagtatagtcaaatagatctcataagcatatttatactccgaaccagtgtaatgttaattttagtcatcagtatgagatgatggagaaaaaaaatgaagtgtcactaacactactgtatttctgcctccctgctccattttgttgttatggatcatttgattggcaatttgtggatgcatgggaagaggatcctcttatttatttttctctgactttgagtcactaacatatgaattcactgggtagagggcctatatgtcagtagcccacatcgtgttagagaaaagtaagtttgatgatctcactccgtatgcatgttgcatgctgatgaaaaagaaccaaactttaatcatcttgtggtcagattaaattgcacatccaaacacaattttacttacacacatcgttcttgccaatttgccatgcatggctacaaatatcaggcatgcatgcaaatttaattctgccaacctccctgtcgattacgaagttcaggacgtgaagagctggctaccgagcgtgacaatggcggtgccgtcgcccatgacggtggtgaggctcatctccttctccagaatccggtcgagctccgccgcgatcagccgcatcttcggccgccgtctcgccgacgtgctgacgcactgcaacgtcagcccgaccagctccttcatcccctccgacgtgaagctgcctcccaaccttggatccgtcacctcgttgttcgaactgaaatgtgactccatctgacaaaatttcacaagaaaaaaatgaatctctgtttctggatgaaatttacttggaagattgtacattaattaatatttggatgaatcatactgaataaatgaattgctaaaagaaatgctgaatatatgcattacccaatgaaccagaggttctcttggttctgaagaaatcaggctcgctgcttctttgccagtgatgagctccaaaagaaaaaccccaaagctgtacacgtcgctgctttcagaaagctgcgccaaggaatgcaccctgagagaaaaaaatagcccatcaaaatataaatgatggtaagacaaaaatattggtgaattacagaaagcagtgctaacatttttacagctctgcacaatgtagttgcagctcatacttctgataatttcagaggcaaaagttcagttaaaacggcacaatgttcaggcttactctgggtcttggtagatgctgctgcaagacgacgacggatgatgcgacggcgcggcgccgtcgaatcctctgagcagcctgtcgattccggcgtcagccaccttcgcgatgaagttctcatcgaccaaaacattgctcgtcttgaagcccttgtggatcaaaggaggcacgaggctgtgcagatgattcagacctgaaaattttcatagtttcagacactgtgttgtacactttggtttgatgaggaaacactgcacatgaaaattgaaatgttttgtcacctttggccgctccaattgctattgagagcctctgcttgaactctagtcttgtcattgactctttgccggtgtttgctaaacagtgtaagatcattattgtttgaaacaaatttcaagcaaattgggcttcgaatttgacaggaatcatcaactttgttatattaccgtacagatggccacagacactgccattgggcaggtactcgaacaccagcatttgtagacctccttcttggcagtagccgatgagagtgacaacgtttctatgccagatttctgatagccgcttgacctgaaattcagagcgaattcatttttctttgtcaaaaaatgagagtgaattcactcggttacaaatttttacaattatcatacaatcagagaggctatttctaagaataataaagaaaagttacagaggcattcactggcttgtctgtgatcaacaactcaatgcaactaataaaatggaatgtgacactgacaagtgacaacaattaaggagcaattttcaggaacaagtgtactgattaccaactgaaaatgtcaatgagattatgactcatatgacgcaatgcagtgatgacgtgacgtcagcacaagtatatgatttttgatgaggcagagtttgcgtgtacctcgtcgacgaagtcctggcgcggcgaggcgacgcggcgcttgacggcgacgacggtgccgtcgagcaggaggcccttgtagaccgggccgaagctgccggcgccgacgaggttggcgtcgctgaagttcttggtggcgtgcgcgagctcctccagcgagaattgcctcgccccctggtactccggcgccgacaacgtccgcccacacctgccccactccactgcccaatcatcaccaagctaataatcagctacagatcgatcgatgctgctgcgaataattaaatttggagaccaaactcgatgtgatcaagttgtgattattgctatatatggacgtatacctagtgtaggaggggtctccgacgagccggtgtcggagttccggcggctacgacgcgccacgcgccaccaccacgccgcggccacggcggcggccaccagcagcgtggcgacggcggcggcaatgccggctaccaccgcggttggcaatgccatgatccgggcgaccggggcatcgaccaccctcgatgatacgatcaagaaccgctatagcttcggcattcatcaatgcagaagcgaactttgcttacctctgccaatgaagaagacgactgatgatgacgacgagcgccagcagcagcagcagcaatgtcgtaggattcttagctaggtagcagctagctagctgagctcgtcgtcgcgagcctgcagaattggccggcgaggctggctgtgctctttaaagaatccgtcaaccaccatgaacgagcagcagcagcagcagcagcagcgcaggtgggtgtatgaatgaatgcaaagcccccccaaccccacatggcaattgggcgccttcttgcgccatgcccccccatgtgtccatgagtctgcaaatcaccacggccacaacggtaaaatcaaatcaattggtaagtaagtttctgcatttgcctgaagatttacttaaaccaaatgcaagtgttagtgtgccagttctccaaggtagcttaggatggactgaattccatgcaaattttgcatgaaaaagttcagagcttaccgaaatgtgtcaaaatggcaggagagcatcggacaggtaggacctagtg

SEQ ID NO: 4426 - DNA, 1404 bp, Oryza sativa
gagtttactactcgggtacttttgcaattattaagagcagaaaataaattatcttatctctatgcttttgatttattccgaataatacttagcaccttgcgttactcggtccatccaacgagcccccgggtgctaggaatcggcccaaaggcaaccatccattggcaaaccaaacggaaagcataggaagatagaactccataactcgcatgcctacttgtcgactcagattatcccaagcaatcaagataaatattatgaaaaatatgatataacatctgtagcccccgactcactactcaatggaagaccaattggtatagtgaggcagaggaaaaggaaaaatatcatataaagaataaaataaatgatgacttagctttgtaatattccccttggtgatggcagaagtggccaatgtgggaacaaagtcgtccatcaataacaatgaagacaccagtcggcggcgacgaaggcggtcgacggtgaaagcgaagatgcccactaacggcggcataataggccagccgtgtaagcggaaacaccagtcggcagcggtgaaggcaagccggtcggtgaagacgtagacgcccaacaacggcggcataaaggccagccgtgcaggcggaaacaccagtcggcggcggcgaaggcaagccggtcggtgaagacgtagacgcccaacaacggcagcataataggccagccgtgcaggcggaagcaccagtcggcggcggacgaaggccagccggtcggtgaagacatggacgcccatgaacggtggtgtgaccgaccaaccgtataggcgatgacaccagtcggcggcgacggaggcaggccggcggtgaagacgtagacgcccaacagcggcggcataataggccagccgtgcaggcgtggacaccagtcggcggcgacgaaggcaagccggtcggtgaagacgtagacgcccaacaacggcggcataataggccagccgtgcaggcggaaacaccagtcggcggcgacgaaggcaagccggtcggtgaagacgtagacgcccaacagcggcggcataataggccagccgtgcaggcgtggacaccagtcggcggcgacgaaggcaagccggtcggtgaagacgtagacgcccaacaacggcggcataataggccagccgtgcaggcgaaggcaccagtcggcggcgacgaaggcgagccggtcggtgaagacgtagacgcccaacaacggcggcataataggccagccgtgcaggcgaggacaccagtcggcggcggtgaaggcgagccggtcggtgaagacgtaagcgcccaacaacggcggcataataggccaaccgtgcaggcgaggacaccagtcggcggcggccaatgcgagccggtcggtgaaaacgtaggcgcccaa

SEQ ID NO: 4427 - DNA, 6752 bp, Oryza sativa
ttaattaagattataatggtaaattcagtttcccgtcggaggacgacggcgtctcccgttggcgttggtggccctaggggctgcggtggctctcatcggcaccggcagccctagggactgcgacggaagacgatggcggtttccgtcggcgccggcggcactaggggttgcggcagcccaggacggcggtggctcccgtcggtgccggtggccctagaggctgcggcggaggacggcggcagcttccgttggcgttggtggccctaggggcggtggtggctctcgtcggcgccggcaaccctaggggctacggtggcccaggacggcggcggctctaggggttgcggtggctcaagacggtggcggtctgagcactttggatagtagatccttaggaatccggtaaagtggaagccgatcccgtcggttcgtgtctagttggctagttccgactatacgacgaatgatggtggttgagagtgggcttataagcggcgtgtgacgtcagctcacctgaaactgatgaagatgacacaaatggaggttttcatcaacggtgcactaggggcgacagcgactagtagactttcactcgtcaaatctagctgttttaggagaatatggaagcagaaaagcaggatgtgctgaagtcgtttggttttcttttctattttggttgtgttcttttccttgttgagacgtgagtctaagtactattgtatccttttggctgtgtatatccttcgtggatatagaggccagattaatgaaaatccattattaaaaaaaatggtaaattcagttattgaccactgtatgacaatgatatttccaaaagaaaattatcagggccttcttagaatgcaagatgtttttttctcgattcagaatagaattaaactgatcgatgtgaaagtaactttggcctgcattagaagagaacatttaactagtgatccaaccgagtcctgtatctaggagcccatcatgctcatctgatccccagcaaaaacctgcaagatcctactcatttctgagcccctccatcctgacttttgcatgccactctggtccctgtttcacatgtccccttccaattcaagtcccaaatcctaatcaatacccttgctagcactcatcagagttcatcaatgacagtctggtatatgaatagtttgaattgcaaattcccactccctcgcccttgaatcccagaaaaaaaaacacctcatgttagtgtactaaattagtgaaattcttggcctttcaaaaaaaaaaaacattgttagcaaggctagggagttgccgctgatctctatctctccgagcatgtgttagtggacgcttttcacggatgtgagtgtggtgttgcatgtcgtacacgtaatcggaaaaaacattttgaatacttccattatccaaaaaaaaagattttttttcttttttgcatcttccttgtttggcccttgcttctctctctctctctctcctccccaaccacttgggcatcatgatataagtagagccaccaagaaaccatttccaagggctcacagaaagtcaggggcctagccagccagccaagccagtggttataaccaacctcccagtgaaactttcagaccctcccgttttagcaagtgagagaagccctgcgactctcgctcgctcgctcgcccaagatgaagtttatgaaacttggcacccggcctgacaccttcttctccaacgaatccgtgaggtgttttgttcttgagaaatcctgatttgtggaatcaatcaatcaatcaatcttggcatggttcagactttcagttcctgggattcttgcctgtcgtctgaggtgattgaatcgtggttgcctgatttttgtgggtgtttgttgtgatgttcacaggtctgtctgcacagaggtcgccactgacctgcaaatcttggtgggtgactgcttgtatcagcttcacaaggtaatgggacatgaaagattgttgttgttttttgtttcgctgtggttctagaacggatcttttctgcaacttttgtgataattagatcgtgaattttaggggaattttggatttggttgcatgtttggattgttttgatatcgaaggatttgttgatgatgtttgtttggaatttgttttgacagtttcctctgctgtcgaaatgcctgcttctgcaagcgctgtgcgccgagtccggatgcggcggcaatggcggcgacgtgatcgagctcccggggttcccgggcggcgtcgaggcgttcgacgcgtgcgccaagttctgctacggcatcaccgtcacggtgagcgcgcggaacctcgtcccgctccgctgcgccgcggcgcacctcggcatgtcggaggccgccgaccgcggcaacctcgccgccaagctcgacgcgttcctcgcctcctgcctcctccggcgatggaaggacgcgctcgccgtgctcaactcgacgcgccactgcgcgccgctctgcgaggacatcggcctcacctcccggtgcgtggacgccgtcgcggcgctcatcgcgagccccgccgccctccccggcgcactcctcgtcggcgtcgccgtggtgggcgcacgacgtcgccgagtctcggggttgacctgttctggcgcatcatggtggtccgctcaagggccatccggcagccagtccacggagtaagtacctgtcgggcgtatcgcgcctcaaggccgctacgcgtcgcccggtggtctgctccaacgtctgccaaggcacgggcatcgctcgtacggcgtccgtaccaagcccgttcgacgggtgctcggcactggtcggcgacggctggcaatgccagcgtcaagccagatcgccacgaggcaccgcctcctcctcgagaagatcgtgagcctgatcccggcggagagggacgccgtctcctgcagcttcctcctcaagctcctcaagcggcgaacatcctcagcgcgtccgccacgtccagggaaaagctggtgcggagggtggcgtggcagctcgaggaggccaccgtcggcgatctcctgatcccgtcgctgtcgtgcgtgtccgagacgctgtacgacgtggacgccgtggcggccatcctcgacgagttcgccctgcgccacgccgccgcgccgccgccgccggtggcgctggcagtgagccccgacgacgacgacgacagcccggcgcgttccggcgggcaccggcgctcgcggtcggccgagagcgtcgggttcgacggcgccgcgcggcggtcgtcgtcggccgcgcccgtgtcgcccgacgcgctcgtcagggtgggcaggctggtcgacggcttcttgatcgaggttgccagggaccccaacatgccgctcgacaagttgctcgccatggccgaggccgtcccggacaccgcccgccccgagcacgacggcctctacaaagtcgtcgacacttacctcaaggtgagaatatatttgaataccaccaccattacaaacttctactaatatttaacttgatatcaatcttgttctggtcttcgattcgaatgtgtggttcactttcgttttcgtgtttgtttttgggtgacaggtgcactcggagatgagcaagagcgcgagagagcggctgtgcagggtgatcacctgcaggaagctgtcggacaaggcgtgcgcgcacgcggcgcagaacgagctcctcccgctgcgggtggtggtgcaggtgctcttcttcgagcacgcgcgggcggcggcgatggcgggcggcgcgcacgccgcggccgagctgccgggcagcatcagggcgctgctgcagtccaagtcgtccgggtcggatcaggaggacgacgcggcggaccgcgtggacgagcagcggctgcgcgcgctcgccgcaggcgcgtcccccggggacgactggagcgtggagggcctgcggcgcgcggcgtccaagatcgccacgctgcggatgaagctggaggaggacgacgaccacgacggcggcggcggcgacgacgaggagttcgcgcgcaggcagcaggccgggctggcgcgcagcgcatcgctgcggttcagggcgttctgcgccatcccggcggcgaggccgaagcggatgctcagcaagctgtggccgctggccagaggcgtcaccaccgagcggcattagcgtcgcaaccagtagccattactactaggttttttgtacttcttcttcttgggtgtcttgcttgcattgcttgcccaaggcctgagaatgcaggtttctttgcttgtctcttcttcttgtttctccttttcaattacagtgtcaaggccaagtgtaccttccaggcttccatgtagttgtaatcttttctctctctccgttttttttttgggtgaggcatgtagttgtaagcttaattattaaaaataaataggaactgcacagtttatatacttatgtaaggagtaaggtgaatggatggagtgcaatttacttcatgcacatttcctcaataattttgctgaacatgctgatgcagggaactcatatatcaacgataatcgacattgtattcgcttcgtatctatattcaatgatattcgtttcgtttccattattatagtctaggtttctgtatttgtttatgattccggtatatatgaaaacaaatgtggtagaccgtagaactactgttcattcatatatgagtcgttttcacccctagttagaactattggccaccccaatttcctcttttatagagtatattatttgtgcgaacaaattgttcatgaaaaattatatattaacaaacaagacttttgtgattcaaaggcaccatattttgtagtgttaataaggtaaaaaaataatactaaaaataattgtaccttatggtgtgttcttaaggaccgtaaaaccacttgacaaaatgattttgcaagtatactcgctccattctaaaatataggaatttccaagtgtttagcaaaaattaaggtatagacaaaagattatcttgtagtcactttagtggttaaattttaaactttgagttgacaatatttttctttccaagcatctcattggttgaaaatgtatatatttgtgttcactgaaatcagcatctcttatgacaatagtgcacatcatagttttcatggtacaaatagcaaaagaggccatcaccatgcactatatatatctccctttctttaatgcgcgatcgagaagcaggcctatgattgttatccacttggcttgagaaaaattgcatcctgaagagacccaagagggagagagaaagagagagagaggaacaaagaagcatggaaaatccaggagggaatcaaatgcaccgcggatattattatttcatcttctttttacctgaaagatcccctttgttaggtcttcgcgtgtgtgtaggaggggtatatatgccccggccgcggcatgatgatttggtgatgagacctcgagctcgaaatgttgttgggtcagcaaccactataaacaagaacaggtcagcatgggcagccttttctagccaccctatgatcctttaacttgttgttgctcatcactagcatgcatgggggcaggctcatccacccctggcccccaatgttgcttcaaaggatgtgtcatgtcctagaggaaaatttttcaccagaatatatatacacctcagcaaaacaatcttgtgagatcctatattgctatcatgctagtatggtttatcttttgccccttgaatggtggatgactctctctatgcactactagaaaaagtatttttcccaggcgggggaaatgggtcttcccaggcggacgctggctccgcctatacctcacaatcttcgcaggcaggccggcggtccgcctagtaagaccattatcgtaggcgaactggagctagaggtgccgcctaggaaaatagattcagtgcgccagaaaaaatgtgattgatctgcctgcgaaaataggtacaaaatttttttaaaaaaatgctacaataataatttgtgataaataattttccaaataattaattaattgatgcataaaaaatattagtaactaaaaaacatttgatattaacaaatatacatatattgcataagtgaaaagtgtcgtcaaaatgttacaatatttataacattgtcacttcgaataccctatctaattatattatggcaccgcgttgttccactcccaagattcttgtattcttatcttgtagccaggatgctctctgggtcgaagaactatcctttgatatgacagcactcacggtggatgaagtgacagagatcgcgctgcacatttgtaatgcatgtatcgtcaaagcttgtttgatattctattctaggcagctgcatgcatgaaagaaccaccatatatatattagtaggttctaaatgtgcatttttccaatgcacttatacgttgagtcgagagatttacatcctctgcgttaaccctttatttcccattaaccctgaggaattcgcatgcgtaatacctgcagaggaccgtgcctctagattgcttgtgacacttaatgacatatcatagaaggaaaaagttaaattttgtaattagtaaaacaattggagtacatttactgtgtggactattatatatatatatatataatatatatatatatatatgtattagcagcttctctcttgtttgaatctgctctccacccttcttcttgtagtagttgttcgaactgtatgaattttttaccgtttcgtattaaggaggagat

SEQ ID NO: 4428 - DNA, 1629 bp, Oryza sativa
  unsure (1)..(1629): unsure at all n locations
cacctattaggtgcatctagtcggtgcacctgactttattttccagccctccacagtcttctgacttggaaaaagtactcgggagatcatggcgaagatgattgaagcactcggctttggagtaatctagttcgagagaagattatctttccgactgtgaaggtctcaggggctactgtggagattatgggtaccccatacccacacggcatggttatccgactagttataggggataacttatatatatgaaatatgtaacagatcatgacttgggtattacgtttccctgtatattatggaacggcctaaagtcctggtttgataagattgtaaagtagatttaggaaaccgataccgtattggttatggtttctatcttgtaaccctgccccccaacctatataaggagggcagggagcccctctaggggcatgagacaacctgatcgtcagatcaatacacactcggcggattcaaatccccaaacaggagtagggtattacctctcattgagagggcctgaacctgtctaaatcctttgtctctgcatccatccactttaggtctcgtacgctacccccttttattattgccgaattcatgtttcgacagttggcgcgccaggtaggggttgcgtcgagtttcctatcaacgagcgcgatggaatcaatttcatgagtcgccgacttcgttttcgctttgggagttttcacttcctttccgtcgaccacttcttcaagctcctcttctctgacttgatccaaatcagtcagggggaaactcaatctgatttttatcattatttatcatattgatttttaatctcagattaatctcttgctattttttgttgttgttcgcatataattacgcggcactattgaggcgattgatgctggtcatggactcgaggcgtctcagctttccggtcgatcggccgcgagtccactctgccggcttgtcttcgccaccaccactgctgataacaacaacgacttcaccgccggcctgcctccgtcgccgccgactggtgtctccgcctatatggttggttggtcacaccaccgttgttgggcgtctacgtcttcaccaccggcctgcctccgtcgccgccgactggtgcctccgcctacacggctggcctattatgccgctgctgttgggcgtctacgacttcaccgccggcctgcctccgtcgccgccgagtggtgcctccgcctacacggctggcctattatgccgctgctgttgggcgtctacgtcttcaccgccggcctgcctccgtcgccgccgattggtgcctccgtctacacggctggcctattatgccgccgctgttgggcgtctacgatttcaccgccggcttgcctccgtcgccgccgagtggtgcctccgcctacacggctggcctattatgccgccgctgttgggcgtctacgacttcaccgccggcctgcctccgtcgccgccgagtggatcctccgcctacacggctggcctattatgccgccgctgttgggcgtctacgacttcaccgccggcctgccttcgtcgccgncgagtggtgccttccgctacacggctggcctattatgccgccgctgttgggcgtctacgacttcaccg

SEQ ID NO: 4429 - DNA, 1250 bp, Oryza sativa
tgatgggcgtctaggactccaccaccgggcctgcctccatcgccgccgattggtgtttccgcttgcacgttggcctattatgccaccgttgatgggcgtctacgtcttcaccgaccggcttgccttcgccgccgccgactggtgtcttcgcctgcacggctggcctattatgccgccgttgttgggcgcctacgtcttcaccgaccggctcgccttcgccgccgccgactggtgtcctcgcctgcacggctggcctattatgccgccgttgttgggcgcctacgtcttcaccgaccggctcgccttcgccgccgccgactggtgtcctcgcctgcacggctggcctattatgccgccgttgttgggcgcctacgtcttcaccgaccggctcgccttcgccgccgccgactggtgtcctcgcctgcacggctggcctattatgccgccgttgttgggcgcctacgtcttcaccgaccggctcgccttcgccgccgccgactggtgtcctcgcctgcacggctggcctattatgccgccgttgttgggcgcctacgtcttcaccgaccggctcgccttcgccgccgccgactggtgtcctcgcctgcacggctggcctattatgccgccgttgttgggcgcctacgtcttcaccgaccggctcgccttcgccgccgccgactggtgtcttcgcctgcacggctggcctattatgccgacgttgttgggcgcctacgtcttcaccgaccggctcgccttcgccgccgccgactggtgccctcgcctgcacggctggcctattatgcccgcgttgttgggcgcctacgtcttaccgaccggcctgccttatttgacagcgactggggcctccgcctacacagttggcctatgatgccaacgatgttgggcgtccacgacattaccgccgggccgcgtccgtcgccctcgactggagtcctagcctatacgggcggttggtcacaccatagttgatgggcatagtcatatacaccgccggactgcctccggcgcacgagactagtgtcatcgtctatacggctggtcgggcaaaccactgaccatgggcgtgcatgtattaaccgaccggatggacattttgccgcctccgactggtgcttccggctgcacggctggactattatgactgccgtgttgggcgtctacttcttgaccgaccggtttgcctacgccaacggcgactggtgtatccgcctgcacggttggcctttatg

SEQ ID NO: 4430 - DNA, 912 bp, Oryza sativa
gtcatcgcctatacggttggtcggtcacaccaccgttcatgggcgtccatgtcttcaccgaccggctggccttcgtccgccgccgactggtgcttccgcctgcacggctggcctattatgctgccgttgttgggcgtctacgtcttcaccgaccggcttgccttcgccgccgccgactggtgtttccgcctgcacggctggcctttatgccgccgttgttgggcgtctacgtcttcaccgaccggcttgccttcaccgctgccgactggtgtttccgcctgcacggctggcctattatgctgccgttgttgggcgtctacgtcttcaccgaccggcttgccttcgccgccgccgactggtgtccacacctgcacggctggcctattatgccgccgctgttgggcgcctacgtctacaccgccggcctgcctccgtcgccgccgactggtgtcatcgcctatacggttggtcggtcacaccaccgttcatgggcgtccatgtcttcaccgaccggctggccttcgtccgccgccgactggtgcttccgcctgcacggctggcctattatgctgccgttgttgggcgtctacgtcttcaccgaccggcttgccttcgccgccgccgactggtgtttccgcctgcacggctggcctttatgccgccgttgttgggcgtctacgtcttcaccgaccggcttgccttcaccgctgccgactggtgtttccgcttacacggctggcctattatgccgccgttagtgggcatcttcgctttcaccgtcgaccgccttcgtcgccgccgactggtgtcttcattgttattgatggacgactttgttcccacattggccacttctgccatcaccaaggggaatattacaaagctaagtcatcatttattttattctttata

SEQ ID NO: 4431 - DNA, 2235 bp, Oryza sativa
caattggtcttccattgagtagtgagtcgggggctacagatgttatatcatatttttcataatatttatcttgattgcttgcgacataatctgagtacaaaagtacctatcgagttatggagttctatcttcctatgctttccgtttggtttgccaatggatggttgcctttgggccgattcctagcacccgggggctcgttggatggaccgagtaacgcaaggtgctaagtattattcggaataaatcaaaagcatagagataagataatttattttctgctcttaataattgcaaaagtacccgagtagtaaactccgatccgtgaaactttgttccattaatgacgaactcatgtcactcatatgcatgtttgggaagtgcttaggccgactcccagtgcttggtggctatgactagtcgggcagagtgtttaaacgtaatgagtcatctgctcggggaaatcaaaattaacaagagaagaaatacgtatttataaactgcctgaatttttctcgagtattatatttacatcagatactactcatcctatatgtttgttctgcaggatccaaatccagatatgcataaaagggattcatggctttaagcttatctcttacgctccaggaatggatcagtcagaacatcaccaccggctcgccgtcgtcgccgccgactggtgtcttcgcctatacggttggttggtcacaacaccgttgtcaggcgtctacattttcaccgaccggccgccacgtccgccaccgactggtgtttccgcctgcacgctggcctattatgccaccggtgttgggcgtctacgactccaccaccggcctgcctccatcgccgccgactggtgtttccgcctgcacgctggcctattatgccaccgttgatgggcgtctacgactccaccaccggcctgcctccatcgccgccgactggtgtttccgcctgcacgctggcctattatgccaccgttgatgggcgtctacgtcttcaccgaccggcttgccttcgccgccgccgactggtgtcttcgcctgcacggctggcctattatgccgccgctgttgggcgcctacgtcttcaccgaccggctcgccttcgccgccgccgactggtgtcctcgcctgcacggctggcctattatgccgccgttgttgggcgcctacgtcttcaccgaccggctcgccttcgccgccgccgactggtgtcctcgcctgcacggctggcctattatgccgccgttgttgggcgcctacgtcttcaccgaccggctcgccttcgccgccgccgactggtgtcctcgcctgcacggctggcctattatgctgccgttgttgggcgtctacgtcttcaccgaccggccgccgcatccgccgctgactggtgtcaccgcctgaacggctggcctgttataacgccaactgatgctaccttcttcacggctggctacatcgctgtcactactaataggcatcagtatcgtcaacacaagctgcctacgtttgccatggctgccgactggtttcttcacttccatggctgcatgattctgccagtgttgattggccttatcttcttcaccgacggtcgtctcgtctgctgctgactagtgccctcacctctacgtctggtttatacagctaccactactgatggacatcatcgtcttccgttgccgactggttatgccgacgccgactagtgcttttatcttcacaactgcgcgtcttcgctaccagtttgcttctgttgccgccgactcgtgttcacttcatcacggcgaatgcaactttgtcataatggtggagcgacttcatctttattatcttcggcactggcaaactctattgctgctacttcgcaagttttactacttcaccaaccacgacgtctttgtgaacctcgacatctcggcatgcaatgccatgatattttactacaaccagtgactcttcaatattcaggatttctacttggacaccttcagcacatatcttcaatcaagcaatgactactcgacgacaagaagctataattctggactatatgttcagttgtttcccaactaaccaaagagtcgggggttacacaaatataaggctcaaaatttgacaattttagtgtcaagctgaagagatcaattaatcagccaatgagtcaactccaggagtcattatcttcatctttgctaagaaacagaaaaaatacttccacaacttcaaa

SEQ ID NO: 4432 - DNA, 14215 bp, Oryza sativa
taaatccgtatgtaaaattttcgaagggaatatagatactgtttacacatttggccggcctttgcatggcgcacagttgaagaatgacaagagaaaataagatgaagagagagatcaacgggactacatatcccaccgtctacaataataatatcttaatttgaataggaatttttttcacctgagcttatttatctatacacaaatggaggggagctgccatatctaaagtagtgaaaaaactaattttccttaaataaaataataaggcacgtcatctactaaacatggactgtccaatttctattccgaaaactttaggccgtcagatattgtgattggcgaaatatttttttattctttctctagaaatttctttgacaataatgtctttctacgttcatgaggtaaaaaaaagagcgggactcttctcgttaactagataaattaattgaccatagattatatcgacctccatattaaatcaatcgcacaattgaaaatagcattgcgtttcatctgttttatgttcaacagatggtactcataaattcacatggtacacacgtaacagtgacatatatatgggcgtacttatattatatccatgtggctgctgagatttctcgctttaccccgacctggtgacgtgctgatgatggcattaatcagcggccaggccgacaaataacgtggatgtcgatgtacaaattaatcactccacatcatcgccacatcaactgggaagttaatcaaatgacctcataatttgtcttgccttgctgcacaggggacacgctgcgagcaacgccacaatctcacacaaggcaaagggagacgcagatcgacaacctgattaaccctgatgcacaagtgtgcacaggcaacatggcacatttgcaaccaaccaaaaaaaagtcatcatcgcatcgactagaagcatcaatgctactactacatgcttagactaggtacaatagcgctataaatatattttaaagagataaaagaaaagagagaagagtagcacgctataaatctgtagctagctgcagcatggactccaacatgtaatgtgtgtatgatagatgggactaggtattacacagtatagtaaacaactattatatgaattggctattacattagtatagttatagatgatttggagttagtagttggctatactattaaacttgctgagtaggtaattaatcaatcaatctctctcacacacactctctctctctctccatgtactacatgatgcagagacagcatagctgcaaaggcataaatctccagaattgggttcaggaccacacatgcatgattaagcggcatcattgagggcctctggcgatttgtttatggatcttttttgtggttaattattctggagatgttagcaagatcctaggcaataacccaacacaaagccctcgtcacaggttgttttccaggctcgtttgtacttgtatctgtttgcttcttcagttagttatagtttaattatccgtgaaagcgcaaaagtacagtcctagtgcatgtgcacaagaaagaaaaattgtgtactagtgtacgtacgtgcaactagatacgaccagataaattaattttgcaaaattaaaaaaaacaaagagaaataaatcggcaatagatataaaacggtggtcacaagcattgaagtgaggccaacctgcattgcgctagtacaaattcaagggctaagctagctagatatcccaagcttccagcatggcaagtcaaaaaaaatgccaaaaaattgtcggagcttaagtttaatccaagcttttaagaagggacgaaacataattaggtggcataattgcattttgtatcaccctaacttaattcccctgaggttaactattgtggggttgcaaggaagatgcctggcaaaattaaaccttgacaggttgttttcctggaccatagctgttatctgtgaaaagcacaaaggacaagagtgtgcatgtgcacatacatatctggtgtacgtgcgagactaggcatgaccacaccaacatttatgtcacttttaagaatatatctataattatctatatgtgctttacatggttttatacaatgatacttaaaccaagtactcatctgatgtggaacgacaaagggtgccagcatgcgtgtctttaacaagttcatgcacacaaaaaaaaaaaaagtcttagccacccccctcacagtaagatgcgtttggtttcctacaaagggtcaagtcaagtctggcttgtatcattcgacctggtttagatgagtctctttgagatgtgtaaggacgtattcaatctgctactaagggtgtgttgagaatcccctttcccaactcacacctctctttttccacgcgcactcttttcaaactactaaacggtgtgttttttacaaaaagtttctatgtgaaagttgcttacaaaaatcatattgatccatttttttaaaaaaaataactaatacttaattaatcacgtactaatgaattactctgtttttcgtgcggagagtttagttccaaactccccccagcagcgaacaacacagacgctaggagaagaaaacctttatttttctccaagccggctcttcgcttggtggcacactacacccaccaccacttaggcaagtcaaggcatagttaggggtgaagacatgcataaaacagctaaggcattaattaaaataaaaatactatttaattttaaaaatattcactcttctatttattagctcatccctacacacgagaatttcttggctcttcccttggttttttagggtaccaaacatacaggggcgaagctagcatcaaaataagagggtgcgctaccattgagaatctagaaattttcagtgcaacactgtatattttagtctttttaagtgagaaattaggaatttgggggttcatgtgtaccctcaaacactataaaacttcgtcactgtaaacatgggctttcttactaaaagactctattacctgtacagttaaaatgcccccactaacattattacacagagtctcatttcctgcgcaaaatcgcaaaggaaaaggaaaaggaaaaggaaaaaccaaaattggaccttgggtccgatcggtagacgctggtgaggtggagccatctgggtcatgatatatacgtctgcacgcacgtacgcttagctccaccatcctccatccaagctggttgccctgtccctgtttgggctccctagctccacgagatattgtagagagtacatggatccaaagctatctcctgcacttatggtagaacacatgccactttggctcgttggctgcatcatggcacagggccttgcgatcgcagccatgagccatcgattagggtatatcttctctgttaatttgccccttgctagaatcgatcaaatcgatactattcgtcgaccggagaggcggcgacacgatcgaattgtccctctcctcgtcttatcctggatgagcaccggcctcgatcaactataattttgtggagccactcatagtttgttttggtgacagtagcgatgattatttgtggagacactcattgtttgttttggtggtagtggcgatgattatcttttttcttattttttttggtgaagggtatttttactcggactttacatctaacaggatatatgccatcaaactgtatgatcgaatagaaatagctaagccaaccagagggaggtgaatggttggtatacccaaaaaccaaaacttttagcggaattaaaagttaccctaaatttcgacgaaacacagtccgaccgaagtagacgcgctggtctgaccgcctggaagccgtcggtctgaccgggcttgatcctccggtcaaactgccgagatcaactgccgtcgcctgaaaccgccgccggtctgaccacccgtgatccaccggtctgaccgctggtgtctcgccggttagactgccgaacccgagcaaacacaaatcgaagaactcttgatgtagatgacaactttattacttctctctgtgtttacaaagtgcaacaacagcactcctcacgaaaatctcgactaaactcgaaaccctaactcaactatcaactcaatgctctcaaaagcgatatggggatgcctcacgctccctctctatttatacatgaggtagatagtctaaagccatgaaccaaactcatacaggaagtcctaatctacctaggaaatcttcccgtacaagaaacaaattttacaaactccaaacataccaaatttggactccttccaaattcgactccgcatctcgtacgcacacaatatctccatcatatggcatggaatcttcaccaaccacgtgcattgaactctagcctaagtatcccgcatgatatctgtccgtccggacattgccttatctccaagtcgactcccgatccattaccggcactactctcccgaggcatcaagtcacctacacatgaatcaaacaaagaaaccatattccgagaccaagctatctccaacttagctcattgtcagcaaacaatagtattacatacgtatagtatccatctagaagccataaacatgaaacatccacggatatccaaacaaaaaacccgaaaccgaaaccgacacagagtcggccggtctaaccgctcgatacacatcggtctgaccaacaacccatgtccggtctgaccggacccaaatctctagcagcacctatttaacacctgcaaatccaatcatctccaaaaccacttcgccaataatctccaaatatcaaaaccaataattacagatgccaattgttcatcacagaataagaatcataaacactttgattttacacaaacaacttgatatgaaattcgttcctataaagatttaaacttaaaatcttggagcgctactcatgtcactgtaaccactgggctacatgccttttgcgatgattatctatctgatctgattggatgatgtagaactggagattacgtgtcgtgtgataacgctgcattatatgtatcatttcgtgccagttgcgaaacagtgatgctgagaccgatatggcagcaagagtagcagatgccggcgtgatgcaatggaagcaagcaatatatcattatctcaacaacagcaacaaaagaacagaaagaaagtagacaatagaaatatatcttttagataatgaggtagacaacacatacgctactgtttagttggaaactgatttcttggttagttaatttgtgatttgctgattacagagacgttgtaaaagcagatcgaaatgacgggagcaccggagcaaagagcaggcattcaccggtttttcttacatcagtctccaataatgatagtttttgcagactcactctcttttctccttgctaaaacctaaaagctttgaactttagaaaaggaccagacaaacccaagtacgaataacattttcctgaaagcactaaagcactcccactaatatgattatctgaatcggatttaagataacttaataaaattagtagtactatcacattaattttaaggtttggaggttgcttcagggtgagatcaaccgcatttctaacttgtaacatgacgagctacgtaatggaagtggttgtgtgatcgactaacgacagaggccaaactaaggcacataattttataattatctagaaaacctacaggatgatattagaggtttcttcctagcacgacttcttgtagctagaacttagggtaattttctcattcttaaaaaggtatcaggaggtgtcatattttctatgataaaatttggtacctttagatactacatcctccgtttcaggttataaaactttttagcattgcccatattcatatagatgttaataagtctaggcaacatctatatgaatgtggacaatactaaaaggtcttataacctgaaacggaggtagtaagtatcttaaggtatcaaaaattttttagtgtaaaatttagataactcaaaatgctttgtcaaaaaccataaaatttctctagtatgaatatgaacctactgtcaccttaaaaagagccactttgctctcatgtggaattacatgcaagttgttccttcttctgatatggttgcaaacccgcaactcagcttaacctcagcaacaaacacatgatcaagacttcagagcagagagctagtattagtacagatcagtgatcagtgttgataaaaaccaaccaccacatgagcaaaccatggtggcaccccaatcaagcagtactggcagagcccctaatgctgaccctgtgtgcatgcaacttgagagtgtactgttaggttcagagaagacctaaaaaaatgtggttggagcacggcaattgggcaagcaaaaaaggagattaagacactgacagttaggggaaaatggctgcattaaccctgagatggtgtgggccatgccctgccgggtggcctcccctgtggccagcatggacagctacccccaaactactagtgctcagtggcgacatgcctttttgcagcatcaaggccccagctagccgtccctttgacatcggacggccgaaaaatattttggtgacaacttgtgtgcatcagcaaagctttgggttgagaaaaaaaaaggaaaaagaaaaagaaaaagaaagttatgacttagtatgagactcatggcaatagcttatgttaatgacattattaaacagcaattagcctggtgatgactgcaagattccttttccatgctcctgtggtgacactggtgattccttttctatatgttttaattgtgtgtggtcacccctggctgatggattaaaagtacaaaagttactccattaacagctcactttggctagattagcagggggggtttagtgtaatgtaatctgggccgtatcaactttggtgaacacatacctcacacaatcccttagtttattagccataaactggcgcaatgatctccttgctgagaaaagtttgggcaaggcctcagggattaaagctgtaacgcgtaagtgcttatgcaatgttgacaaaatttgtatcccaagcaatcttgttctgctcagctcttggagttgtataatccgacaccgtttgacaatacacgtaggcatggagatcaatcagggcatctgaaaatctgatctgatcgttcccttgagatagagagagacggtatagagtgcggcaagttgcaatttttatccaaaatcaaggcagaacccatttggatttgatgatggttgtttagtgccaaatcattcgaggttagacagattcggatcgtttaggatccctcctagttgcagtctcttgcctttttgcccaacttccattgtctccagagcaggtgtctcttgcacatgctgttccctcttaaggacaaacggttttgcaagttcccaatattaattcaggcatctggattttgtggtaataataagggcctcaattaatcatgcagttacacgctatctatatgcaagtcctcttgtgtcgacgccttagcttatgcaagttggtcacatcgaaggatttagtggggagaacggttacattcttctctttcaccctctctccccgaatcccaaataggtggctagagtgggggtttggtgtcggttgttagggttaggttttgagtgaccttaattgtatttccttcgttggcctagcagcgaccggtcacgcttaacgatggtcggttcaatgctagtcttctccggaatatgtgtattggtgctgtcggtgcgtggggttgttctttttttcttcgttttcctgtttacgacctcctattggttgtaattttgtaattttttctgttttatcaatatgaactttacactatctagtgcgagtcgttaaaaaaaatacacgtgctttgccatgcataaaattgaatatacatgtgtcagtattgtttgaaataatttcgttccagtagatgactttgcatgattttatatttcaaagatgaaataaataattccgtttccgactacttctaattctgggaaatctcacataacccaagaagataaggcatattagattgttattctcatttagtacattccatcagttctctaaaatcagatgagctaataatgaagcgggaaaatcacctcaaatgtattagttagaatgtgagaacgacaagtattttgatacgagcaaaagatttaaatgctgtaacggcaagtaatacgaagatggaataaatttctggtgcggtttcttcgggaaggaaggaggaactgttcattatcttatcagctacagaaattaatttaaggtcgaaaggctcaactgaaccagaatatgttggggtgtctcctgtgccaatttgctctgttcttgtctgtacgtgcagcgtacgagtacatcagtacatgttcaagataggtaccccgaagagaccatggggaacaaatacataactctgatggcgtcgtcacagaaagaaaaaaaaaacaatccaacatggtcgcattctcccaggtggtccaaacccaactccaaacgcccaagtagagtccaacaaccacactggcgtagacgaagagaagctcggcccggtgggcttcgaggtccctgttacgcgatgccgcaacgcgtacgtgtttgtacgcgcgcgcgaagacacacgggaaagccaatgctgatcgacacgggtgactgacgcggtcgctacttgctaggcgaggcttgatgaggcgcgcgccgcgcccgcgtgcgtgacggacggtgaattgcacggtggaaaccgcgtgtgatgggcctgtgctgctggctgcgccttgcgcgcgcgtcggcccaaaattagggtatgttagttcgcgaaaaaaaaatatatgttacatcggatgtttgatcagaagacgcaaggggtttttagatatgaatgaaaaaactaatttcataactcgtctagaaaccgtaagacgaatcttctgagcctaattaatccatcgttagcacatatggattactgtagcacttatggataatcatggactaattatgctcaaaagatttgtcccgcgatttctctcctaactaggtaattattttttaatctatatttaacgctccaatacatatatctaaagatttgatgtgatgtttttgagaaagaaattaaggagctaaacgaggccttagctgggttagctggggcatggcgcacgggtgggggatcacgtactacgatggataagagacaggtctgtgacagagttattagtagccgtgcaatcaggtagatctctctcccggccagaacccaacacggttctatgggcagcggccgggcagccatgcagctctgccctgtacgttaagccactgttccgatcgagggagcgaactttcgtggaaaaagacgggtgcaggaccggccagccatgcatgcatgcaactatgcaagcaactcgtgcacgctgaaaacgtcttgatcgatccatcgatcgacctgcaaattaagtttctgcaaacgggtcctacttacatggctgaaaccaaaaccgctgtgtgtactagcaaagctagctgtgaagcaacgatgcacaggagctcccaatcatggcagcagcgccttcctcgacggaccgtacatattttttttatttttttagagaagttattttttaccaaacctatatatccaatcggatatatacaacatttttaaattagaaacttatcctataaaacatagaacttagccatcaaataatccactctgaatttcgctcctatgaagatttgaactcaggacctcatgtcgctgcaaccactaaattatatgcccattcacgcggccgtacatgtgccggactgttcggccgcatgtacgtacgcctcgcgtgtatagcatagcacattaccaatatactactacgtacgttcagggtacagtgtccgcggcctgcgcgccatctctcgatcggtgtcccggagcagtcgccgtcttgccggccggccggctggccgaccagcgatatgccgatctcgattcttcccggcctgccggtgtccgtacaccaatcgagctccctcctccgctacgcgcgtggccaagcaaccaccgtccgccgcgcgcggcccacgcgccctggtgggcgccggtgacggtgaatgcgtgtacgtgccgaaacttcgaagttagctcgatcgccggctgggcagccatggtctcaccaaccatggaccgaatcgcctacacaatatatgtgccgctcacacagtttcatttcctgcacgagtgtcaaagaagtacggcgatcgagcgctgccaaaaataatgccacagtttcatttagctggaaagaggggcatgcatgcttgcaggcaggaggagcaggctctggccggcggccgcgcaatcatggagctagccgaaccatctattgttgagttgtgctccaaatttatttatacataataaaggtcagcttctgtgggagcgaagcggaggcccatcaccggaggcttgggccggagcgaaacataggctgaagtggaacccccgcggtatggatcgttatccttttaaggtttcaccttcatatatacttctggtaagccgccgttcggcgttataacctcacctcgatatagtgaagatatttttttgttggtgtccgtggttttttctctcttattttgaaagggctttccacgttaaatctcgtatcttttgtgattgaattatttttttatcgtttatttgcttatcgttttctaacacccatgcacaatccaagtccacgcatcacacatgcgcgccatgccgccatgttttggacgagctagcccagccgagccgcgccgtgcaagcgccaggcgccacctgcatgcaagagtagtatgcagggtagctgatcgactagctgcagcctcgatcggctgcgttgatgcgcggcgcccgccgggaggcaggcggcgtgggcgagcccgggctaccagcgaggagtgccggcgccggcgggcgcagcgtctgacgcgcgttatggttcggatactgtgattcttggatagatttctttccagcttgattggcccagtgtccattcatgaattgtcctgctgcgtttctgaattatggatatatgattgctcctggctcgatcggaggccaaacaatagagagataaagttccattaggattggacttttatgcacgaaaagttcctaccctggggccagggaaaatgaatgaaagccgctactactatttctgctgaatcgctgaatggatcagtaattcattttttctagttattttcgacctttggaggtgcaaaatccaaaagatgccgaaccagatcctgggccagtgggcatttggtacggatttgtggcactgcattttgccaggccggcccatcaaaataacaaggaggcattctcatttctttatagggaaaacagagcggctcctcatcaccatgaacctgggaattatagactcacgaatggctcaaccatgggcaatagaaatgcatgggttctcatgatcatcttttaggaggaaccacgaaatatgcaagtttgtgacaaagagagtcgaactaagacatacctacacacctacatgctctcccatagagttaaatagctggaggtttccaccattacatggccccgaacaagccatcacataacatttcctttccagttttgaggcaaaatatgaggttcagatgaccctatctgagacggtttgatggttcagcacgacttcagctatgcagtttgatcccacaaaaagttcctgcagttcttcgccttacttcgaattctctatcgacctagatgctatccagccagttgccaatgctctcctgtgatccaaactgcaaatcctgtcacaacacagaaaaaacgaggcaggatcagaattggcagacatatgggcaccaagagagagccacgggataaacttacagcaagctgaaaatctggaggtgttccaaggtctacattgtagagatcaggtagtccatacaccgcattcaggttcctgtcaagaatctcattcccgccttgggacagaattgggcggtcagaaggaagcaacgtttcatgatagaaggaatccagaacttcatgacagcgcagggattcatccaagttaggacaggcctgaactgcttccctcgcggcctgggtttctccagcgcaccacgcaggattcccagcatcatccttcaggctaacaataggtatgttagactcctcttcgtcctataataattcgcaaatcaaagaacaaaattaatattttcaaatgatgaacaaatacagcaaaccaaaatatcatcgatgcttagatatgtcatttttcatcatctctcaaaagggaagcatacaactttccagaatgttgaaagtagtggtttgatactccattgaaaacaataatatacaaaactaaaataacctaaggattacagttatagttcgagttatttttagtgatccgttgagtgcagatctgaaaccagattatgaaatgtttcctgcttcagtggttacccaaattctgaccaaattggctttcaattcttcatttgcatcaatgataacagaagtaatgtacattacctggtcctccaagatgggatcgtaattttctgtttcacatggactgttttttaagcgacatggctgtggggtgtttgactttggagtttttggaccaacccttgcagcaaatgcatcagattcttcatcagcatttcctgtttcagacttgtctatctgttttccatgcaactggtaggagattttggagacaacaagctccccatccttttcatcttcttctgccccaagatggtactgatgcatcacccagttagccttatcaggtttggcaccgatgtgtgaactcttgtacagaaccattattttcttccaaccttttgtaacccccttttcaactatggctttggatttccctgtctgtgccatctcacatgttcaacagaaacaacatgatcacagttactgatctttcgacgcttgcgctgaccacaaccatatgcatttgaaactctatggaagaaatgaccactggttccatctttcttcatacctgttggccaaaaataagattttggtaaataacatggataaaccaataacttcgaaaacagccatatgccatcacaagacattaagtccataccaggaagattttccggatgtgaatagcatatcccttcatcattatctatagtcggaataaattcatcaatgaatgtatgtggctttgaaccccccaggccaatcttttgttccaaatgttcaagcaattccaaatcagatggatcaaacttgacaccagcaggcagcccaggccactgtatagcaacctgcatagaatgaaattcagcaaaatattgattagaacacataacttctattcaatgtgagctgaaagctaaagttacacttcaactgcttttacacatgcagagattctgtgattaaattctgggatgcattatattccaaagcccaatgtcaataggctctgaaactgagcaaatgatgcctatttctgccattaagataacccagtcagctcatacctcctttctcatcagcaataacctacctttttgcaactattggtaacaaataacaatcaacagattaatcatgtaccagaagaaggtttcagaaaatgggataccccaaaatttagaggaatatcgattttccaaagtatgaacttacaaaagtgtatagttgacaacaaatattgtagactaatacttacatcactgttatcaataacatgtttgcagtttggacattccatctgtgcttctgcacccaattcacttattgggcgactagagcaatgaggtgcatttcttattttcttagcaactcccctaccagttataagccaagacctgcagcaaaacaagcatgttggcatttgttactaaagtaacttgcaacgttagaataaaacgatgtatatgcgcatgacttaggggagttatacttgtgcataatcgattgaccgttccagcattgcttgttagtgaactatgtatagcaagatgagtactatatcattttgatgcccttttctaaatgaaaaccttgattgaaaagtttttttttttggtgtgtgtgtgtggggggg

SEQ ID NO: 4433 - DNA, 7190 bp, Oryza sativa
tatatatatatatatatatatatatatatatatatatatatatatatatatatatatatatatatatatatatatatatatatatgtattagcagcttctctcttgtttgaatctgctctccacccttcttcttgtagtagttgttcgaactgtatgaattttttaccgtttcgtattaaggaggagatttaattgtaaaacattaataatagaaatgcaagagtatcagaatcacttataatgtgattctgatactcttgcatttcgtgcgaaactttctatatgaaagttgctctaaaatatcatattaatctattttttaagtttgtaataattaaaagagtaaattgtattggtggtacacaaacttattaagtgggtgcaatttagtatatgaacttgtaaaatgctcgttttggtacacaaacttatctaatccgtgtgaactaggttcaacatggcttgccaaggttaattccacctaggtgatgttaattaggatatggcgtgcatacgtatagtgagtatgcataaaacatgctatatttataaatttgttctctactttattttgaatttcgtatgtttctaacccttgtatcattgttcggtttttaatatctttctctgcaatcactatatatatatgtgtgtgtgtgtgtgtttacgtagcatcctaatcagcacataaatcaacaaaattagtcatgtaatgtccttttgaccttatttcgcacgcacaagataaattcatgtaccaaaacgagcattttacaagttcatacactagattgcacccacctgacaagttattgtattgccgatgcaatttactctaattaaaactcaatcaatcatacgttaataacatctcgttttttataaaaaacttaatcttcatgttaaaagagaaaagaacaccaccggtgttaacttactaggatcatttggatgatctatcgacagccggcggacagggcatgcggccaacaaatgcgcacgcacgctccgtccgctataggacgcccagatcgatcgacagtcgacagggaggacaggcagcaactagcagctgcaacctatccctccggttacgacgagctgagaaagccagccaaccacagccagccacacacatgctgacatgcatgcgccatcaccacacgctaataatcaaccaatcgatcgatcgatcgattcggccgtttcccttgttgcgacgctcgatcgcactcaccttccagctcccggtgaaacgtgcgatcgagagggatagtatagtagttgttgcagtacgcggctgggctggctgttgctcatcagctcgatcgatcgtgcagatcaggagaagtacgtacgcgtcgcgcgctgtggatggatggatcgatcggaatcattgtgcgtgcgggttggcatatggcatgggatgcagggcagcagggttgggatttttaggaccaccggcaatgcagcgatcgatcgacacatcgtcggcgttttgcggaaatgcagacgagccgtacgtaacgtggtggctggctgcctggctctctggcccctggccctgccctagccgtgggggtgatgttcagcgttgcactttttcaacttctactttcacgtctcttacgtacgtgtatgtttctaaattactaaacaatgagtaattttttttaaaaaaaattgtttttataatcaagttgtttaatttataaaattgtattatctttttaaagtttttttaagttaatacttaactaatcaatacgcttaaatccgtatgtaaaattttcgaagggaatatagatactgtttacacatttggccggcctttgcatggcgcacagttgaagaatgacaagagaaaataagatgaagagagagatcaacgggactacatatcccaccgtctacaataataatatcttaatttgaataggaatttttttcacctgagcttatttatctatacacaaatggaggggagctgccatatctaaagtagtgaaaaaactaattttccttaaataaaataataaggcacgtcatctactaaacatggactgtccaatttctattccgaaaactttaggccgtcagatattgtgattggcgaaatatttttttattctttctctagaaatttctttgacaataatgtctttctacgttcatgaggtaaaaaaaagagcgggactcttctcgttaactagataaattaattgaccatagattatatcgacctccatattaaatcaatcgcacaattgaaaatagcattgcgtttcatctgttttatgttcaacagatggtactcataaattcacatggtacacacgtaacagtgacatatatatgggcgtacttatattatatccatgtggctgctgagatttctcgctttaccccgacctggtgacgtgctgatgatggcattaatcagcggccaggccgacaaataacgtggatgtcgatgtacaaattaatcactccacatcatcgccacatcaactgggaagttaatcaaatgacctcataatttgtcttgccttgctgcacaggggacacgctgcgagcaacgccacaatctcacacaaggcaaagggagacgcagatcgacaacctgattaaccctgatgcacaagtgtgcacaggcaacatggcacatttgcaaccaaccaaaaaaaagtcatcatcgcatcgactagaagcatcaatgctactactacatgcttagactaggtacaatagcgctataaatatattttaaagagataaaagaaaagagagaagagtagcacgctataaatctgtagctagctgcagcatggactccaacatgtaatgtgtgtatgatagatgggactaggtattacacagtatagtaaacaactattatatgaattggctattacattagtatagttatagatgatttggagttagtagttggctatactattaaacttgctgagtaggtaattaatcaatcaatctctctcacacacactctctctctctctccatgtactacatgatgcagagacagcatagctgcaaaggcataaatctccagaattgggttcaggaccacacatgcatgattaagcggcatcattgagggcctctggcgatttgtttatggatcttttttgtggttaattattctggagatgttagcaagatcctaggcaataacccaacacaaagccctcgtcacaggttgttttccaggctcgtttgtacttgtatctgtttgcttcttcagttagttatagtttaattatccgtgaaagcgcaaaagtacagtcctagtgcatgtgcacaagaaagaaaaattgtgtactagtgtacgtacgtgcaactagatacgaccagataaattaattttgcaaaattaaaaaaaacaaagagaaataaatcggcaatagatataaaacggtggtcacaagcattgaagtgaggccaacctgcattgcgctagtacaaattcaagggctaagctagctagatatcccaagcttccagcatggcaagtcaaaaaaaatgccaaaaaattgtcggagcttaagtttaatccaagcttttaagaagggacgaaacataattaggtggcataattgcattttgtatcaccctaacttaattcccctgaggttaactattgtggggttgcaaggaagatgcctggcaaaattaaaccttgacaggttgttttcctggaccatagctgttatctgtgaaaagcacaaaggacaagagtgtgcatgtgcacatacatatctggtgtacgtgcgagactaggcatgaccacaccaacatttatgtcacttttaagaatatatctataattatctatatgtgctttacatggttttatacaatgatacttaaaccaagtactcatctgatgtggaacgacaaagggtgccagcatgcgtgtctttaacaagttcatgcacacaaaaaaaaaaaaagtcttagccacccccctcacagtaagatgcgtttggtttcctacaaagggtcaagtcaagtctggcttgtatcattcgacctggtttagatgagtctctttgagatgtgtaaggacgtattcaatctgctactaagggtgtgttgagaatcccctttcccaactcacacctctctttttccacgcgcactcttttcaaactactaaacggtgtgttttttacaaaaagtttctatgtgaaagttgcttacaaaaatcatattgatccatttttttaaaaaaaataactaatacttaattaatcacgtactaatgaattactctgtttttcgtgcggagagtttagttccaaactccccccagcagcgaacaacacagacgctaggagaagaaaacctttatttttctccaagccggctcttcgcttggtggcacactacacccaccaccacttaggcaagtcaaggcatagttaggggtgaagacatgcataaaacagctaaggcattaattaaaataaaaatactatttaattttaaaaatattcactcttctatttattagctcatccctacacacgagaatttcttggctcttcccttggttttttagggtaccaaacatacaggggcgaagctagcatcaaaataagagggtgcgctaccattgagaatctagaaattttcagtgcaacactgtatattttagtctttttaagtgagaaattaggaatttgggggttcatgtgtaccctcaaacactataaaacttcgtcactgtaaacatgggctttcttactaaaagactctattacctgtacagttaaaatgcccccactaacattattacacagagtctcatttcctgcgcaaaatcgcaaaggaaaaggaaaaggaaaaggaaaaaccaaaattggaccttgggtccgatcggtagacgctggtgaggtggagccatctgggtcatgatatatacgtctgcacgcacgtacgcttagctccaccatcctccatccaagctggttgccctgtccctgtttgggctccctagctccacgagatattgtagagagtacatggatccaaagctatctcctgcacttatggtagaacacatgccactttggctcgttggctgcatcatggcacagggccttgcgatcgcagccatgagccatcgattagggtatatcttctctgttaatttgccccttgctagaatcgatcaaatcgatactattcgtcgaccggagaggcggcgacacgatcgaattgtccctctcctcgtcttatcctggatgagcaccggcctcgatcaactataattttgtggagccactcatagtttgttttggtgacagtagcgatgattatttgtggagacactcattgtttgttttggtggtagtggcgatgattatcttttttcttattttttttggtgaagggtatttttactcggactttacatctaacaggatatatgccatcaaactgtatgatcgaatagaaatagctaagccaaccagagggaggtgaatggttggtatacccaaaaaccaaaacttttagcggaattaaaagttaccctaaatttcgacgaaacacagtccgaccgaagtagacgcgctggtctgaccgcctggaagccgtcggtctgaccgggcttgatcctccggtcaaactgccgagatcaactgccgtcgcctgaaaccgccgccggtctgaccacccgtgatccaccggtctgaccgctggtgtctcgccggttagactgccgaacccgagcaaacacaaatcgaagaactcttgatgtagatgacaactttattacttctctctgtgtttacaaagtgcaacaacagcactcctcacgaaaatctcgactaaactcgaaaccctaactcaactatcaactcaatgctctcaaaagcgatatggggatgcctcacgctccctctctatttatacatgaggtagatagtctaaagccatgaaccaaactcatacaggaagtcctaatctacctaggaaatcttcccgtacaagaaacaaattttacaaactccaaacataccaaatttggactccttccaaattcgactccgcatctcgtacgcacacaatatctccatcatatggcatggaatcttcaccaaccacgtgcattgaactctagcctaagtatcccgcatgatatctgtccgtccggacattgccttatctccaagtcgactcccgatccattaccggcactactctcccgaggcatcaagtcacctacacatgaatcaaacaaagaaaccatattccgagaccaagctatctccaacttagctcattgtcagcaaacaatagtattacatacgtatagtatccatctagaagccataaacatgaaacatccacggatatccaaacaaaaaacccgaaaccgaaaccgacacagagtcggccggtctaaccgctcgatacacatcggtctgaccaacaacccatgtccggtctgaccggacccaaatctctagcagcacctatttaacacctgcaaatccaatcatctccaaaaccacttcgccaataatctccaaatatcaaaaccaataattacagatgccaattgttcatcacagaataagaatcataaacactttgattttacacaaacaacttgatatgaaattcgttcctataaagatttaaacttaaaatcttggagcgctactcatgtcactgtaaccactgggctacatgccttttgcgatgattatctatctgatctgattggatgatgtagaactggagattacgtgtcgtgtgataacgctgcattatatgtatcatttcgtgccagttgcgaaacagtgatgctgagaccgatatggcagcaagagtagcagatgccggcgtgatgcaatggaagcaagcaatatatcattatctcaacaacagcaacaaaagaacagaaagaaagtagacaatagaaatatatcttttagataatgaggtagacaacacatacgctactgtttagttggaaactgatttcttggttagttaatttgtgatttgctgattacagagacgttgtaaaagcagatcgaaatgacgggagcaccggagcaaagagcaggcattcaccggtttttcttacatcagtctccaataatgatagtttttgcagactcactctcttttctccttgctaaaacct

SEQ ID NO: 4434 - DNA, 4345 bp, Oryza sativa
cctcctgaccgccggtcgccagatctggccaccgggaagccggatctggccaccggcgcctttcctcgcctcccggccgccgatgccgccaagtttggcctccgggaagccggattctgccgccggagccttccctcgcctcccggccgccgacgccacagcggatccagccaccgacaccttcgccacctccacaacctcttccccgactgccggacgccgcctcctccgccgccgaccgatgaccgccatatccggcctccacgaggtcgggggacgcggatccagcgtccgcggcctttcccctccgccaccgaccgccggccgccggatttgtttgtgcttgatgttgtttgtgcttgatttgctcatgtttgttgcttgtgtggatgtgtagtttgttaaaatggacatggatacttgtgtgatgtatattgtcagattgcttcatgtgtagttgtttgttgagatgtatttgatttaaaatacaaagttgttgtatcatgtgcatcttgagatgtatttgatttttcttcatttcgtacatttgggctgaggcatttcttttttttctgggtgatttttgacgtctgtgacgggtgagaactaaaaccagtcacagctgttttgtcacctttgacgggttgcaaagagtcacccgtcacaggtgtgagtcacctgtgacggctatattttttagcccgtcaaaggttttaattaccagtgacgggctttcacccgtcaaaggtgaggtgtagtcatcagtgaccacttgtctctgaccagaaccaaatccgtcaaaggtgagggttagagtccgtcacagatgactggatccggcctagtgtctaacatttaaattttattctaaaatatctaatttatttcaccattactcctatctcaatcaatcacaaccaactttcatttaatttctcaacttcatctcaaattgagattcagcgcggttgcacaaaagcaactgcatgcaattacaaccattcaagacctaacacagacgcaaacaattgctacaacaggatattcacaatggcactctttgctactattgaccatatgtgttgctactatgactgcagtcataatagggatggcaaacgggcgcgacgggcacgggtagtgcctacctatacccgtgcggccgtgcccgtgatattatttgtacccgtgggtatgcccgttactacatgacgggcaatgattgttgcccatgcctatcgtccgcgtgcgccttgtgcccgcgggcgtgcccgtttacgggcaatgattgttgcccatgcccatcgcccgcgtgcgccttgtgcctgcgggcgtgcccgtttacccgccacaaaaaaagcagtggaaaaaaagtctacaagcttctaagttcaaatttgtcggtgacatgggaccggggatatcttgactagaggtttggggcagctgcggtcacccacgtggcctgaccccctcaggggggggtcgggcccgatggtgatgaggccgcccctccctctatctccccgaggggtcgggccgctcccgtttcgaccccccgagggctggggcgccccgaccccctgagggtttggcgccacgtgtgtgggttaggtgagcacagcggcgctcacctaaccgcgtttattgcgggttggacgagcgcctcatgccgcatttaatgcagcatagcgcatgcttatccggtccgtgatcggtcgcagtgtgtgaccggtcacagaccggtcagatcgcgggttagggggcaacaggcggcctgacacacgcctcgccccgtcccgtcggaatgatgagagcctccaggcactcgtccctagccggagccggcgtgggaactcctggagttggcacgtcagccccggccagatacattccaggcttcatcgcaaccattgcaaggaagtcattgtatgaagaagggcagacgtgtagcatgctaaactgacacgtggtggacaagaatgaccggtctgtgactggtctgacgccggtcgcgtcatcagcaaacaaccgtgcttccacgttgcacctgcttccggcggagtggaggttggtatgacccatcccatcggagggtcattcggacagcagccattgcaaatctccgcccattaatgaggaaggacagggttatcccggtgtcagacgatggtacaagccaagttttggtcaaagtaggatgggtccccacccaaaagaagggtaggtagaaatggtgtatgtggtatccccttgagatataaaaggaggaccatgcctaccaagagagaggagggagaaaaagaggagagaggaccggagctggtagacggagaaaagaggagggagaggggctctagagtttgaactctcttgctctccagctctttgtaactccttcatacacagatccaccagaacacaggagtagggtattacgcttctcagcggcccgaacatgtctacatcgctcgtgtcttgcgcatttgctctctcgcgaaccattccacagatcaagggcttagaacctcacttagcgcccccggccgaaccggcaaaggggggcccgcgcggtctcccggtgaggagccccacgctccgtcaaaatcgaacttaaaacatcaaatattctccgcctcggtgtggtgtctctcctctggcagcgatagaggaagggggagagaaataataagggaaataaaagggaaaccgtagaaaacaaagaacgtggcttctacatgtaagttagatttcgcgggtaaatgggcaaagcgggcatgggcagtgattacccatacccatgcccatttacccatcgggtatatcttttgatccaataagaaacccatgggtataaaatggagaacaaacccaactctaatagggtttttacccacgggtaaacgggcaaacggacacaattgtcatccctagtcataatagcaaatacatcggatctggattgactcacaaccaccactaattttattttagctctctccttagggtgtgttcaggtcctttaggaggaggggttaggaccctttcttttcgacacgcgaaacgaagcacgcattagtacatgattaattaagtattaaatatattttttaaaaaaatattaatatgattcttttaaaatcatttttttctatggagatttgtttttaaagttacattccgtttagctgttttgaaatcgcccatgttgaacacgagggatgtgaagctgggaacctcaaacaaacgatcgaattaagccctcgtttgttaaggttaacctcttcatgaaaaaaatccactgtgtttatattttataacaacgaattgaatgacgagtaatcgaacgtggcattccctttaattgaacttacattttgatgatgaatatcagtgctatcatctgcaatttgttcgggaaaataacagttttttttgcagtgataatttaggattatttaagatttgcacagtggctcctttctaggagcatgaaccatcgccattgacacggacaccttacctgtcacaaagaaaaatggggaaataactgctcccttgtccaaaaaaaacataatttagaataaaataagacataactagtactacatccgtcctaaaataagtgcagtcgtgggaatctatgtccaatgtttaaccgcctgtcttatttgaaaaatttaaaaaaagttagtcgcacataaagtactattcatgttttatcatctaataacaacaaaaatattaatcataaattttttttaaataagacgaacggtcaaacgttagacataaatagtgtaaaactgcatttattttgggacggagggagtataacgaatctaaactggagcagatttattatactaaattatgtcatattttattttaggttaggtttttcagtgacggcagagtgccaagagaagaaaatactagcagaggcagagacgatcagacgaatggctggcctctctacccacacccatgccaaggcatgaggatgatgttgtccttgtccacagtgcacagacactggtgcaccgtgatgcacagtcgcacacaggcacacagccttcttcacgaagccatatccctcattcccctctatatataagccagcaagctgcgccatgtcatatcccccgctaaactctccgcccgcgcagccttgcactcgcgtcgcacatatcgacccatccatccggcacgcatgcaggcgcagcaggccatggacgagcccgccaacgcgcagctgtacggccacgctcacgcgcactcgcaccaccaccggagcaagcgcccgtcgcccggtggcggcggcggcggcgcggcgactctgggc

SEQ ID NO: 4435 - DNA, 12087 bp, Oryza sativa
tcgaaccctaaaccgctctcaacagtaccatgggagggggggggtttgtcctgtatgaaaattcaagatgaacgatgtctgattttcgaatttagggggggtaattcggtcgactgttatagttcagggggtaattcatactttttcctttagaatttactcagattttgataatctatagttgtggaatccagaaaataaactaaaagccagaaactggaaaagccaacttttctagattttcacctgctagattctctccggctgcttctcagaatcttaaacttcccccaaacatgacctaaatatcatgccacaatgacaaaagtaacgcaaaattagatatcacctctccaataatagttgtataattgggcaattggagaatcgaagagtggcagcttaattataagagtgttaacttacatgagtggcaaatagtcaaatgtcccaaaacttttgcggtatttttcggtggaactcctacgaggctatactgtagtatcaagcggagggcgaagaattatatgcaattattcagtaaggatgatttttttatatagatgaaaatttcttaattaaagagggtgtagcgcgcgagagattaccatttccattgttttcgctgcctcctacaccgatcacgcattaattgtatggcatgatgaccgtatgaagatgaccatataacaaacagacgatgatggttagactaagtacagtgtggaggatggataccgctacacttgttgtactcctgtacttgtaacatcattttctcgtaacagtgaagcagatcgatcatgctccacctaacacaattccgtgaaaaaaaaagataggccttctgaatattacctctaagaatgagactttgattaaccatttgaaattcaaccaccaatctattatagtatttaaacagtcttagaagcatcgcatttattgtgtaggctaaaaatagaaatacaatttaaaaataactaaaattcagaataaaataagaaatattaaaagaataatccatgttgcgaagatgttacggttttttctggctgtgaacttaatacaccatcagcgaagatggcagatcttcactggcggtcgtctattttacaagcggtctacttacacaaccgcttctaaaaataacttttcactacctacacagctgcccggaaaaaaattacttcgcgctataaaaaaaccctctccaccccttatctttatcccttcactcctcaccactcatcccttcctcccatcttctctcgagtgctgcagaggggcacgagtcgcgccgtgggctacggatccgtcctccggaggggcgcggccgatggttccggcggcgggaggcaccttgggcaatgacaacgagtgggtggcgaggctcccggcggctgaccagcggccgaacttgggagccgcagcaggtcgatggcgaagctaggtcggtggccgctgtgaggagacgaggtggatccagttctgctcccgtccaccctacctcctggcgatgtatttttttttcatattctttgtgatttgtgaatggatatgagtttaattagtgatttgtgatggattacaatgtttgtgaatgaatttgttgaatggattatgagatttgtgttgaatttgggatttgtaaatgaattagggtggtagagaattttggatttggggtaggggattttgaacctgtgggggattttcacttgcggttctctttacatacctgctagcgaaattatattttcgcaagcagctctccttacatacccgccagcaaaattacattttcacaagcggctaattttcgcttgtgaaaattctctattttcactggcctttgattactggcggatgggttggccttaccaaaaatataaaatggacgccagtaaaaatcattttgtagaggtgactaaacggatgttttctacttttctataaattatataattatgttgtgccttcgtgatatcttgatttaaagttataaatttaaatgagaactttgatgccaattatcccgcatgcacgagtatctctattggatgtgattttcttaaatttggaacataaataaatattcttgtttgtaatgaagaatattttaatgaaaacaattaattcaacatgatcacggtagatttgtactccctctgttttatgatataagtcattctagcatttctcacattcatattaatgtcaatgaatttagacatatatatctatctagattcattaacatcaatatgaatgtggaaaatattaaaatgacttacatggtgaaacggaggaagtagatgttttcgtaaactttattttcctgtgataaacttaatctgcatatattatatatgcatggggtattattatatgataataagcgaaacataactcaattttgtttttgaaattatgattttaatatctctagcatacatgataaggtagataataatttgattagttactaccgtcaaacctggtgggacaaattcgttgtgctgtaagtgtcacgttgagtttttttttcaagggaatacgcctctacgtgctgttttttttttctgacagcccttcctttttcttttattcgtgacagtcccccacagcaatacgcatccagatgcctccgttcccctcgtgtttgttcaggtttaggatgctttgtttttttttttttagggatcaggatgctttgtttggaagccaggccacgttcagaacttttttacttctgtgaccaggaccgattctatatccaacggttgcttttgttaccgttgctctatctgacggctatgattcgtcctaagatttatctcatgattctctcacttggagagagattggggtaacttttagtcctttaaagtggatataatagtgtttttctcgagctattcttgtaaataataaatagaatagcacaaatttgtgacagctagcagaggtccttcgacgtgcatcgccaaaggtgctaggtggtgtacactcatgatacacgatggtgtaactttatttgccattagtttacgggcaagtttaatagtacttagtataaaaaactattagccataaaattcaacacatcatttataggtaatttaatagtctatttatataataaatatatcatcaattaatacttgacacacctctgtaacacatacttcttccggtttttaaaatatggcgccgttctttttttatgcatattttaccattcgtcttatttaaaaattttatataaatatatgaaaatgtaattcatgtttaaaatatcttagtggataaacaagtcccaacaaaaataaataataacaatatttttctactaagacaaatagttaaatatggggttacaaatctattaaaaacttgttgaaacccgtacaactactctgcaacgtacatactacaaatttgtaatctattttttttctttttcttattatttaagcacaaatttgatagggacaactctggtatactctgggaaaaagataaaacaacttatgtagtataaatcagagggagcaagagtgctctaaaagaaaccacctcgcatctaagttttataaaactagtgggggtgtgcgaaggtaggctcaagcgttgattctgctcgtttagctagcccgcctctgacgctgcattatggagggagtaggcttgtagctagcccgcctctgcacgctatatttcaaggaatcagagatccatacagacagagacgttcagccatcagacctgcagaggcaatccatccatggcatctatcgttcctgtactcctgcgcctgctgctcctgctgctcccgcttcccctgatccgagaccacctctggccgagccaccgccggccaacgccgcaggacgatgcgggtgagctccacccgatcttcctggtgcccggggcgagctgcagcgacctggaggcgcggctcaccgaggcgtaccggccgtcgacggcgcactgcggcgcgatgaaggggaagggatggtttgggctgtgggagaacaacacggagctgctggtccacgactacgcggactgctcactggagcagatgaccctggtctacgaccccgccgccaacgagtaccggaacctgcccggcgtcgagacccgggtgcccaacttcggctccgcatggtcgttcggctacaagaaccctgttaaccggtaagtttcgctcctaccaaccacgagtccacgaatcacctgattaaaatggcaatatactctctcggtcccttattcccagaaaaaaaccaacctagctatagctagagcctgtttagatcaatttactatgccaattttttttggtaaatgttttgatggcaaaagatttggcattgaagttttggtagttggtgtttagatgcatggtaaaattttaccagtttattagtaatgacagagagagcacggctcccaacacactttttggcaaaatgtgttactctaggctcccaaatgataaataccaaattgctaactttttaccactagtgtttagatccatttcggtaaaaattgttccaaaacaatcaaacttttgccattttggaggaactaaacagggccctagtttgtgggacagatgagcacatggagagtggattttaaaccatccactcgttgtttacatgtcactagttataaaaatatttagaaaactatgagaagatatactctcccttttttttatccgctgaactaggcctaaccctagtactgccaccatgtggatctgccttccatgcatttccacctccaattgatgcaaaaatcgatttctcactactcccccatcatttttcatttccattttaattcaacttttaattcatcgaacctgcattgtgggttgagttgagccgaagagagacaagccgagcagagaaagatatcagactgggttggggctgaaaaagatagtttaaaatagtttcccatacacatgcatagctgactcttgaaaagagaaagaatcattagtacttcttccttcaatttcagaaataaattatgttttagataagattgtagtgaaagtcttaaagctttaactattaatattcttttaaaaaatagtgtgtgtgtgtgtatatatatatatatatatatcatacaaagaactataataaaaatacagttgtatttatttatgtatatattataaaaaagtagtaaaaagatatattatgaagaccattttgttgttcaaaacgttaacaattatacaaaccggtgaaattacgtgattcaatgctggagtaattgcttgattacatatatatatattttagtctacagagagcacaatgccttggaaagctcagagactggctggaagaattgggataccgtgatggggacaccatgttcggagctccctatgattttcgctacgccccgccggtacccggccaaacatccgaggtgtactctcgctacttcagcgagttcatggcgctcgtcgaggcagcgaccaagaagaagcagaagaaggccgtcatcctggggcacagctacggagggatggtcgcgctcgagttcgtcaggagcaccccgcgggcgtggcgggacgcgcacatcgagcgcctcgtcctggtcgcgcctacgctccaagatgggttcgtaggctcggtgatgaagttcatcacggggacgggcataattttcgtcccgacagccacgtccacgaggcccatgtggaggagcttcgagtccgccatggcgagcttcccgtccccggccgtgttcggccgcgagccgctcgtggtcaccaagaggagggactactccgcgtgcgacatggaggatctcctagccgccctcggcttcggcgagggcgtcgagcctttccggcgacgggccgtccccaggatgtacagcctcgaggcgccgatggtgcccatgacgtgcatcaacgcggtgggcaacaagacgccgctgcaactggtgttgtgggacgacgacgacgatgacttattagacgcgtcaccggaggtggcagcgtatggtgacggagacggcgagatcaacctgatcagcatgttggcgtttgacacggagatgggtcggcagccaggacaggagaagcgattcaaatccgtcaagatagctaatgctaaccattccacgattgccatttatgattttgcactaaagaggatcattcaagaaattattgaggtgaatcaggtacgttagtagacactccgtacgttgggtttcacgtatatatgttgggtttcactgtgcgcggtaatcatatatatcacgtgtggaattctgtgtaataaatgaatcccatgcagctttgtgtataccgatgggttggttggtaaataaaaaccaaaaattactgctcccaccatcccaaatcagaaggtatatatcattaatttatttcacgttatattccaaacgaatataaaatcagtatcatataaaaatacttaaaaatataaatctaatgatatacatatataatacttaacataaaaataattattacaatcattttaacgttatcgagtttgattatccttcaaaagatgacgccctataatttggaatgatgctaatatattagctcaatttaaggtaatggaaatatattgcatcctcggcctttgttatactacgtacaatcaataagctttttagctaaaaagatagtagttgaaaggccaaacccttactaccataacaaacaaaattagacagtagttgaaaggccaaaccctaactaccataacaaacaaaattaattgataataaacttaaaaaaccatatacattctaacatattacgtcactcatagtagaatacaaatacaaagatacttgactatcaactctaagaaagtaacactattgcgcgtaatataatgctccttccaccataacatcaacactaatattgaagctagcttaatgacatgaagataacctgcgtggaattaaacaactttttgttattaaaaactttatcatttcattaacatcaaaattgaccaacgaagtacactaaccctgaataaaaccattttcaagcgtctagctagacactcctcggagtaactcgtctagctagggactcctcggtgccagttaccaaaaatatttctggtggttcgaggaggagggatatcctatatatctataaagtgatcatctccactaagtatagttaatgatatttctctattctctcattaagtcaaatcacctcaactgtttctaactattggatggttgatctatggtctaaattatctccctcccttttcttctaatataaaatcataccaccatagttttatttttttatgattagtttatattaccttgttaatttctttttcttctctcattgagtcacattatcttagttttccttttacatgattaattcatatatgatttaaattgttataaaccacattatcatatgttttatatataccttttttttcaatagtcgggcatagatgaaaattatacaaaatgtagatattttacatgttatttgtactaatattatacaaaactcccataaacgcgggatatcatctagacaccatcatgcaaaacgagccatgtggcaatcaaagaataggtgctgaattgttttctacacattgcagaaaccatcactaccacaaaacaaccaatacaagtcggcactataggtatcggaagtgctaaaatcgacacctatagaccttttcctacctccatgtaatgaaaacacaaacaacgacacccttaagtgattataggtgccagttctgtaaaaaaccaacacctatactattggtgtcgctttttcaaaaaaaaaacaacacctataataaattaaaggtgtcgtttttaacaccttttaaaaactgagccgtgagccgaaccatcgaggagtggataattgaggagagtgcgtggtgaggagacaagtctctctctctctctctctctctctctctctcggtctgatcgcttctctctctcgcgcgtctctctctcgtcgtacctctctctctctcgcgcgaagcagctccccatggtcagcggcgccctccccttcgccaaatccaacgggaggggagggtgccggcaactatattttggatttttgggtactcgatctagcaaaacaagttagatggtcaaactgtatcggttgactacccataaaacatttgtttgtacaacacaaaagaataaatgagttactaaaacatcagttagtgacatagaacgcaatatcaaaaataaatagagaaaaagaaacaccaccaaatccacataaaacattaggttctaattgttgaaaatcgtaaaattaatacttgttgaaacattaaaaaaactacaacattcacatgaactattgaaacaccataaaatacttattgaaacatacaaataacatcatacatagcattaaaagccctatcgttttgcttatgcttatccttattttgtacgacttgttcacaacaaaaaaaacatgagaaaaacttttatatacatgtttttagcgattcaaaagcaaatgctgtaaaacaaactacaataaaaaattacaaaattaactccaaaattaagttttagaattcaaattttagcttataatcataagcgcaatgatgaagatgctaaaatataaactattgcaccacaacatgattctccttgccatcaaagaaggtgaacctggaataatgcagccttctcaaatcgctagctttgatatgctctgcccttgtaacatttgaaggcttgcgtgaagacaacccatgcaatgatggatatgacaaggaagaccaagaaaaacttcactgggaaggacacaatcatcattaccatactctcaattagagagtgaggttccacccaccgccaccggatccatgcatggtcagaacccctcaatccggggcacatcatgaaccccaccgatggagcaaacgggatagagagcactacctctctcattcactggggtggagacaattgatcttttgtcgatgtcgtgtgggccaaactcttgctgggagtcgtgtcgaccaagggagggatgttgcactggtcgatggaaatcaatgaatagatggggaaggagtggatgggtgtggtgcatgatacaaacatttctttttccagtatcgagagttagagaggaggagggggtggataattggtgttatcttcagttccaactacttggggggacattgagaactaacagttggtgaaacctagtgatcttcagtttcacctacttagaggggacattgagaacgatatagttggccaaacctggtgaagctgcaaaatggtaaatacgggggtgggtgtttagttcaggggtgtaaagttttaccgtgtcacatcgggtattatatagggtgtcgcatgaggtgttcgggcactaataaaaaaactaattgtagaatccgccagtagaccgcgagaagaatttattaagcctaattaatccgccattaccaaatgtttactgtagcaccacattgtcaaatcatggagcgattaggtttaaaagattcgtcttgcaaattagttgcaatctgtgcaattagttattttttagcctatatttaatactttatgcatgtgttcaaacgtttgatgtgacggcgtataaaatttttgctagctgacgcactaccagacttcaggtctaccctgtaggccgaaaaccgtcagaataatatgaattaccatcagaaaatgcttttctgtgggtgcaccgtcaaaaattgccgacagaaaaaagactacggagaaattaaatttttctgtcggtttcctgacagaaatatcatttttgaaagcttatttttgatagaaaaaagaccacggaggaattcctgtcggttggctcacagaaaaaatcaactggcgtcaggtttctgaaagcttatttttgacgtggacccgtcaggaaaaaccatcatccaccgtcagaaaaaatgagttccacgcccaaaaaaaaaatacacatggcgatttggataaatatatgaacatcaatcacaatccatacatcaaaattcaagtttgcaaagcttacataaatagtccatctaagttcagtacatacaaattcattcaaaccggatttagtaatatacaaagggtccatagaaaagttaaatggttcagttacaattcatcaaacacatgtaaaagaaaattgtcttccagcagcagtccgtgttccgtggtgcttcaaccttgggcaaaggaagctaaaaggtttaaaaaaagaggttcaatttcataattttcttcattacaaaataaataacaatgattatgaataccccagttatagagaaacaaatagattagtacagggaaaaactgaagtgagcaacataaatttctcaactacaagcatgaaaatgaaatatggcaactgaaatgaaaagtgaccatgaaaatacttcctgtagtactctgccaattcagataagacataaatgctaggataataggatcagactcattttctatggatgcttaaatgacaagtttcatggtgcaaatgctaggacatcttagactaagaaaagatttcatccactgaatgagaagcataccttgattttcatcatgtgcaacgttctgtagatatttaactgcagcacttaaatattcaagctatggcatgttaagaaaaatacaaagtgacatgaacaaggtaaattataaagggtttgtacataagaaaattctaaaaacaagagactgaaactaatttattgttctgatggcatgtatctatccaacacatgtagcagtatgtgacttgccaaaagatatacaaggacttagacttgtgaagtatgtatatgcactactagagactagaaagcactaatgatttcatgcatacaacctgagctaaaaatatgttttcttagctactgaaacagagaaaataaaacactataatactcattattcacacaatccttaccatgaattgcaaggtaaaaatagcataagaaaagcatctgcattctaactaaatgtgaccaagaaagcatagtgcatgatattccactgatagattaatttcatgtcaaacaactcactaccagacacatacaaagttttatgaatagcagggactctagtgtgggagtacctgtcaatctgtcatgccacaatattaggtcttcacaaaatggctagagaaaaattagttggtccagacataattacaaggctgaaacaagaaacaaatcatttagatgtaaaataaatattatactctaggagtaatccaaaaaaaattaaatttctattatagaaactaaatcacataatgtagacaatatgggaaccaacttgtcttgcttaatattggaaaaaataataattagcaacaacagtaatggatcaactaatccaatctagattagttgatgaatgcagcaacgcaggttttgacacaagaacccaaccaatctagatctactgacattccactgacaatcattaaacttgttgtaaagggccaataacccaatccctagcaactaattgtgttgaaactatatctactactgggcagtcatgttagaataggtgtcaaatatactagtcctatttggttacagttggacttggagttgtaataggtgttagggggtggagttagagtcggactctgtaacccggcatctctcttaaatagagaggggggcaccacaatgtaaccatggcgactacaatgtagcgtagacacgcagggagatgatggcggcgtggccatggactcgtagtggctaggagctatattggttggggaggagcgcccataatcagagccccggggatgtaggcttcagctgaacctcgttaacaaatatcgtgtgttcctgtgttgtcatctggcatgtcttgggtgatcgatgactgaagcgatcaggaaggttagtcgtctttccgctatatcgactaacttttataacaagtcacgtaatacagatgaaagcccaaataatccac

SEQ ID NO: 4436 - DNA, 5002 bp, Oryza sativa
ctcactccccggcacacaaaatgaagcagcgttttagtgcatgattaattaagttttagctatttttttttcaaaaatagattaatatgtttttttaagcaactttcgtatagaaactttttgcaaaaaaaacacacctttagcagtttgaaaagcgtgcgcgcggaaatgaggagttgggaacttatactacaaaacagagcctaagaaatcctgctaaaattatggcaatattaccatcttactaaaattttgacattaccaaaatttggtaaggtttattttagctacaatctgaataggcccttagggcctgtttgggagggcttaagattctgagaagcaactagttggaagccagcttttccagcttctagtttattttctggattctacaactacaatttttcagaatctgaacaaaaaactgtattgtttagggaagcttctgattctaggataaactgcagcagctaaaagcttcaccaaacatgcccctagttgaaagaaggcgaccattaaactgttagtagcacaaatctgccattgccggagtcattagctaatccctcttctctctctcgatcgatctctcagtctcacccatccctccctccctggcttttttacccctcacgggccgcacgctgcctcgctccctccgaccgaccgccacaccaccaccccccacccctcttctctctctctctctctctctctctccacatccccatcgtctctcaccgcgttgctgctgctgctgccgcctcggccaccgcgcgcccgcccgcgcgtcgcacgcagcttcttcctcttcttcttcttccccaccctctccacccgatgcggcggtcggcgccgcgctgctgctgctgatgcgggcggtggtgaagaggcgacgagggggagagcgcgggcgctgctgcggctattggagatccggggcttcgtggtaagcaagctctgctccccacccccgcccgctccctactgattcccgcctgatcccgccgggattccgctagattgctctgccccccgcgcgcgccagcggcgagctcggctttgctgtgctgtgctgcggccgccgccgccgctattggctgcgcgacgcgtgggggagaaatgggcttaggcttttaagcgtgctgtttaggcttttgactgctctgtggctgtgcttatggtagaagccgccgttaaaaggtggctcgattttttgttttttctccctttctttttgtgtcagggatcgtgcggggctaggctgggctcgagcaaggtcacgagtgagttagtacggggatggtgatcttgtcatgatacaatgcggtgtggctgtttcttttttttttttggtgagagtttggtagagagatgacaaatcgtggcttagttttcaaattctttgtgattttgtttcccaatgcggcccccaagtagctcactatgtttgcaaagcacatggaataccattttattgaaccattttgtttttttgttcgtggggcattaggttggaagtttaatgctggatatttatgcacattttgttgctctgatcaaaggttttagttggctctgttgtaagcttaagagggaattagtgatttagtgtggctcatgtaccttgagtagaaatggtcgaatgccatggatcattgtagtatatatatacatctacgccactgtgctatacgcttgtatttttgtacaaattaacttctaattctttaggaatgtgaatttgtccaattcgagggtttcttcttgtttattataaccgtgcatttgtaagtgaccaacgtgtcttcgtgatgtaccagtccaactttcaaatacttccaaaaagtttaattggtgaatacatgtgggttcctcatagtttttacctatgtcaagtatcatgctcagcacttgttcatggtttatttctaccccagttttacgttatagtttatatagaaatgtcacactgtcactttctggaacattcaatcagtattcatgatatatacaacatactttacaatactttctggaagtagaatttgcttgaacacgttagatccttctagtttcctcctacgtccaatgaagtgaggtactttacttgtgtttatgatatacttttctatcgacttgcaaaaactttctaaaagttgagtttcttaataaccttaatgtcttttgatgcgctgtacgcgtgccatatgctatgcttttacaccaacttccaagttttccctaaaagctgttcttctatttaagcgattagtggggtcgtgtgaccccacgggacccaaagtggatccatttcgacggggatggaatctgggagtgagttctatgcgggcgaaggtctccagatcgaccccaagtggctcatcgacccaaagcttctctttgttgggccacggattggcgaaggtgcacatgcaaaggtctacgaggggaagtaagtctcatatttttgcactgtcatctataatttgatgatctgtgtgaaagttttgcttctaaattaatttttgattgatgctgggattggcaggtacaagaaccaaaatgttgccatcaagattgtgcacaagggggacacccctgaggagatggtcaagagggaggggaggttcttgagagaggtgactatgctgtcaagggtgcagcacaagaaccttgtcaaggtcttgatctttttgttgactcttatcatttcttttcttggagtggcagttgtggatgcttttgaatgttgaaaatgtactcgcttgttgttcagtttatcggggcttgccttgagcctgtcatggtggtggtaactgagctactagtggggggctctttgcgcaagtacttggttggccttcggcctaggagcctggagcctcgtgtagctgttggatttgcgttggatattgctcgagccatggaatgtttgcatgcgcacgcgatcattcatcgtgatcttaaacctggtaagattgctatttggaaacctggttgcttcatgggcatttacatggtggatttctgcaatccggaataataactattcattagttcatatacaccatgaggtcagacagttgcaggacttctttttgtgtgtgtgtccttgggtgttgggggcatggtccattcctgtgcataatcaatttcttcagtgggtactcatatgtcatcttgtatcaacttctaataataatttgaatttcacacagctgtttgccaaaaaactaatgttttttttattttaatattacattaaacattctttgtggatttaccccaccagccaaagtcacttgaagattcaagacaaataaaatgttctcattagtaacataggatgagaattgagaatataatctactctggctgtctgacctattatgtaaagttaagcttcatattgcacaagcaatgtgcatttttcaagggcaggaatgagctcttctttttacattcaatcttattaagttatggtgaattggtgatgtttggaagttaagtcaaaaggtagcagtgtcaatggcttgttcctcttttcctgtgtcctgttgtgtctgcatgtgatgctattatgggctagtctatttatgggaactaagcctaaataccacaaatagcactaattgtgggtgtaatggaagacgagtgcaggggagcaggcaatctatattgtttgtgtatgtttgtccaatgaggtaataacctcaatcagcaaatatagtgggggaaggaactgattcaatctgtcataccatttttctcttcattctttattattgcatggactggtctgcaatgatggagatctgtctagatattcatggcgttgattgggaaatttactaattatagaaaaatgtttcaagataataatgattatacagctttctgaggatttcttggttgaccttcgatggaagaaaccaaatttaagtccatcttgtactatgttttcaatgaataataatgtggacgaattagtaatgtggaagattccaagtacgaccggcatatgatccattagaggggcccctggggggcgggcatcttaaaaaggtagcttcagttctgaccttctgatagccaccttccaagggcggttccttttggaaagaggtggttctcccaaatggtttattattgtttttcggtttaagatataatagaatctctaagcatgctaagtttatactgtatagtgtatcaagtagcaaaacattcaggacgggtgtacctagtgcaaaagtgaaccagcaactagaaaaggactgctattatttcctctttcgataaaatgccaggaaatattaatgagctgaacatcggatgccagtggagtactactgattctagttcacgaatcaatgcatagctctgttattcaaaaaacagtactatatttctctactgtaaatttacctaatactatttggtgttttttttcagtattttcttttcagagctatttttttgaaaaaaaatcaagccagaaatatttgtacaaataaggtttatcatgagccattgttttgtccttctgtacgtacagagaacttgctgttgaccgcagaccagagaacagtcaagcttgttgaccttggtttagcaagagaagagacattaacagagatgatgactgcagagacaggaacataccgttggatggctccagaggtttctgttactgcagttcatatttgtcaatataattcttttttgtcaatatttgctaatcctgaaatatatccacagttgtacagcacagtgacattgaggcatggagaaaagaagcattacaatcataaagtagacgtttatagctttgcaattgtgttatgggaactccttcacaatagactgccctttgagggcatgtctaacctgcaagctgcttatgctgctgctttcaaggtataattactgatacttcagtctaatgtgtggaagagtggtttgtcaatgctatttgcttgaataccatattttc

SEQ ID NO: 4437 - DNA, 9306 bp, Oryza sativa
accctcactcccgaacagagccttatgtatttaccaaatttaaaaacaaactaagcattgacattttttttgacaactttacccaaaaagtatggttgaaatagcatcaaagtaaacaggccctaaggacttcgactcagctcggctgtttcccaaatcgttttgaatggggttaccgtcaccccatgatttggacggttatcatgataaccgtataattactgtaagatataccgtggttttaaaaattgagaaggttaccgcaggcgatattcgtatgattttataaaaccatgatccaaccactgaccactgtgtagtagtagcacactgcttgtgtagctgtagcttgggtggcacggggatttgaggggagagacttagtctattgttgtattagtagtgtttttgtttgcatggaggagtaactaattggttgatcggttattagttagtagttaattaaggaagtgtcaaagtcttaaaactcttgttagtgcactccacaggtcaggtctccaaaattgcttgccgctttcctagaattttcttctgggtggtggctgtggttagtggtgtgtggatatggagccatggaggtatagagaggtgatttgtgaaagctcttctaacaagaaaccatgtaccctgtttctgaatggaataaagtttaaaaaagggaaaaatcttttttctaaacttataactgataaatcgcacatgaaaatgttaaaatatataggtaaccgtaaaaaggtcaaagtgtgggggtaaaaacagaaatactactcactcaaacccaaaatatagctgccgagatagtagtaagagtaagatcgaaactacaatactataattatacttttattatgaaaaagaataatcaaaactatatgattatactcattaaaagtgccattattagctttcaatggaagctggggtatccactacactaaaaaggagaataattcttattaacagatatggggtaaaacagaaatgctggaacaaatataactccatgagtattaaaagtggagagaaacaataggtggaaaatgattactttagtgccctaagatctgcacatattcaaaggacggaaagataagtctgtaaaaccgcccaaacacggcatggaatgggtcagattggtttcgctaaaatgataatcattggggccatgatgcatgcgaataaattatttatcttggcatcttacattacatcacctagatgaaaatggttttataccacatccttgtctaaaaaaaatgattctttcttagggatggttcttaatgtagcagtactactagtgctgctggtaaagtaaggttggctaatttggtactcctagtagtgattctttgcagtgagtaatcggcagtatataagggcctgtttagttcccacaaacaaaatttcccacgctgtcatattatatatttggacacgtgcattgagtattaaatgtagaaaaaaaaaccaattacacagttcaccaggaaattgcgagacgaatcttttaagcctaattgcgtcatgatttgacaatgtggtgctacaataaacatttactaatgacagattaattaggcttaataaattcgtcttgcagcttcccggcggaatctgtaatttatttttgttattagactatgtttaatactttaaatatatgtccgtgccaaaaaattttgccaactaaacaagccctaaaccaaaccaagagagaatgtgtcatttgtgtgtgcgcacatacaggatgtctagtgtcctttaatatctactattgcggtatgtagacgaaacatttctccttctgaacggagaaattttccgagaatttcacagaaagtaaaccaattcatgcaaaaccacactgcaaacccctgcatctgaaagaagaccaatgtaccaacaaagagaaacaaaaatccaactaagggcccctttgaattggaggaaaaacataagaattttggaggatttcaatcctataggaaaatttcctatgaagctctttgaaacaaaggattgaatcctatcaaatcctttgaaattcctatgaaatagataatcctatagagattttggaggaaatttagcaagagcttcaacctcttagttactttcctttgagtctctctctcatctaatttctgcgtttttcctgcggttcaatcaaacggtcattcctgtgtttttcctgcgttttgcaatcctctgttttacacttacaattctatcaaaatcctacgtttttcttattcgtacgttttctcaattttgcgattcaaaggggcctaaaactgatctaatgatgcttggtccgatgtttattagggtcacagggaccccacaggctaaccaaatttgtccatgtctggagcccaggcgtccggccaatgagggcgtaggcaggcgttgcgcgtgtgagttgtgaccttctctctgcaccagcgatagacatggatggagatgcagatagactggcacatgaagccagaaggtggcacgaagcagcctgaggccgagagctccgtgtcctgtaaattattgcattattagtacacggtttatcttggctaatcacctggttaaaaagaacttaaattattagtagtatatgctagtggtacaccagtactagtgtaagtacacttggtatgatgattgtgatgataatgatgatgatgatgatgatgctttctcgcctctgtcgacagggggcacttgtcagatcgaactaagctctgatgctccattaggagggactaatcactgtgcagcatgattagtttggttattaaacaatcggatcttggggattagggtgtcacccgtggggttcatatgtgtattttatctgctccgaattttgtaatgccagttctgggctggagaagaagcctgcacttaaaataaacttatgtcaaaaaccagggcatcgtttcgattgcaaaatttgcaacatcgatctagctgtctctctggtcgctgcgggttggagaaggggcagcttctctagtgtggggctgtgggcctcgatgctctaacgcgtgccacgtgtgccccaatggtgtttttttttttgttcttttcggaaaaggaatgcaagtacagtggcaagagctatgaaatctgatcatgtgccctccggccctattgactctgattttggattttcgtttgtatgtttttaaagctttcaaatagtgtatttcatactttctccatcccatattaagttcatctctagctccttccttttatcccaaaaatacgttcattttttaaagtaatcattacatcagaaattgtgaaagtatggaataattgtattggaagatgataaagtgagaaatagttgcattatgatttaataaaataaaagcattgtagtctctcttttttttaattagtatgtgtgggatgtgtgaaaaataaacttatttttagaacaaaggtagtacaaaaatatttctatatgattttttaaaaatagttttctaaagcaattttttaactacttataactagttaattcattcgttcaaaccctaaattttaaggatttatcctcttgtcccacatgcctgtaatcttagatgatctcacgtgtcagcgctataggagtataaatcctcaattttcaatctagggagaggatatgaccaaatctctccaaataattgtcaaaatgataccttttgcttacgatttaagcatggcacgccaaagtctaatcgaatcaaatttcgcccccacactcacggagatgctactggaagtctgcaactgaaaacaacatgcgcaacgcaaccacacgcacggagagtcggagacgtaaagacgactttgacccacccaggaaaaggaacaaaatttctaccagaaagtggcaggcagtcaggcaaatcggtcgcggtcgtaatccatggcggtagcgatggtcactcgttaataccgatccaagcctgcgttctacaagtcaaaaaggcaggaagaaaaatgtccagaagcaatgtagacaaccacgttgttaagctaggagatttacaggttacagttactagcaacaaaatggcacattggtgcattcgtaagttgctaatcttacttgctagtttagtttgagtacaaggctcacgcaggatatgcatcagattcagaattatactctgccctgtgagcatacctcattcgacaggccactagatgactaggcctttgtctggtgaggtccaacgcataattgcataaagaaaatcacgcgacaacaaaaagagaaagtaacggaaacagataagcctgagataagggaacatagagtacatcaacaacttaatttaagagaaccttggaagaggtctagtacaattacagttatcaatggatgagatcatcgccgtttgtacaagcaaggtttcaactgaggccaatcgatgtttttgaccaccttactcttttcctgcaaagacgtgaaaccacagcattcaatgccagactatagctgaacaataatctctcaatgatcaaagtatagagtaattttcaagtgcaattaaggtacggcagtggcataactgacctttttccggaaatggaacagaatgaacattttgtttttcgcatcctacagaaaggaaccaattgccaatttaggaaacatgatgacactgttctcttttcgcacagaacagtcttgtgtcaatacagaacaattttcatatcacaaaataagtaccacacatgaaaaggatacacaaaatgggaatccgtcatgtgggtacatcaaaggaaacatttcagataccatcaccacaaagagagaatgggcacaaagaacatattagtttctgaagtacatggtaaggatgcgatgtttgaaaatatgacctattgttcggtaactactgcactaaaagcaacatcatcatggctttgaacatttagtgatgcccagagatagtaataaattaaatagtaataaatatatcatcgagcgatagtatagattaaatagtaacaaatatatcagcacaaaccagtggaccagaatggcctcagtttctgaccatattaaatggtcaattatgaaatgggataaatataataatcacccaatcctatcaagctaattttcagcccaacatccaagaagtcagagattttttttcttgagatatacaagtcgttattccatcagttcgctaatagatgatatgtcctttttcacatatgcgcttcaggagtttagcctttggtttggacatcagtaaacatcgccatattatgttataatccttcattccttctaggacttcactatataaaattaactcattgtaactaagaggttgtttggtttgttaccattttcggccataataaattttggctttgggaaaccaaatattacctcatatatcctccataccaaaatttggtaattctagaaacttcctaactcaacatcatgtcaaaagtttaggcaaggcatcaaaccaaacacaccatatatacctctatcttaactgattttggcaccgctaaagctggtatggttacaaacggcaacaaaccaaacagccccaaagtccacttgagaaaaaggtagaagaaaccgtaagtataccttcgaaacaagggaaaacccaagcttgctgatggcctcacaaaatttatcaggatcagcacctgcagtgtttgggtctagcctactcctcacttcagcaataagaagccaaccactgcataaacaaatgtatcaatagtaaaaaaggaagcacatactttgtcatagaagtgtagcagctaatcattaggggcaaaccttggtttgagaactcggtttgcttcctctatataactcggatagtttgttcccattaaagacagacaaaaaattgccacatctacagaggatgactccaatggagtctacagaaataacaaagcctttagtttaagtaacaactcaattaaaaaaaacagatattttagtgtttatttcgtatagttgttttacatatgttgcacataatggaaatcatgaaaaatgtttagaatgtcccaagagctatgtttaaaatggcccaaagctagtgatttatttccttcttgtgacatattaaagaattatcagaaattgtttttggttgataatgcacctccattgtaagaatagcaactggccagctgcttttacctttggccctcatacacatacttacattacttgtaattcatgcatgagtgtactgagtatttgagtatcgaccataatggcttctatttttaacacaggaacaacatgttaacatcagaaaaattcaatgctaaaagagtattgaccatgtaatgacttggaatcatgaaagataaattgtggaacccacactaagaaatcaaggtgcacaagaatataaccaatatttggaggattaaagttgggtcattttgtaatgacacatagtgtagttgtgaagcttagtaagaatcatggaaaaagagcatacatggctgacaaggaattgccagaatttcccctgaagctaaactggaaatgaaccaagaaacactttgttcatttatgctaacacacataaacaacatgccaacacgttaaagcaccaaagaggtacaaccatacaagatatggttaaatgcttacatgagccatatcacaggcaatgactgaagggtcctctgaaacaagatcgatggagaaaaccttgttcttcacatttttagaaactgctgcattgcctagacaagatgtcaattgtattaccatgattatgccagggaaataaaaaggaaaacattgtgaaaaggtgtcggcatattgagagtaaatgtttagcattcttaccacagccaaaatctgcaactgtccaagatgcactatgactcttcaaccaattgattataacatttactggttgctctggccaatgcgacatttgctctcgatatcctgcatgatactaaaagaaaacaaagtgaaatctcagccatatatcaggtggtatgaaccataggggcaattattgctgcaatgcaaaaagtccctgcatatcgatcgctgcaatacattttcctcccacaaaatacacaaaaataattattcaaataagaaagaaacaactaacagcatgaggtttgtgtagatagaactgtagaggtacaaacaataaggcactgactgaagagttgatgaggtaagatatgaaaaagtcaccacccagagttcaaaatttgttgcccatactcttcaaagataaaattcatctagcaaacaataagattaccaaaatggatgaaaagtgcatagcataccacatcaaaaagatcaggctcatttgtgaagtagtcaaatgcatcttgtccactgaaaagaaaaaaaaacaatgtttgagtaaaagtgtgaatattgcaaaaatgaagctctgattagtgatttctacatttccagtttccaagggtaaagtcgaagccacattaggaactccaatttagaatattctgagtcatacgtgagagggcaatccatgtttttcaggcataccggttgatatgaccaataattaacagtaccgggtcagacaaagcatgaaggttaagattgatgcatgtcactatctcttagcatgattaaagatagcagtattttgtacaaaatgtaagctacaaactgtgtggatatttcaacatacgaaatttggagtatcgtcatgttcttacacttcattattggttgaagactgttcaatacagtattgataatgtaaagcattcaataatagcagcacatcattagcataaaagtagtgttatctggagaagaattcgaacctgcaagtgtatagtttctcatttaacattctgaaatgaccaccagataaccttgcacgcatctagagtgcacatcataaaaaaaacatatcaactaattagctcagagaaaaaaaattcaaagaataaacagaaggtaaaataagtaaaacattcatataataagtcatgagttatctccaaactgcaggctagttcattaattttgttttttaagcaaaagttattaaattattaaggagcagcaaataaaagcctaacgtgaatactgtgttgcctaaagaaaatgtgaatactgtgcaaattcagagcaatgtatcacattcaaccatgcataagagcatacgaagcactactgaattactgaggtttggcacttctactgtcgctactaaagaataacagaggaggcaccctatgctttgacttcacccacactgagagatcatccagattcactaaataacccatcaaccctagtcaaaatttattcccgataccaccccgaacattttgtacttccaccgactcctgctactggcacggcatatactcctgctcctacctaccaatacacgcctaggcctcgcaaacctctgctccggagagccgattaccttgtcgaggaggctcgcgggcttcggcttgctgccccgtcccttgggcgcggcgtcgtccccgcgctgccgcttcgcaggaggggagggcggggacgccgacgccgccgcccccgaagaggacgaagcctggtgctttcggcggttccggccgcctcctcggcggcgccgcttgcggccgccggctgccgccgccgccgcctcctgcagaggctccatcggggagggaggcggcgcgaggggggagggagttcggggtttcgtgccgctgttctgggttgcggcgactacagtgcagcgagagagagtggtggacggaagcgggccagggtgaatatgtatatatttcggcccaatagctttcttgggtctggctaggaaaaagtacaccgaacgtccatcaacttgtcatcgagttacaaaatcgtcctccaactacaaaaccagatatccggcgtcccgtaaatcaaaaccggtcataataggttctttgatgttttttttgacccggttttatcctatgtggtggttgagtcagcgtgggacccacatgtcggggctgccacgtcagcctcctcgctctatgtctcttttcccctcttctctcccttcctcatctctctctccctactctgactcagccggctggaggacgagggcgtcggcggcgaggagcagcgcgcgggcgacgaggggaggagcagtgcgcgggcgggcagggggaggagcggtgtgcgcgcggctgcaggaaggggcggcacgcgcgcgggcggcaggaagggaccgcacacttgacttcctccacaactccgacgccatc

SEQ ID NO: 4438 - DNA, 22287 bp, Oryza sativa
ggtcttttggtcaactacagttgcaccggtctgagcctagcgtagaaatgcatatcattactcaaccaagacatctagactctagacattgtgcgtacaacgactctagtacatggttagtactaagaccgtgccctgtcttagtacgtagctccaccaaacatcgaaaatgctaattggcagccagtcgcgcgcgccctcccctgcgcgactagacatgtgtcgcacacggagagggtacggtggacggcgcgccgcacggagggagtttttccccttttttgttttttttcggtttctcattctgttttggttttttccggttttgttgggtttctctttctttttttcttccggttttctttaagatgtatgtttgtaaagtttgtatttgtatgtataccaagttttgtactcgtatgcatacaaagtttgtattcgtgtttttttctcttggtttttaatatgtacatatacaaggtttgtatacacgtatgcaaagcttgtatatgtatatgcaaagtttatatacatgtatattttttatacgtcatttttttgtacacattaaaaatatatatacgtgtgtatatactttgtatagatatgtagaaactttgtattatcaatgatgagtcagaaaattcatgccacctcggattagagcttagtgccaagatccatggcgctgagttcgcggcctatttttggttgaagtttttttgcaaggactagtttcaaaaaaagtttttgaaaatggccaatttgttaaagaaaagggtatatcatgatggtggcttaacttcaacgacagagaacattgtctgtgtaatacaactgtggtgatatggtttgctcgtcatgaaggccataagaaggaactggcacatggtttgctttgtgaatatgtaggatttcatattggaaactataccttacttcaaatatgtacatacaagagcagtatcagtatcattaattagaaaattaaagtacaagagaaaaaagtttattttttagaaacggcatacatttagtgatagatcgtcatcgactaacgtacgccaccactacggtcgatgcattctctccgctctcagccatcagttaggtctatgcatagggtgactgcctccgtggtcatgatagtcatggcgatcaaggctctaatcattgttgtggcagccgacccaactccaccaatctctgtatatgttggattaactgcattcccagtacctcccacccctagatgttttggttaaagccaaaatgtgcctataagaaacaagttcgtgggaaacatcaaaattttggcaaatcaatgttctaatggagctgtttgttttgttacccttttaacaaattttattagggtatccaaaccaaaatagccctacatatttaagagaggagaggataggagggtaggtatataataattatgctggctgatgaggttatggtaagtagaaaagattgtattagttcatagcccatagctatatatcttacagataggggttataaaagtaatgataacttcttttattacttgggttcatgcatgttttccttattgcatcttatgagggttatgtccattgttggaacaaagcgcaacaaggatggcaagggcctccctccaaagggagcgagcccaagcttggcctgtgaggagatagagaaaggggatgaaggctgagagaggtggatagaatggggagagatccccctcctcttgcccttgaagggctcattttattcatatgtaacgggaaattacattcttacccttgatttgctatatatgtacaacctcctcttgggggtattttagttctttatacattagtttatacaacactctaagtatggggttattccccaacatcccttgttgaggttttctctagtggctttatataattctttgccttactttacacaagtaatgagcgataaacatgacacatcatggcatcggcttaacttcatcagcctaaatctgtatacatttgaacttgtggttttctggggctgccattggacaagatttctgttgcatatgcgctggactcgaaacgaagatcaacacacaactgcaaggcatggaggcgttgctaccgtggactgccgggtgatgtcgtacgtcttgttcacggtgaagggctggaggcaccttgtgcgctacaccctctccatcctccatcctcagccgctgccatgctcaatgctccaatctgagccctcgatgcccggcaatggcatggcctctcaacaccagcaccgaccttcgactcggccccctcgttaagtacagtcatgctatcagctgtaccaattctctggtagatcctacggaaatccaatgtatctctaacggctccatttccgatgcccactattccaatgttaattaaacgatgaagctagctatagtattatgtcatgaacaatatgaactctgacttgcaaaaggcatgctgcacatggcaacatagagcttgttgtggccctcttttaacacttgcatctctgtagaaattagttctcttgaaactatatatttcatcgtatagtgaggggtgtgtaacaaggagaggtagactgtgtctcttgatatagtttgacggtgtttttggatagctttagggcatctgaaaatgatgagaaataagcagagacaggagttagctatgggcatgaactgcaccaactaccaatgagctagttgatgtatatatggatgtaaaaatgggacaacatttagagcacatcagtaaattgattttcacaagagggcctaggccgaacacagaatactgttggggacctcatctttaatcccgtttacaacccctttagtcccgggtagcaaaccaggatgtccaatccgggactacagatgggcatatttagtccaggttgaaataacccgggactaaagatggtagcgtcacgtggctggcgctaccatctttagttaccaaccgggaccgggactaaaggtttttttcttttatttttcaatgttttttctgcttgcatattgatttcgaaccgactcaacaacaaaatcatcacattcacaaaataatccacaaattcacaaaacatctaaaaatcatccacaaatttacaacacaaaatcatctacaaattcacaaaaagatctaaaactcatccacaaatttacatcacaaaatcatccacaaaatcatcaacaaaaccatccagtgtcattgccgcctgcactggccttcatcgcaccatcccggccagcgcgcccgccacaccgtgctatcctggtggctgtcgtctcccctctggtggacggccctcaacgagccgtgcgccgccgcctaccgcctccgctccgcgcgcacctggccgcctaccgtgcgcccggcgactaccgcctcccctccggcggagggccctcagcgagccgtgcgctgccacctgccgcttcccctccggcagaggggagggcgctgctgctgcccgctgtcggcgtagagggagaggggaaggggaggaggggatcggaggagaggggtggacgaggaggggataaggaagaaggcgtgcacgcggttgccgatgctgaggagataagtaagagagagagagagagcaagagatgtcgggattaaagatatgatctttagtcccgattcgtgataccaactgagactaaagttcgttgggggcctgacagctattgaaccgggactaaaaattatctttagtcccagttggtgttactgatcgggactaaagatcaaaaagtaccgctgggcttttgaaccgggactaaagatcctttagtcccggttcctattcaaaccgggacgaatgtgatttttgccatccgggcaaagatcggttctccagtagtggaatatcgtcagtgaattttcacaaataggtatttttttagtccgcttgtaaaactaaaggggtattcacaaaaatcattttgtactagtgtgatagcccaagatgggtatacagtttcatatctagaaattattaaatttcagaaaaataaaaactaaatgaaaaagctcatggtgttttcagtggtatgttttagttaattctgagtgaaataaacataagtaaaaaactaaagaaatcattgtatttccaatggcatgttataggacagagtatatccaaggtccctaggcaatactatggaaaagcatattggtgtcgatggagaaatcctcatagtttctagattttaatttccagccggcaccccttaggcgggttgatgacaaacatcatcggtgccagttacacaactaacacctatagtgtttatagatgccggttataagtgtccaaaccaacaccaatgattcctaagaacaggcaccgatgcccccggaggcactaaagaagttattagccggctcaattactacaattgcacaaactaaatcctaatcacaagtgctatcgtatcagttcatcacatcccagaatcccatgttcattcattcacaagtgaacagaagaaaaatcacaaatctaacttaaaacaaaaaaaaaaaatcaaatttggctaccctacaatcacatctcaaacaaccactgtggatagaccggtcatccccttcactgcaatcggcaacggagagtggtgaacgatgtattccctccgtacgtgctcagccattcaactaaactataggtctatgcgtaggcgagtgtgttcgtggtgatgaaaattatggcgatcggggctctaattgttgttgtggcagccgacccgactttaccaatctttgtatatgttggattgactgcattcccagtacctcccacacccctagacatacctagttcgatcgatcaagcttagctctaatcaggtctttactgtgtatcatatcttgtgtgtgctatatgttttggaatacaggcaaagtacatgaatgttcgttgtgtttggggtccttgagcatggcctctcaacaccagcaccgaccttcgactcggccccctcgctaagtacaatcatgttatcagctttaccaattgtccagtggattatacggaaatccaatgtatctctaacagctccatttccaatgcccactattccaatgttaattaaacgatgaagctagctatagtattacgtcatgaacaacatgaactctaacttgcaaaaggcatgctgcacatggcaagatagagcttgttgtggccctcctttaacacttgcatatcttagaaattaattctcttgaaactatttcatcgtatagtgaggggtgtgtaacaaggagaggtagactatatatgtttctggatatagtttgacggtgtttttcgattagctttagggcatctaaaaatgatgagaaataagcacagacaggagttaggcgcatgaactgcaccaactactaatgatctagttgatgtatggatgtaaaaatgggacaacatttagagcacatcagtaaattgattttcgtaagagggcctaggccgaacactgctagggaacttatctttaatctcagtttgtaaccccttttgtcccgggttacaaaccggaacatccaatccgggactaagttgaaataatcgggactataggtctatgcgtaggcgagtgtgttcgtagtgacgaaaattatgacgatcggggctctaatcgttgttgtgtcagccgacccgactccaccaatttttgtatatattggatcgactgcactcccagtaactcccacccatagacccagtttgatcgatcaagctagctctaatcaggtctttactgtgtatcatatcttgtgtgctacatgttttggaatgcaggcaaagtacatgtatgttcgttgtgtttggggtccttgagcacgggatgcatagatcatttatataggtgcaggtatggataactgacttgtagagactaaatcgaattccattattgaaaaaaaaagcatggacatctcactaaattaacctttgcctacctcgcaaaaaaaacaatttaattaactttttctagctgaaacaagattggggctaacaatgtgagcggaactgagcccttataacctgccctttttattgcattggatcgagccataaatgcaatcttttccactcgccttgagtcaccataacctccgcacaattgttatatacttacccctcctatcctctcctcccaaatattagaatagcaaatttgtacgcaggccattttgatttggaaccctattacaatttaattgttggtaggggtaacaaaacaaacacctccgttaaaacattgatttgccaaaatattgatgttgtccacaattcttataggcacactccaaacctaccttttcaactctatcttactaaaattttgatagtaccaaatcttacccaaactttgacattaccaaagctgtggtaggacatcaaactaaaagtctccgtagttacatatgttcaaagtctagtggatgacgaaaaagacagactagctagcaataatagacatgcatatatattagagcttgttcgcttcatcaaaccgggactgagtggcatcacgagtgcggctaacaagatattcgaatagcatggattggaatggccagcaagatggtttggacaattctttcacctatggggacgttctatatcaagcccatgctcctcctctgtactagctagcatgaattgcatatcgatcaaaaaatagagggactagttttcaatctgtcatatagaagcaccaatctcaatgctcaaaccatcaaaaacttcttggccttatgagcagggtggggttggaattgctcccttactcacgtcctgtgtagctaagtttcaagttttcaacgttactggatcagtttcttctaccattattatttcaaccctatgtatgaaaaactatttgctactataaattctattagattattcattctaaagatgacaaaatcttttataacaaaatttgatttttttgttagataattataacaaaatttggttattgatgaatgtccactaatattttttttcaacaatatctgcatgtacaatttttgcgcataactttctatatataaactttatgcatgcaaattatttatgtacaaacaattgagaaaaaaaaccatatgaaaagttgtcgttattttcagtccacaaatcatagaggctaagatcaaatttgacgttaatattcggtccaaaggctaaagatcaaaatcggtgttatttagatccacaaatgatcatggaggatagattcaaggcattgctgcatgcatgcttgattctttgagggcattcataggcaacccggaaagcctgtaacaaaaatcagatttaatgccacgcgctaaaaaaaagaagaaggaaaggccggtgatcacgcgcgactccctgattgatgctcgggtgatcgctaagagagcccgcaatggtaaagtaaggtgctatttataaaacatgtacatctcagcaatagactagattaatagtaaaccacttcaatggtatgtctacatgggtatctatagctctctaatccattgccttatttttctctatagactatctccatgttagtagatagctttgctctctctcttcatttaatctcttccaaataggaaaatatgctgacatggatctcttatagagagcttatagataactattgtgggtgccctaactagccttttcgttatgaacggttaacgaaataatccatttagagcaaatttaatagtataactaactactagctccaatttatctatagccaatctaataactcattcatacaatagttacatactacactattaatacctggtcccaactgtcatacatacatcgcatcttggagtccgtgttgcagctggctataaatctatagcccccctcctcttctctctccttatttatttccttaaaatatgtttgcagttggtttatagcttgctattgtacctactcttatcctgactggaacggcggcggcggctccttgggttcgctatcggaaacgagagtgcctcaacgcactcacgaatagtcccggccggcaaggggcaaatgtatttccaaccttgtgttaaaatgtccagttttactcttccacttttatattttactcgctccgtccgaaaatataagcactttttaacttcgacacagtcttcgagatgcttctttaactaacaatacctataaaagtaagatggtttaaataaaaagagttgcatattaggataatttatttaatgataaatctaacatcaaatttacatgattgattatttttaatttctttttgctattagtagtcaagatttaaaaacttggcactattctaaaaatacttatattttgagacgggggaggactagttatgtggagctaacagtgggcggtggtggtatagcaccgccgcatggaacaactaagggagtaaagattagacaattataccccttcttagtttggaccaacgggcgctctcatcttgtgctcggtgaggggcagaaggcggattttgcactaggccccctctgcaacctccatcctcaacaatcgtgctcaactctccaaactctgtccggcatggcctctcggcaccagcagcggcctacggctcagctcactcactaagcacgaaattatgttattagttgtgccaggtttcaaggggatcctacatgaattctccctctgcgtaacagctacatttccgacgcctactattcccatgttaaaatggagctagtattatgtcgagtactctataaactcttgcccctcgttttaccacttgtaagttgtatctctgcatatcctctctggttttttttttaatcaagcatatcctttttttgaaatctgtttcatcgtatagtgtgggttgtgtaacaaggagaggatttgggcagtggctctgatatggagtatatagcttcagggggtttcggctagcttcaaaggatctgaaaaaaatgatgagaaataagcacagatgggagataaaggtgcatgatctaatcgcaccaactgcatattaatcagctagctgatggatagatgtaaagacgagacaatatttccaccgatctaagtaggtggtactagagcctgaaatctgggcatctaattaaatgaaaattgatcttgagatctttgaggtgttattaccgattgcaaattagtaggtttttcatgcaaaaaataataatatcagggaacaaagagatgttccatgtaaaaagaaaaaaggtttaaacaagacaagtctttttcttgctactgctcaatgatagattgaacagagaacaaatatgctgagaaggaaaaaaaattgtgaggctggattgcaattgtgttatgtgtgatcttaatcaagaagaaactcttgaacacatcttattcaggttcccttttgcacagcaatgctgggatctctggctctctgccctacaagattgaggaatgtatcagtccaagaggcacttgaagatttgagaatcaagttgcaagtccccttctatatggaactcataatcgcaatggcatggagcttttggctaccaagaaacaacaaaatctttagaaacatcactccccatttctcagtctgtcaagatcgttttagtcaagaatttacgatggttattttttttgaggagaacgacggcaggagatctgccggaatttaacattagaagagaaaaattacaaagtagcacagagattcagaggttacaagccaaggaatggaaagagaattacagctgcaggaaaagctaaaaaaaattcatgggggtttaaaggccaagctgcgcatatcaatagcttgcttgataaaataagctacttcaatctctgaacaggaagagttttggaaaattcttctatttctttccaaccaaatattccaccaagtagttagaagagttcctctgaccagctgcacatccttcttagagcctgcaaatttggttctagaccaccatgttgacacatccaggacaggatttattccgaccgaagacaagttttggaattgacaaattagggtccacacttttctgacaaacacacagtaactgaacaaatgatttgtatcttcaaaggcacaaccacaaaggcaacatatccaattgcaaggccaatgcctgcggagcagattttgggcagtcaaagttttttgatggagaactagccaaccaaagaattttatttttggttcagtcggggatttccatagagaatcaaactcattggtggcaaatgagccttcgaactggaaaaggtaagcactctttgttgtgtagacgccagactcggtccaattcaaggtgatgttgtcaggatcctgggaaagcgaaaccagttggagtaatccaccaagctgtaccaaatcatggatttgttccacggaagtgaattgtctgaaggaagtgagccatctattatctcgcatttccatctgaactgatctttgctttctctttgccaggctaaaacaactgggcacaatatcttttaaacaacggttttggatccaattatcatgccagaagctagtttttgctccgtcaccaatcgttattgtcgttgccgcttgaaagagtcttgtgtccatctcatcacaaggcacattcatgcctacccagggtttatcaacttctttccacttgaaccagagccagcggagtcggagtgctctagagaacctgtccagatccggaaggcctaaccctcctaagcttttcggtttgcaaacagtttgccaattgactagactatcacttggatttgaatgatcagggtcttcgcccttccacagaaaagatcttctgaaacggtcgattcttttgaagacccattttggcgcatgaaggactgtaagatgatgcatcggcatagcactaagaaccgagttaactagggtttggtgacctgcagaggtaaagaagcgacctttccaagctggtagtctggccccgatcttgtctataagaggaaggaaatcaattttccttaatttcctgaagtggagcgggaggcctaggtagcggcaagggaaattcttgatctgccctggccaaccggcaagaagctgttgcatgtcgattccattgcaactgatggggaaaatctcagttttgttgatgttagaatgtaaaccagaaatttgtgcaaaacacgaaaggatgcgagaaagagcattcaggtcatcgggatttgggagagcaaaaactgccacatcatccacgtagagagaacatctgaatatgccacttctcacaccaatcagggctaacacattggcactctccgctgctttaatgatccggtgaaaaggctccatagctacaataaacaacatcggggacaggggatctccctgacggagtcccttagcatgattaattctcatccctggggaaccatttaggagcacctgggacgaggaggtggaaaacagattagagatccaatttaaccaatgatgtccaaagccgaaatgacgaaggacctccaggagatatggccaattcacagtgtcgaatgcctttgctatgtctatcttaatgaatagactctgtttttttgatctatgaagcatctgcaccatgttttggacgtacagaaaattgtcatgaattgcccttttatgaacaaaagcactttgattttgtgagatcatttcatttagtcgaggagcaagtctatttgccaaaattttggtgataatcttgacgaagctatgcatgagactaatgggacggaagtgatcagcgcctgtagcatcatcttttttagggataaggcaaataaaggctgggttcagttctgcaagttgagaagtgttgagatgcataaaggataaaattgttgtgaggagatcatctttcaccgtggtccaagcggttttgaaaaatgccccaatgaagccgtcgggaccaggcgccttttcagggggcaaatcaaaaattatggattttaattcttcctccgtaatatcttcttctagctcattaaggtccaacgaaggtaaatgtaataaatgtaatagagaccaatttagacttaaagttctttggaaattggtccccaatctctccttgaaaaatctaaaaagttcttcttccttgtcttgtgccgaaacagccactcctgacggggtttgaagcgaatgaatgtagtttttccttcttcttgtgtttgctttgatgtggaagaatttggaatttacgatggttatctatagagcaaaagctatatatcttcctcttatctcacgatggctaaacaacttgtaaataactctgttttttttccctacagttttgttgatatttataacattgcaccgtaggaatgtttcatacagtatttgcgttaaagaaagtgctaccaagaaaatctattatgagaaaaggagtgaaacacccttgagcagctagctagcgctatactgctgtagtgctcttcacttattccctgatttccagaaccaaaacggcaaaaccctggttccagattttcatcgaaaacaagaagctgttctgctcaaggcaatttcatacgagcaccactcacaggtcacacaatcttggattcttggtgcagcaagtttagttcagaatcttcagaacagtacatcctgttcagaacagtacatctttggtcgctcacttcgccttcgatggctccggcaggaatggatggatgaagataaaccatggaagggctcaaatctaccatgtgatgagaccgataagcaactcttcagggcctcaacgatcatatccttagggaacggaggaaaagccaaattctggcatgacaggtggctacagggatcctcaccaaaggaattaacgccttccctctactagttggtgactagaaaaaacagaacagtagcacaggagttacaggataacagatggcttagacctatgaggaggatgaactcgactacccaagtaagagagttcattctcctttggggtttaatccaacaagtccacctggatgaaagcgcaacagactccatcacctggaaatggacgccgaatggggcatactcagctagctcggcatacaaaatccaattcctaggtagcatacaggacaacagagcaaatttcttctggaaggcaaagacagaaaacaaatgtaggtttttcgcttggcttatggtacataaaaaaaaatcctaacctctgacaaactccagctaaggggatgggataacagcccgatatgctccctatgcggcattgaactcgagacggctaggcaccttatcatggaatgtgctttcgcaaagcaggtttggagctcaatttggtccaagctgggcctacaaatgccgaccacaagcctcttcaatggagatatcttggcatggtgggattcttgtaggaaaaaaattgtcaaagagcaaaggcgaaacctagatggcctcatcatttacacgacatggggaatttggttgcaaagaaacagcaggatctttcatggcacctacaacacggtctcacaagtggtggagtcaattatacaattgtgcaagtcctttgatgaagctcatgtcacttagatgattttcagacgtattttgatgcttgttgccttacattccctaaaaattgcctgtcttccccgccaaatgtcgacgggatctagacccattaacttgttaggggttgtttgtactcttgctttctctccttaaatgaaattggcagagctcatgccctttcccctcaaaaaaaattgtgttgttcctgatctttttcaattccaccatgtgcagtctagctatcctcacattctgcttcattgcacttcaatccaatgagcaacatttaccgaaacatatagacagatcacccccctcaacttccaaagttcacatgcacaattgttccttagatagagcatgttatatgcttcatatttaattttctcccaaattaatttttcaattccacaagattaactgcatcactggacaacgtgcatcagccaaattggaggaagaattgaatagcttggcgctcatcaccgaaatacaaccacgaatttgtccccgtgttttctggccgacgtcttcgcctagcaatcctatgcgtgccaagccacatcccacatctgttcaagttcatcccagaacaaggccagtcgccggcggtccaaagattgatgtcatggcagaagaccggagcgacggccaaagctctgggaagctgtccaacgattgatgccatggcagaagaccgacgtgtgcgcttctttatctgctctagcgtcgagtgagatgtcgcaaggatgataagcactaggccactctacggggtcccgttctgtgctcaaagaatcccatcagtttggcacggcgagacgtctggctgaagccttttagtctggttgagctgatactttgattcccagcgcctcctagtcccattaatattagaataacattgtgtgtacactctcatctttcttctcttcatgtcatctactatggattttcttgtatcctatgtgttgaaacaaattatcccaacgagataaggaccctcctctttgtgagagggagtcattgctagtgtagagtagggaggagagggggaaactgaagatgacagtggattgagtatagaatgaatggagatctccacctttacctctcggggttctttttattcatatgtaacgagaaattacataattgcccttaactctattctgtacattagagtggcattgttctagaaacattttagtccgttatatatactagagtgagctcgcgcgctacgctgcgcggtattgtagcatgtaagactgtaacacatagaaagaaatatacgattaatgcaaaggtttgtctaagtggattacctactaacaatactcaattcctagtgtacctaccaagaacattatttaacctgaatagtttttttaataacttaagttcccagaaacagttctagatagttaataatttaaaaaataatttcacaataatttcacaatacatagcagggatgacaagcatactatgattcatccaatatctatgggcacaagatgcaattcgttctgtcaactaactgaaaaaggtacatggttaaatttctcgtaattttgtttgcgagaactgcagtattaagataatacctgtaaactctagaactggccaaaaacccagtcagatgagacaacagtagtgcatttatcaattatggtatgaaaaaacgactacatttcagattcattagttttacgaagagacttgactcttcactatgagagctttctgtgcaagaaacatatctgcctcagcaatttagtcaatttagatcaccaaatgcaatggcaatcatctgctaaaatcatttcttgaacactaagaaaaatatgtgccaagttaaatcattcttaagttaatagtttggagaattaactcagcatattgaaagatgttactaagtcagtagaactcaaagtttggagaattaagtcagcacatggagagatgttaccgagacagtagaagaaacgtcaaattaatgaacaaatcctcatttcagtcaatgttatgttactaatcaaagcagtggactcttaaaacagccatgtaaaggaacttaaatataaaggttcctgaaaagagacatctaaatgcaacaagtaatgtatccactgtgaatcaatggacgatgtaaatgtaagaaacaaatatacatcacctaccaaactagtatgagagtcttgaatatttgtatttttctcttagatgcccctcgtattctagtatagctaaggcagttgttgttgacaaagatgatggatctacctgccttacagtatttcgaaaagaaaagatcatcatggttaacacatgtgtagggataattccataggtatttcaaatggttttccagctaagcatgagcttcaatcttgttacagtccttgaggagaatctatatgatattatgaaatataaaaaagtgagtgaagtacatcaattatgcaagtgagaaaaagcagtaactactacatcagtgcaggaaacaacaattattcaagtgtgggattgaatcatcactgcagcatgatttttagcttggaaacagctttggcagtgttatggtggcagaacaccaatgtaagagctatatctgcacaggctatggagaccatactgtttgcgctttgcagcactcaattggcttagttagtttggtgggcaaaagagttgaatcggagtgctccaacctaacacagcttagccttcagagatgaagaccacagcacagtcttcagagactaagatcagctcatacaaaagcattaatcgttgctgcacatggagtatttttcctgtatggttcagaaaattatcaattggagtgctctttctttttttttgtcaaaatggtaatacatatacaacacaacaatttactaattacatataatcaatgaataaaaataaataattggaaggattaacttttcttttctctaaggagaacatcagagagcaaagcacatgaaggatctcttctgcctatttaccttgtatttgtttgtcatttatatgctggcagctccattcctgaagatccatgagctgagcatagtggattgcccctcccaacattagcatgaattatcatgaagtctagccgtctgtttacctgtatgctgaaaaacaccaaataatttgtttaaaaagattctgctaaacttgtttcaatcctaagctggccaccttgacctttatttggagttcagttttggacaacaaagtagtggcatactgacatgcttaaaatacaggaacagaaaaatgaatagaatctcattcgcaggagaggatgagagtaattgtaacttctgtcaccaatcaaaagtttagaacattaaaagccctaatggaaggaacctattaatgtgagaactcatcctaataaaacatctatgttgccagggaatcaacaggtttcagggaagctcaccagttcctgtcttgcctcatcacatcaactctctttccatcagagggtagaggaattggctcagagttcaaattatcagaaggcaaaattaaaaaaatagagagaaatctcgaggcaccaatattcggaaatgtattgggttctatccgaatcttgaaacgaacttcgcaaacaaacatctgataaatttagcctaaattcagaaccacttgaatctatgttagatgagagataagagaagggagactgtaccggaggagaataggtagatcgtacaccgatttctgccattgcggaaatggctgcgtcagctagcaacaccgtcgggcaagtcgctgaggaagaactgaaagatccactccccgcccgccatctgtgctagcagtgagccaccgagttgacctgatgccgaagaagaaggcgacgttgcgatgccatgtgggacgccgatgctgaggacgggatggggagtatgtgatgccattcaagctcgctgtacgtgcagctacagtgaagaacaaaaatattgggaagagatgcggatgcggagaggacgaggacgacgagcggatgcggagaagtggaaggagcaatgtggatggctcggcgggcagcaaaaccacgtctcggtaagggttggccgcgcaacttagaaggtagaaaacaaaaaaacaaattcagttagcatagacatggtcggaagaacgtcgacatcacaatgggaaaacctagagcaaggcacaacgggaaaagatcagagcgtacgggatgatgcgattagggaaagtactgtctcgaaaaaaaaacagaggaacaccatatataggaaatcaagcgaacagacatccagtgacataaccatctcagtttatctatataccatagcaccacacgtgtaatgaactcaacgtccatccccgtgataaaaccagctgatcttatatacctcagtgagcagtagctgagggaggcaaagatgcccccctccctccccccaaaacaagatgcgatgtggaagagacaccaatccaagagcacagcctggaagggaaaaaacacccaaaaaaaacagtgagcacacgcatggctggaacaacattggcatcgcaatgggggaaatcgagagcgagacgcagcaagaaagatcagagcagtagagacgatgcgattagggaaactaccggttgaaaatccccaagaacttagggtgtgtttggataatgggaaatgggggttgggattgggattgggaaatgaatgaagggttaggattaaatgaaagagggagaatgaatagctaggatttaaagatatcttttaatggatgggaaaaacagggcctaagcgggaggagcaaggaatagaaccggcgtcatatatggaagaaagaagggagcgatgcagattacctcccttggtcctcatggggttctctgcgtagtggagcagcgagcagcagccaacccgttgccgccgtacactatggcagagcagcagccaaccccatcgccactgtactccatggcagagcactaccgtggagattgagagaggggccaccatgtggggctgggccgctgggcgttggaggcgtccctgatggctggataaggacgacacgcgtcgagaggatagaggcgactcgcagatggatcagcgcacaggaaatccaggacggtggaagaccacggcaccgatgctgcgatgaccactaaaaggccgtcgaccactgggctaagaaatcagttggcccatggaaggataagctagcctggtagctgatccactgtaaccaaacaacgtggcaagattatattggatgccggttgcctaaatcgcccggagaccagctaatccagcacctttaagatatctaatatatattagactagttaagacaacaccctacgaatagggtttatccccaaacattatgctggactttttttcatgtacattgctgacattatggtaggcattcagagactaaaatgtaatcttcttcctgattaaaaaaaaaagttgcgagcacatggcggcctggtcttttcagatcattcatcggattattaaaatcatgatttgctacatgctttaagaatatgtttcgtaagaaattttcttgtacagcattgattagacttgttagtttatttcttaaaatatccaatctgtttctataattaaacagataatatgtggtaacaatctgtttaattaataatgtaaatcaaattagagcctatgtatctcaaagaactgagccttaacttctggaaacaatcatgagctgtacaagtttgtcatctattttattattttaatatgatatatgagaaacaaatttattatattaacatatattttatttctgattttacccttacaaaatttctactgcccgtactacagtgatacagtcaatgtagtcgatctaatagaatttgatccattagattcaaagaaatggatggctcataaccatttgagggtagagtaaactaaaaatctctacaacagccaaggcaccaaatgtatgtccctcctggtcgatcaggatatgcagtgctcagcaccaaatgtaacttgcagagttgtgttcactgtcgtcgagcatacacacacatacatacagccatacaggacagcggagagcagagcgctcaacttgatggcacaagtactaccgcagccgaggctacacaccatgttaggccttgttcttgctcgtttaatccgtcctacaaggaaattgcggaagattcgaaggggaataatttcacatctattcaggtgtagaattaatctctcaatccccttcactttcactcttttgaggatgaaccgaacaacctcttagcaacagggttttaaatgtcccgctatagctgccgctatcttccgctatagctgtttgagaagggttctagctatttgttctcatatacattttagccgctatagctccatttagttcgctatagctaccgatatagctgtttgagaagccaatcgctaaatgccttaccccgctatttaaatcattgcttagcagggggagaagccatgtgtacccggtcatcgtagtggatgcatgccatttccccgaacaacgaccaagcttgaatagactagccatccatcgatccacgccatggaagagagggcagaggagtagtgcgcgtacgcttcccttccagcgtccagcgcggctcttctgggatgtcatgcattgccacccaaccagctgacaaatacagcctagatgagccattcccttgggcacaacaagcatcttactagcagccgattggtttggttttggtggtgcttcgattcccagtgactcctaatccccattgatcatcgacaaaagatttgagtgctatatatgcacatgtgtgtgtacaaatgtagtacatgatcagtgttttttttttgccttatttttcccctcttctcctttcaggctggtgtactagaattttgttggatcgcatggactacatgtctggtttgcttggtttcttatatattcgggatgggaggagaggatcaaattaagagcaggtataggccacaagggtgagtgatattgaaagctgtggcaattaatcaaggtttgtcccagtactgtcgttgttagtaaccattgtatccgatcaactgcattccttttgtctactagacctagtttgatcaagcgagctctaattaggtgtaattaagctatgtggcacatgtagtgtgcatatttggactactgcagagttcagagttcagagtgcaggctgcagtgtcatgcacgcacagtccttggggttggggagcttggcataggcagtcatttataggaataagttcatcaaacgaatccgatttttgtctttaaagcccaaaaccaaatacaatatatctcttaactattaaaaccggtgtagataagatccctcagcggtttagatggcagttttgactgacgtggtgcatatgtggctaatttgactgatgtggtattgacgtggcgcttacgtggcaatttcatccgaaaaaataataaaccccatgggacccacatgtcagtttcacatataaattaataaaaaaatggtggggcccatgtggccccacatgtcattatcacccctcctctctaccccatctcccatcgtcttcatctctctcccatctcttcacagggcgcaagcggcggcggcgtcgaggagggcgtcggcggcgcgctcggccccaaggcgcaagcggccgtgactggcggcagcggcgcacgagcgggacatcggcagcgcatggggccccatggcgcaagcgaccgtgactggcggcggcggcgcgggagcggggcctcggcggcgcacggggccacagggcggaagcggcgccatgggacgtctcctccgcctatgccgcgcgcctcccggaggtcgtcgtcggcgccaaaccgcgagtcagacccgaagctgttgctcccatcgagccggcggaggaggagggcacgaacaccgggtagccgaacgcggcgtccgccggcacgcaccgcgcacaccccgtcagccccctcacgtacatgtcccacgccctccccactccccagtgccctcgccggcgccctccacatccagctcagcctgctccccctgctcatgatggttgtttggtttgggttgggttgaagacgatggattttggttggagacgtggagctctcaccggtgaagggtagggctgcctcttatacaaaacaatggtggtagcagccaaagcaagtggatgggctggtcggctggagatcgttgaggtggccaccggcgagcggctgtcccgctggcttcgcgcgccgccgctccggccaccgttgccccactccacccgccgtcccagtccacctgctttgccttgcctttgctctgctccctccaaactccaaattaacagagagaggctctccgctttggaaattttggaggggatggagctccttccccatggaagcagcaacgtctgaggttaggttcctaccatcgtctccccccttccctccatgttatctctagtattagtcaatgcgcataaatctttctcttcccggaaagagttgcccctgcgatgatgatgatttttggcctgacttttggtttctgcttctgttcttcatttttttttcttatctcggtgtgct

SEQ ID NO: 4439 - DNA, 24847 bp, Oryza sativa
caacacgctcctcctccacaacctcctcatgagctcctccccccacggctgcctcccctgcaccacgccggccacggccacggccacgcccattcccattcccactcccacagccgcgcacacaaccccagtactcgcccacccacctccgcgccgccgccgcctccacctgccgccgcctcatccgccacgaccgcgccggccaccacgacaggcgccgcagcgacgtccgcgccgggagcggacgacgacgcgtggggcttcctcctgcgacgtgagccgccggaggcggggctcctgcaagacgtcctgcacgggttctacccgaccaggcggccgcacgacgacgcggggccggcgccgaagctggagcggccgtacgaggcgacgtcgtcgtaccgcgtgtcctccccctggggcgccgtcgaggactgcgacgacggcgacggcgacggcgacgacgactaccgcgggttcccgatgatgccgcaggggctcctcgaggacgtgatccagtgcccgccctacatggaggtcttggcggcgccgtcggccgccgtcggccgcgtcagccgcaggggctgagccgaaccggcgacgtcgagatctccgccgcgcgcagccgctcatggcgcgcgtgcatgcatgcgtcaatgcgggcgcattttgcttcgctatcctttgttactatctgcatcttctctaatcttgctgagattacggtggtgttctgtgtactagtttaacttgggatgattgatatcttggctagtactaattccatgcatggccttcttgaaacttgatcttgttgaaaaaatgaatcttgatcttattgaacaattaattcaatcttaatgaaaaaaaatctcgctcattagcatgcatgcatcaacagctagtttgctcatgcacagggagatttttcacaaccagtttgttgtttgcatagtgccatagttcgattaaaaccttttcaactttcagctcttttttgctaaaaaaaattcagctctgatatgatcgaaagctctttaatgccctgcacgtaaaagcagggatgggttatactaattgatggcccttattacatgcacaatctcatggttatttcatcagtgtgggttttcaaccacgtttcaacaaattactagtactacgaaattattatattgccgttttcaattaatagcaacgagcaaatgccatcgtagatcaattctttgaaaaaccgtcgtatagattgactagcaatcataaaaatgttgtgaaacatggggcattgttatagtcaaatctatatcagcacttttactttgaagcgcattatacagtcctactatgccacatccatccatcagtgagctcggcttcttaccaaacgacaagcagcagttgtaactttatatgcacgagttaaatgtaagttgtactcccttggttggacgagttatatctcggttggagtaccaactaaactgaggacacccacaatggttatttataggctctctataagagatccatgcccgcatattttcttacttggaagagattaaatgaagagagagagagagcaaagctatctactaacctggagatagtctatagagaaaaacgaggcaatgtattagagagctatagatacccatgtagatatactactattgaggtggtttactattaatctagtctattgctgagatgtacatgttttatagatagcaccttactttaccattgtgggttctctgagggtgtgtttagttcacgccaaacggaaaagttgaaagtttttgtgtgtagaaaagtttggtgggaactaaacttggcctgaacacaaaaaacgattcaaaggtaaatagtgacataacgaataaaaagagatttttgtaaaaccatctattattccagtatggaactaaggccttgtttagttactaattttttttcttaaaaacatgacatagaatctttgaatacatgtatggggcattaaatatagataaaaagaaaaaaaattaattgtacattttgcattaaaaagtgagacgaatcgtttgagcttaattagtccatgattagttataagtgctacagtaacccacatgtgctaatgatggattaattaggcttaataaatttatctcgcggttttcagacaagttatgtaattagtttttttcattcgtgtccgaaaaccccttccgatatccggtcaaacgtccgatgtgacaacaaaaatttcttttcgtgaactaaatggggcctaatatttcagtcacaacttaatgctttagattatcttcgtgacgcgacaaggttgcaattgcaagtactagccactaatagtgacatttcaatcagttgtaactttatatgcacgagttaaatgtaagttgtactcccttggttggacgagttatatctcggttggagtaccagctaaactgagggtgtgtttagttcacgtcaaacggaaaagctgaaagtttatatgtgtagaaaagtttagatgtgatggaaaagttgaaagtttaaaaaaaaaacttaggaactaaacttggcctgaacacaaaaaccgattcaaaggtaaatagtgacataacgaataaaaagagaattttgtaaaaccatctattattcgagtatgaaactaaggccttatttagttcctaaatttttttttcttaaaaacatgacatagtaatcccatggcatttcttgactctctacgcaaacgtgcgtagtcattgtgtttcttatgccatgtcttctttcatcttatcgtgcaagcctagtatggtggtgtttaaatctcctggagatgaaaatgaggataaagatttaagtgtttcacataaaatgatgtgataataatgtgtaactatttgggttttaattattacaaacttaaaaaatatattaatctgatattttagaacaacttttatataaaaagttttcacacgaaacacaccgcttagcagtttgaaaagtgtgtcacgagtatctaaattttcatccacctattacagaagaaactaacgggacaaaccatactcgctctttcagtccgctccttacatggctttgactctagcaagtgaccatgttatgttgcctttttccacattttcatcaagttgcaaagccagtgccgccgtcaaggccggtgaggcggtgactaatagcgtttgttagttactgactattttttcatacgtcgacaacaatcaacagagcaatagtggatacaaagctagagatggagctcgagcagttgcctgatccacctgagaggtgaacccgccatcgtttctgcctatgtggtggctcactatagaattggatgcaatcccatactttgcagcgggatatctagttaagaatggttgctaaacatatggcaaactaaatgtggtagaaattttagagattaaaaggtgggttgaaaagaaaatgaggtgggagtctatttgggcctatcttctagtttaggcctcactagttgttcctgtagacctaataatctaacagttgatgtttgagggacacattgatcaagcgactaaaatatgttgatgctgtggttcaacatggacaaaccaacaatatgaataatttctatgcttaagttcgatgatcggcctgctaatagttgtagccaaaatcggcttgagctggcccagttgggctagactagtagttcggccatgtttaggtctaaagtttttttttaaaatttttaattttccatcacatcaaatctttcatacacatatgatttttcagtcacatcgttccaatttcaaccaaattttcaaacttcagcgtgaactaaacttcgttgagcaattgagctcgatggaatggaatcgaagaacacgcacgcacgcgattctcgcagtacggccgcggggccccggcccggcgtctggttcattctctgcgcgtgcgcgcaaggatagagaggcgatatgtgtgatcgagctgagcagagtcgtcgcagtctgcatgcggccggtgataaatttcttgttcccttggtgcatgcgtgctgcatcttgcatgctgcgggcgcggattccggagttggtgcttcgctagctagccaaatctcccgtcacccctggcccaaatcaagcggttcaattgtcaattgccctgtcgaccaatccgtcgccaggaagacgtgagcaccggtggttaacagtgcaaagccggcgccaaacgataggtgcagacgtgcagcggagtactcctatctcggatgtcgttgttgtcgcggcggtgagccggcggcaacgcaggatgtgagggtaattaagaccgaacggttctgttgctgggagaggggagagagagagagagagagagggatagtatagcacgtctggattcgcgcgagagttcataacgctgtgcaggggcgcctggaacactgcatgtgtggcgctttccatcgacgatcttcgatggcgtattgtgcgggtatgatgggtatgatgggttgctgtgggttcaagtgaaaaaaccttgcttggccttatagcaagctgtgcgcaccggcgccggagaggtgtatgatcgacgagctcaccgaagaatggcacgtacataaacaagttcaaaccccccttgtaagcttgttgtacacttgtttgtactactattccactccagatacgtatagtacgtattattgtagattccagtacacgtattagtacgtattattgtacgcgcagcgtctcccgagtactaatacccagctaagagcaagtttaatagtatagctgactactggctccaaatgaactatagtctattttatagccaattcagggcctcattgtttgccgtatggcttataagccaaagccaaaatttgaattttaaaacttgatttttaatttgattttgatgctttttcagcacatattttcttagctttggcttttcaatcactacgaacatatatacaaaagttttactggcatatcattttataatcgcttataataagtcattgtcaaccgatggggacctcatacaatagttatctatatacatatactacacaattcgtatctggtcccacatgtcatacacacatgtatcttagagtccgtgctgtagctggctataaatctgtagcccgctgctcttctcttttatcttttatattctcaaaatatatttatagttggctacctgctctaacgggttgaccgccacttttgttgcaccacgcgctatcctacaggacttgcattgcaaaagtcatatcccgattcgtgaagatcttctagtactactactactccagtggtacggtgtagtaacagaaaaaagttcccatcggccatcgctgctacagcctacagcctcctccagctacagacctacagtacagtaggagtactacggtacagcagcggctcctctctcccccgtgccacgcgcatgcacgcatgactgcgcccacacacacacacacacacacaggtcctcacccatcttgtcatccccggcccgccggctggccacactgtgcgcgccactgtactgtccgcgggaagagcatgcgtgcagccgtactggttggttcccagctgctgcatgcatgccgtcgtgacgcgaaaaagggctccttgtcgcgggccgggctccgcgggcgcgcgcacgcacgcacgcacgtcctcctctgcccccgcggccgacgacggcacggcaggctgcacagcgaatccaggcggtggcgcggcagcaggcgctggctactagtaccacccggcacccggccctgcccgccgcgcgcatcccgacgttcgtgtaccgtacgtgcgcattccgctagctgcgcttccggtcgtcgtgccgccccccgcgattgctcgataggaaaacctgtgaatccggccacaacggaggtcggggggtgatctctgttgtgatcatgtcagctgggttgctgatggtccagttcttcacacacacatacacaaataaataatattatatacgtacagaatataattttttttagttgttaagaaagttgatagaattatatgagagaagattataattagatgagaaatgaaggtaggtagaaaaaatgaattgtgtagggttgtgattgattatgaagagaatgttggtaaaaaagttgttatattttttaataaatcttgaaggttaaaagctgttatattttgggacagagatggtactactgaatttgaagttctttgtctctgtcccgtgtaacccagccgtggctgaatatatgcatgcattgtgttctgaaaatcatacgtgccaaggaacacagacgctgccgggctcacaggatctcactgcaccatagcagcaagaatttgatatctcaaatcatggcagagtttgtttggcgctggcagtgcaaagaaaacaaatgcgctgtgccaaagtcagagtccataaattcccaagatatgcatgcatggaccgtgtagtttttttccttttcgcattttgaccgtgtagctcatgcttgggttgctctagcaattttgtgcagggtggtgtccgaacagggaagagaacagagtaggacaaataaactaatcaggcccggccaggccatggaatagaagctggtcagaatagctcgttgggcagggcaggatgcagcagaatgattgcagctggagtatccagaagatgtccccctctgctctcaaaaaggctcctttcttgtgtgtgccttcatcaatgtccatgcttatggctccagtgcacttcattggccaagatttcttcgctatagctgctctcagtaggggtgggcagaataagaccgaaccaaaaaactgaaccaaaaagaccgagatcgagaccgaaaagaccgagaccgagaaattcggttagtgattcggtgccagccatctaaagaccgatttttttcggttaattcggtcatatgcttcagttaaccgaattacccgagaaaatcgaaatttggcccaacaggtgtagtaggcccaataagcccactaaatagaacaaaccctagagggactcagggtggagcagccgagactagagctgctcactgcctccgtgcctcgtatccatcgcgccgcccccagcccccccacgcctctgccttcacctgcatcgcgccacctccgccgtccgcctccagcgccggcgccacctccgcctcggcgccgcctccgcatccactctccagtcagcccacctccaccttggcacctccatcccgccggcaagcaaatccaccaagtcgtcggcttctaaacctaaacctacatgatcttcaccaagttgaacacttttaactatttcccatcttctctgtcaatatttctgaattgtaatcaagttttgttttggttgcttgttttaaaatgtgtttcaggttgctgaaaagtggaggaagaagactaagatgggtacatgtcaagcctaaaacttatttactagttggctgttgctactgcttgatctgtgatgtaatgttatcaacctataacttgtactgtggcagtcgtgactcgtaacttgtgaggttcagacttgagacctatcctgtgataatttggtgcttgatgttgcctattttttggtatttttgtgatatatatgtctgtgaaaaaaagtctaaaaagagggaaaatgttgtcaaaatttttcattcccctcaaatttcggtctgaccgagatcgaaaagaccgagaccgaatttgccggtcataagttttttttatgaaattcggtccggactttccaaagacggaattacccaaataaccgaagaccgagaccgaatttttcagtctgaccgaatgcccacccctagctcccagcgcacacacacatacacagagtgtgtgtgccgtgcgtgtgtgttgtgggcatggcaatggcatgggtgtgactgggttggagtttacgagcaaacacaagacattcaattgcctgcagctgcagcagtgttctagggtttggaaaccaaggacccttgtcacatggtcctgtccctcctatactgtccctataccactcctctgcctacgggtctcactcctgaccctgctggttgtaccaccattgccatactgcttgcagacgtgtactcgatccgtcaggacaaacatactcctacatacagtagttacagtagccgtatgtgtgtgtgcgtacaataccaccagtagtagtacatcagttataactagaaaatcagcgcgccagttggcgcgcatgatttatagcccgtatatattatttttgtgttattaattagcacattgttcataaaaaatatagaaatcaatttaatttctttgaaactcatgcaaaaatcatagttgaatggaattttctgagttccagtttaacataacagatcatattgttgagaaaatcatcaaattttctctttttttccacccatgctattgtttcttcctttgtttttctaaaattataattaagttattaactaattataaaattggtgttggtattttttaaaaaaaacaaagtgtttcacccctcacattatttctacaatattttaacaaatatacatatcatcacattatttctacaatattttaacaaatatacatatcatttttataatatttaacatatacttatcaatatgctccacattaaaaacgggtatcatttgtttattttatgataagtaccgataaaacttcacgtttcattattttctattctttttactcttagtttacttgttgaacaaaatatattaaaaattgtttagtgatcccgtagcaaagcatggagaatcacctagcaatagaaagtggaagggccttgaatcttcgatgattcgtccccttcaccgctcatcgccatcgcggccccgggtcgttggatcctggcattggaactttatttgctgcgttggtgctgggagaaaggcgatggccattagggaagacgacacttgcgagaacaaggattgtcgcgtcggtgctgggagaaaggcgatggccattggggaagacgacacttgcgagaacaaggattgccgtgtcaatgctgggagaaaggcgacaaccgttggggaaaatggcgcttgcgagaacaaggattgtcgcgttggtgctgggagaaaggcatcagccgttgaggaagacaacgcttgcgagaacaaggagaaaaggaggaagatgatggtagcgaaggcaacatcgccctcgtcccttgattgtccaaagctgggtatcctcattgagcccttcttcatccctctctcttcttcctcctggatttggtcgagcttggggtcgtggttattgctaccgtggatggtgaggacgtgctcgacctcgatgctcgttggctggttggcgcatccacactcgcggactatcacagctggtatggctcgacgccctccacttgctccattgagtgagtggatcttgctcgttggcaacagcttccgtggatccggaaaatattgcggtaaatgtcttcctcgttgccgatttacgacagctaacatcggctcgctgtttatatttttttgggaattgctaaaaagttgtcacaagtttttttggcaaaaaaaaacttttaaatgttactgtagtatagttgtagtataactacaatgtaactacactatagttacattgtacataatagtgtaactgtactgtagtaatctctatataagtgatataaagttgcatatagtattttaatacttatatacaagttacaatattgttacggtatagttatagtggaattatattatagttagatttaaaagttgttcctttaaaaaacttgtggcagttttttggatactatttttttcttatccattgtttcctcagcatgcaatctttttcaccagttcttttcgtgttatcgtgtgatttttttcaaccgagtttagaatgctctggattttttcctttgttttatctagactcttcacacacgttcaaaatgaacgtgctcttctggacacgtggcacattttgatgatatgtgaacttggtttttggtttggccacgtggcccaatgatttggtagagtttgcaccctgcaaccagtattttagatttgtgtgcacgcatgttatagtaataatagtatatatagctctatcctattatataattaaaattagcataaatggaaaaaaacagtttgctcgtccacttgtatccctaaccacgtagtgtttgagagcccggcagggtttcccaaaccaccggggtcaggttaccgcgctctagcggtaagcacggttatcgtgtggtaaccgtggcaaaccgtatgaaaccgtataaaatttatcaaaatttcgaagtatattttaaatttatttgaatttaaagaggttatcgtagtttttcttttacagtacactcgcggagtcgcggtaagcgcggtaactctagagcccggcggcggtactgttttgctagcgtaagtaaagggacaacgagaaacaactccgacgcgcccattgtatatttacgtatatcacatgcggtacaagtagctgcacgtatttggggggtacgtatggcagtactgttctccagcacatttgtcgtatgccagttgacatgtctctcagagacaaattaaggagggtcgtagctagccagacacagccacaggcgcggtgtattgcatggtgcagcttttctttttgtggaaaaataggggggtcgtagtgcatcatgccatattgccatgcatcggatgaattgaagatgatggggacgaaaatgcgtgttacatgatgcggcccttgtcgtctcctgcgatcttcatagctagagaatcataactccaagtctccaacgagttgtagctgctaacgatcgagtggtacgaacgaaaaaaaacgatccgccaaaaaaaaaaaacccaacgttgcgtaatgtgattaaacaaaaaaggaatttcagaaaacattgggcctgttcggtaggccaactgctgcggctgcgcacagtgagtgcgacactgttcatgccgactgcgccgcagccgcagccagggcagccggacaggcccattatttgaccgaaattagatcgtataaaaaaaattctaggagagaggttacaggaaatgaaaaactgacagaaattgctgggggatccaactgctgatcacctaagataggaaatggaaaacagtagtagtattgtattgtggacggacaacgactactgaaagtctataactatgaggccagcagtaaactaactctatgaacagtaaaatcataccgtgtgaggggaacagtatttgggagaacttaatttgggccgttacatgtgtaatcggatggtaaaggaagagcctaacgcaactcttgtgaaaacggcacagttgaagccgaatgttatagagagagcacatggcctcgtagaactaacggcccaggatccggtccatgtgggccatttacagattgttgggccttttgagcattaatagatgggctttgagttgtaccagattgggctaaaaacatggggaaaaagtccactttgactcccttaaatatacaccgaatctaattcgtacccatcaaccagaaaaccggttaggacgactcccccaattactaaaaccggtacaaattgactccctaagtggttttagagggtggttttgctgacgtggcatgctgacttggtctgttgtgctgacgtgtcagcccagtcaccaaaatacacatgaggcccacatgtaagtgataggagaaaatataaaaagcgtagggcctacttgtcagccatcttctccctctctattttttcccccaaatcccccaaaaagaaacagtagagcaagcggtcgaggaagccgagtgcgtagttgttgtgcgggcactgcactacacgttgtcgtaggtgtagacgagggtgtggttgttgctgctcagcatcagctctggctcgctcctctcttggtactgtgccgccgcgtcgccggacccggacggccccgctagcggcctcgcgcctggcggcgataggtccggcaagcacttcgccgaccgcttgctcccgaaccgccccggcgctgccgctgctgccggcttgagcgtgcccccgccgcggatgagccggtggattccgaggtccgccaatagcggctccatgtcggcgtcgagcaggatattgctcggccggacgttgccgcacgaacttcttgtcgtggaggaaggccagccctctcgccatgccgcgggcgatgcgtcgtcgctgccgatcctgcgcaccgccagcacggcgccgtcgtccaataccgccatgtacatgatgctgctgcccgccgcgcctaggatgtacgccgacgccttcagtagcgtctccatctccagctccacgtcgccgtccaccgtcaccagcaccgcgccgccgccgccaccgtccttggccttcttgccgccacgtcgtccgtcttggcggcgacgacgccctccttggcggcgaaggacgccgacgtgtcagtcacctcctccgtgtcgtcgctctcgtctctggcactgaactggcgccgcgcacggcaagaattataccatttctcccctcgtcgagtgtacaagaactcctcggcgtgtcgagggacaactccggcgccctcccgatgaccttgaccttggccggcgccggtagccgcatccagcacccgaacttcccaccgctgccgccgccgccactaccggcggcggcggagtgttaacaacatcgcatcaacacggaggtggagctgtaccgccacggcagccgcacccggcacccgatcttcccaccgctgccgccgccgtcacctcactgtaggatacgcgacaggagcgaccgcggcgactggcagctctcgatgccgccgcttcgcccggccttcgcgccggccttctccacccaccgccgcccacggcttcacggcttcgtgcactcccttggcgccttccactccgctccctcgccgccctctgctccgccatccgtgccctcggcaagctctccgcgctactcgccgacgggaagagaaagagagaaataagggagagggagggaggcagaaaggttggaaagagaatgacatgtggaccccacaagtcagtggatcctattataatttttgtgtgtgagtgacaaattggtcccacatatatatttttaaatctaatcttacatcagtgccacgtcaacgccatgtgggacgaagaccaagtcaacaacgccacgtcagcaaaaccgcccttgaaaccgccgagggagtctatttgtaccggttttagtaattgggggagtcatcctaaccggttttctggttgagaggtacgaattagattcggtatacatttaagggtgtcaaagtggactttttccaaaacatggcactcagtccccttccgtgggctaccacaatgcacccgcagctaattaaaggaataagttcactttgtgacccttaaaagtgatcgaaatctaatccgtaaccctaaaccacaaaaccagatatttcgacccccaaactctcaaaaccggtgcaatttgactccctcgacggttttggaaggcggtttcgctgacgtggcgcctacgtggcagtattgactcggtctcctttttcacgtggtgttgacgtggcgtttaggtggcattagaaataaaaaatatgtgtgaaacccatttgtcatttatcaaaagtatggatgggcacactgacatgtagggcccactagctagctcgatcaatataaagagcaaatcatgcattcatcaaatcacatcagattaccacactaatcacgattagtgtaacaatactcacgtacatacactatacaccatgtcgccgcaggccaaatcccaaaggcaaactgcttctcttggtggtcatctccttcctctccgtgttgccatggcacacgctagcaagcggcagcggcaagcccctcgtcactgccatcaccaaggacggcgccaccaagctctacaccatcgccgtcaaggatggccaccccctcgccctcgacctctccggcgagctcgtctggtcgacctgcgatgcctcccactccaccgtcctcccctatgagcgcgagtgcgtggaaatcatcctctcttcatctttatggggcccacataaagcaaggagacggggaggaggaggaagggcggggtcgagccatgggtggtccatcaaattcggtatccgccgccccaatctcttcctccactggctcctccggtcttcctcacgcaccgatttgtgtcgccaccgccggccaactctcgagttcatcgtcttggctacggctggcgtggccgaggaagaggaggagacgacgaagccggcagtggcctcactgagactcggcgacgtctagggcagcgcctaacggtggctggagtgcgtgacggcgatggagcgagcgtggcgctcgagcggcacggggatgggaaagagcaggtcttggggattctctttatataggccggaggggagaaggtcgaccgcacggacggaaaacggcgccggcgacggtggagctccctattgaagacaccggtttaagaaatcgattgagggcgatttagtgcgggattaagcgggatttgttggggaaattgatgcccactacacaaggaaccgatttttctaattaatttagaggagaaacgatagggcagggagatcaatggaggcggcagtgcttgagttttacgggagagatgaacagacgacggacagaggtggaagaagctcctggcgagcggggcccacctgccagcgaacggaagagaaatagaggggaggatgaggagagaatgattttatgtgggccccacatatcagtgggtcccacccatacttttggtgaatgacaattgggtcccacacatattttttatttttaatgccacctaagcgctacgtcaacgtcacgtggaaaggagaccgagtcaatactgccacgtaggcgccacggcagcgaaaccgctctccaaaaccgccgagggagtcaaattgcaccggttttaagagttagggggtcgagatatccggttttatggtttagggtcatagattagatttcgatcaatattgagggtcacaaagtgaacttattccgttatagagagagcacatggcctcgtagaactaacggcccaggatccggtccatgtgggccatctactagattgttgggccctttgagcattaatagatgggctttgagttgtaccagattgggctgaaaacatagcactcagtccccttccgtgggctaccacaatacacccgcagctaattaaaggctgtaatggaccaaatgtccaatggagaccatgtcttgagctgggcctcatccagtcatcctggaccatttcaaccatagcaaagccctactcacagaaggtttttggttttccttatctctcgtgcctttgaatagtcccgatgcatttggattatctatagtgaatttgctgcagaaaagaggtgattgctttgataagatcacagaggctaataatttactattatattcattctagaatataagcatcgttttgctatatacctagatatttcttcataataaatagccagaagcgattatattttggaatggagagaatcacctaaacgtctgcaacggtgcaaaaagaattccgagtcaaagattctttagataaaccacctatactttaatactagtattacttatttgttcagtttagccttcgttaaaaaaaagctgcagttagccatggtttaggagaatacactgaagaaattaaggatgaaattaaggaggcagcagactggcccagctctttacgtactgcaagggcatgttcaccattcaagtgagcaagacatgctatttggcagatatgaatatatgaagcatatcttcagagagctgctagtattattttggtttcatgatagagtagtgcttctactatcattgctcctgaatggatggcaataaaaactgaacaggcagagtacaactaggttggctttgtgttgttttattaatcaccggattatttatttattttacacaagtgacctttttctccttttaatacaatagacttattattgttgtgtactatggctctgcaacgtcgcacaggacttggatcagactatgtaaccagggcatttatataacgtcagtcgtcagacatggccagcttcactattgctttcctcttgattatgtggcgccctacgcaattagatggagattttgaatttataatgccatgaaaagaaatgaaatgcaaatgtttagttgcacaaaagatagggaaaagaaagcctcaaacaaaaagaaaaggaaatggttgccctgcctttgtagagaagtagattgcaatgatgaacccttgaactccaaagcaagatttcaggtgccattcgcataaactaaaccggcttgagagatgttgagctcagcgtagggaatcagtattataaccaatgatggtctgcagccacactatcatggaagattaatactagattaacatgagggacagaattgacgaccttcaggtgttccattcaatcgtatcactcaagttttcctttcttaattatccacccataatcttcgtgtttgctcgccagatttgcagacagggcgtggcaagctctgataaaactaatgtgtttcagctcattaaccgatgagtttgtccagttaatggctataggaaattaaccatgcgtttctgaacctttgaacagctaggtcaaaccctcggactagtagtagagctcaagccatggagcagtttttaacatggacatttcgttagttatgggagtgcgagctctgaattttcctgaaacggaagaatcttgctgcctctatgtcagaaattcagaaagaggaaaaatcacaagtggcgggcaggcgcttgatccgatacaatggttatggaaataaacgggcagcctcaataattagcttgagccatgactaattgtatatacaatataaccaaacttctaacctgcattttaattcttttttcgaaacaacctgcattccaaatcttcatatttggtagtactagtcatttccaagggcggtatagaaattactagtactttggactcgtctaaccaaccaaacaacaaaaccatacaatttcactcctatgaaaaggcgatctatcttagtataaacacaatattttcttagataatgaaataaacctgatatcaagtgcagatgttcacatgttattttcatttaaacttccatatgggaaaaaaaagggaaaaatatacatttctcttaattaaagtagaacttttatggtcgcagacagtgcgacctttttcctttcgactggagttcagacccaccatttaatttactaattgctgcgtctttaattaagtggtgacaagaattggatagaaaaatttatccagaggtgctccacatccactccatttgatttaacaaacgctaagtagctaacctacctatgtcgcgcctaaccgtagctgctaatgaaaacacgaccaaacgcaaacgtagctaattaatctagctataggttatctgagtaattaacacaatcaatcaatcaatttaatgttggacataaattccttgtgaacaaactgctaaccccactttttgcatacacttgatgacttaattaagattataatggtaaattcagtttcccgtcggaggacgacggcgtctcccgttggcgttggtggccctaggggctgcggtggctctcatcggcaccggcagccctagggactgcgacggaagacgatggcggtttccgtcggcgccggcggcactaggggttgcggcagcccaggacggcggtggctcccgtcggtgccggtggccctagaggctgcggcggaggacggcggcagcttccgttggcgttggtggccctaggggcggtggtggctctcgtcggcgccggcaaccctaggggctacggtggcccaggacggcggcggctctaggggttgcggtggctcaagacggtggcggtctgagcactttggatagtagatccttaggaatccggtaaagtggaagccgatcccgtcggttcgtgtctagttggctagttccgactatacgacgaatgatggtggttgagagtgggcttataagcggcgtgtgacgtcagctcacctgaaactgatgaagatgacacaaatggaggttttcatcaacggtgcactaggggcgacagcgactagtagactttcactcgtcaaatctagctgttttaggagaatatggaagcagaaaagcaggatgtgctgaagtcgtttggttttcttttctattttggttgtgttcttttccttgttgagacgtgagtctaagtactattgtatccttttggctgtgtatatccttcgtggatatagaggccagattaatgaaaatccattattaaaaaaaatggtaaattcagttattgaccactgtatgacaatgatatttccaaaagaaaattatcagggccttcttagaatgcaagatgtttttttctcgattcagaatagaattaaactgatcgatgtgaaagtaactttggcctgcattagaagagaacatttaactagtgatccaaccgagtcctgtatctaggagcccatcatgctcatctgatccccagcaaaaacctgcaagatcctactcatttctgagcccctccatcctgacttttgcatgccactctggtccctgtttcacatgtccccttccaattcaagtcccaaatcctaatcaatacccttgctagcactcatcagagttcatcaatgacagtctggtatatgaatagtttgaattgcaaattcccactccctcgcccttgaatcccagaaaaaaaaacacctcatgttagtgtactaaattagtgaaattcttggcctttcaaaaaaaaaaaacattgttagcaaggctagggagttgccgctgatctctatctctccgagcatgtgttagtggacgcttttcacggatgtgagtgtggtgttgcatgtcgtacacgtaatcggaaaaaacattttgaatacttccattatccaaaaaaaaagattttttttcttttttgcatcttccttgtttggcccttgcttctctctctctctctctcctccccaaccacttgggcatcatgatataagtagagccaccaagaaaccatttccaagggctcacagaaagtcaggggcctagccagccagccaagccagtggttataaccaacctcccagtgaaactttcagaccctcccgttttagcaagtgagagaagccctgcgactctcgctcgctcgctcgcccaagatgaagtttatgaaacttggcacccggcctgacaccttcttctccaacgaatccgtgaggtgtttttttcttgagaaatcctgatttgtggaatcaatcaatcaatcaatcttggcatggtttcagactttcagttcctgggattcttgcctgtcgtctgaggtgattgaatcgtggttgcctgatttttgtgggtgtttgttgtgatgttcacaggtctgtctgcacagaggtcgccactgacctgcaaatcttggtgggtgactgcttgtatcagcttcacaaggtaatgggacatgaaagattgttgttgttttttgtttcgctgtggttctagaacggatcttttctgcaacttttgtgataattagatcgtgaattttaggggaattttggatttggttgcatgtttggattgttttgatatcgaaggatttgttgatgatgtttgtttggaatttgtttttgacagtttcctctgctgtcgaaatgcctgcttctgcaagcgctgtgcgccgagtccggatgcggcggcaatggcggcgacgtgatcgagctcccggggttcccgggcggcgtcgaggcgttcgacgcgtgcgccaagttctgctacggcatcaccgtcacggtgagcgcgcggaacctcgtcccgctccgctgcgccgcggcgcacctcggcatgtcggaggccgccgaccgcggcaacctcgccgccaagctcgacgcgttcctcgcctcctgcctcctccggcgatggaaggacgcgctcgccgtgctcaactcgacgcgccactgcgcgccgctctgcgaggacatcggcctcacctcccggtgcgtggacgccgtcgcggcgctcatcgcgagccccgccgccctcccggcgcactcctcgtcggcgtcgccgtggtgggcgcacgacgtcgccgagctcggggttgacctgttctggcgcatcatggtggccgtcaaggccaccggcgccgtccacgagaagaccgtcggcgacgcgctcaaggcgtacgcgcgccggtggctgcccaacgtcgccaaggacgggatcgtcgtcggcgccgaccagccgttcgacggggtcggcaatggcggcgacggcggcaatgccagcgtcaagcagatcgccacgaggcaccgcctcctcctcgggtaccgagaagatcgtgagcctgatcccggcggagagggacgccgtctcctgcagcttcctcctcaagctcctcaaggcggcgaacatcctcagcgcgtccgccacgtccagggcggagctggtgcggagggtggcgtggcagctcgaggaggccaccgtcggcgatctcctgatcccgtcgctgtcgtgcgtgtccgagacgctgtacgacgtggacgccgtggcggccatcctcgacgagttcgccctgcgccacgccgccgcgccgccgccgccggtggcgctggcagtgagccccgacgacgacgacgacagcccggcgcgttccggcgggcaccggcgctcgcggtcggccgagagcgtcgggttcgacggcgccgcgcggcggtcgtcgtcggccgcgcccgtgtcgcccgacgcgctcgtcagggtgggcaggctggtcgacggcttcttgatcgaggttgccagggaccccaacatgccgctcgacaagttgctcgccatggccgaggccgtcccggacaccgcccgccccgagcacgacggcctctacaaagtcgtcgacacttacctcaaggtgagaatatatttgaataccacaaacattacaaaattctactaatatttaacttgatatcaatcttgttctggttttggatttgaatttgtggttaacttttgtttttgtttttgtttttgggtgacaggtgcactcggagatgagcaagagcgcgaggaagcggctgtgcagggtgatcaactgcaggaagctgtcggacaaggcgtgcgcgcacgcggcgcagaacgagctcctcccgctgcgggtggtggtgcaggtgctcttcttcgagcacgcgcgggcggcggcgatggcgggcggcgcgcacgccgcggccgagctgccgggcagcatcagggcgctgctgcagtccaagtcgtccgggtcggatcaggaggacgacgcggcggaccgcgtggacgagcagcggctgcgcgcgctcgccgcaggcgcgtcccccggggacgactggagcgtggagggcctgcggcgcgcggcgtccaagatcgccacgctgcggatgaagctggaggaggacgacgaccacgacggcggcggcggcgacgacgaggagttcgcgcgcaggcagcaggccgggctggcgcgcagcgcatcgctgcggttcagggcgttctgcgccatcccggcggcgaggccgaagcggatgctcagcaagctgtggccgctggccagaggcgtcaccaccgagcggcattagcgtcgcaaccagtagccattactactaggttttttgtacttcttcttcttgggtgtcttgcttgcattgcttgcccaaggcctgagaatgcaggtttctttgcttgtctcttcttcttgtttctccttttcaattacagtgtcaaggccaagtgtaccttccaggcttccatgtagttgtaatcttttctctctctccgttttttttttgggtgaggcatgtagttgtaagcttaattattaaaaataaataggaactgcacagtttatatacttatgtaaggagtaaggtgaatggatggagtgcaatttacttcatgcacatttcctcaataattttgctgaacatgctgatgcagggaactcatatatcaacgataatcgacattgtattcgcttcgtatctatattcaatgatattcgtttcgtttccattattatagtctaggtttctgtatttgtttatgattccggtatatatgaaaacaaatgtggtagaccgtagaactactgttcattcatatatgagtcgttttcacccctagttagaactattggccaccccaatttcctcttttatagagtatattatttgtgcgaacaaattgttcatgaaaaattatatattaacaaacaagacttttgtgattcaaaggcaccatattttgtagtgttaataaggtaaaaaaataatactaaaaataattgtaccttatggtgtgttcttaaggaccgtaaaaccacttgacaaaatgattttgcaagtatactcgctccattctaaaatataggaatttccaagtgtttagcaaaaattaaggtatagacaaaagattatcttgtagtcactttagtggttaaattttaaactttgagttgacaatatttttctttccaagcatctcattggttgaaaatgtatatatttgtgttcactgaaatcagcatctcttatgacaatagtgcacatcatagttttcatggtacaaatagcaaaagaggccatcaccatgcactatatatatctccctttctttaatgcgcgatcgagaagcaggcctatgattgttatccacttggcttgagaaaaattgcatcctgaagagacccaagagggagagagaaagagagagagaggaacaaagaagcatggaaaatccaggagggaatcaaatgcaccgcggatattattatttcatcttctttttacctgaaagatcccctttgttaggtcttcgcgtgtgtgtaggaggggtatatatgccccggccgcggcatgatgatttggtgatgagacctcgagctcgaaatgttgttgggtcagcaaccactataaacaagaacaggtcagcatgggcagccttttctagccaccctatgatcctttaacttgttgttgctcatcactagcatgcatgggggcaggctcatccacccctggcccccaatgttgcttcaaaggatgtgtcatgtcctagaggaaaatttttcaccagaatatatatacacctcagcaaaacaatcttgtgagatcctatattgctatcatgctagtatggtttatcttttgccccttgaatggtggatgactctctctatgcactactagaaaaagtatttttcccaggcgggggaaatgggtcttcccaggcggacgctggctccgcctatacctcacaatcttcgcaggcaggccggcggtccgcctagtaagaccattatcgtaggcgaactggagctagaggtgccgcctaggaaaatagattcagtgcgccagaaaaaatgtgattgatctgcctgcgaaaataggtacaaaatttttttaaaaaaatgctacaataataatttgtgataaataattttccaaataattaattaattgatgcataaaaaatattagtaactaaaaaacatttgatattaacaaatatacatatattgcataagtgaaaagtgtcgtcaaaatgttacaatatttataacattgtcacttcgaatacactatctaattatattatggcaccgcgttgttccactcccaagattcttgtattcttatcttgtagccaggatgctctctgggtcgaagaactatcctttgatatgacagcactcacggtggatgaagtgacagagatcgcgctgcacatttgtaatgcatgtatcgtcaaagcttgtttgatattctattctaggcagctgcatgcatgaaagaaccacaatatatatattagtaggttctaaatgtgcatttctccaatgcacttatacgttgagtcgagagatttacatcctctgcgttaaccctttatttcccattaaccctgaggaattcgcatgcgtaatacctgcagaggaccgtgcctctagattgcttgtgacacttaatgacatatcatagaaggaaaaagttaaattttgtaattagtaaaacaattggagtacatttactgtgtggactattatatatatatatatatatatatatatatatatatatatatatatatatatatatatatatatatatatatatatatatatatatgtattagcagcttctctcttgtttgaatctgctctccacccttcttcttgtagtagttgttcgaactgtatgaattttttaccgtttcgtattaaggaggagatttaattgtaaaacattaataatagaaatgcaagagtatcagaatcacttataatgtgattctgatactcttgcatttcgtgcgaaactttctatatgaaagttgctctaaaatatcatattaatctattttttaagtttgtaataattaaaagagtaaattgtattggtggtacacaaacttattaagtgggtgcaatttagtatatgaacttgtaaaatgctcgttttggtacacaaacttatctaatccgtgtgaactaggttcaacatggcttgccaaggttaattccacctaggtgatgttaattaggatat

SEQ ID NO: 4440 - DNA, 19185 bp, Oryza sativa
cgtcgccttggcccggtcgccaagtcgcgccgctgcaccggccggcgctcgcctcgccagtcgctagccccgctccatcggcccgaaagagagagagaggagggaggagtgaggatgatatgtggggcccccgtgggtcccaccatttttaattattttatgtgtggaactggcatgtgggtcccacgggtttattattttttgggtcgaattgccacttaagcgccacgtcagtgccatgtcagatgaagaccgagtcaaattagccacataggcgccacgtcagccaaaactgtcctcaaaaccgccgagggacctcatctgcaccggttttaatagttaagggacccgttgtgtctagcggttgagggacgaaaatcgaattcgttgacaagttaagggaccttagatgaacttattcctcatttatatactatgtgcatgtccacggagctactctatcctttcagattataagtcattttaactttgatcgaaatcaaagtgttcaagtttgatccataaaaaaaataataacattctcaatccaagacaaatatattcaattatcgatttaatagaactaatctggtattataaatatactatgtttacgtataaatttagttaaatttaaagtaatttaattttaactaaaattaaaataacttataatctgaaaaggagggagtagtaatgaattaatcgagcgaaaccttggtgtagctgaacataatgcagctgatctggttaatctaagcccatgtggtaactgggcctctttgtttcactggcttgagcccagcacaacacaatgcttatcattattcagcccagacgtccggcgcacacgcaggcagaccaaagagctctgtattgactgcacgtgcataaaggaacattgtgtacacaattagcagggatagttttttttttttaataatggtgtaaacccggcgttaaaaaggcaatgtcaaaacaaaagacaagaacatataaaaagaaaatcgtggatgaaaagatattgtttaggacgtaatcctatttactaaatctctatccataattaataaagattttcaggactatcgcctctagatttcggcatgccaattgaaagttgttcttgtcctcacaaaatggctccgaaacttaatgcagtatgttcctctataaagtactccctctgtttttataatataagggattttgaatttttgcttgtaacgtttgaccactcgtcttattcaaaattttttaaaattattatttattttatttgtgacttactttattatctacaatactttaagtacaattttttatttttttatatttgcaaaaaaaaatttgaataaaatgagtggtaaaacgttacaaacaaaaaactcaaaatcccttatattgtgggacggagggagtacctatatgtaagattaaattaatggtttttgctatttcacttgtgatatacttttgtctcctatctttcactttttatccgtaggatcttgcatcaggattcgtattctcgtatatttaacttatagttataattaattacatagcacttatactcagttacatagcacttacacatagttatgtagcacttgcatttagttgtagtgcattaaaattagaatttagaacattttttctttagacttacgattttttacatgcttatcttctttttgttatttgatttaaaacgggctatatcccattggttaaaaaatatgtacgatttgaagtagcccctttaattaatcggagaattgtcaaacaccaaatcatttgtattgttacaaagagccaggtagcggcatggacagtttagtccttcaggtctacacacaaggcctctttgaatcataggagtgaaaaaacaaaggaatagaaaaagctttttagcttagaatccactccaaccaaccaatcttcaaacatatgagaaatactattacaatttggaccactctccacaaaaatttagcataatttcaataagaaaattatgcaacgacgtttactcgggttccagttccgtctctagctagattatctttagtaaaaacaacgcctttatgtaaatactgcatcaaaaatcatgattttaagcagcgtctgcaatttccacatagccctattcatctctatgtaaccattattaataactgctccatagcggacgagttatgttcaaagtaatcgtaacaagggccacccgttttttcattgtcgcacgctggcatccgaacccagactactcattcttgataatgtaggatcaaatcattccccatgcatcctaatcccaggggtcgttcgatcgagctaataggtctaaaatctgtaagctgtgtagcaatatacattgtgtatgtcactttagaatgcagaccaaccttgggtgtgtgtatataatttatatacagctagttttaactaattaaccttttcttgctgaaacgagattttggctgatctgatctgatccaatcaggtgtggtaactggtaactaggccttttcattgcattggctatagctcgagcccaacacagcaaaattgcatatcaccatcattcagaaccagacatattaacacactggcagaggaaaggcccctgtctagtagactgcaacaaacatgcatgaaagccatgaaggcaatagctacgcatacttgcaacaatttattttcctggattgatacgtgcatgaattaaatgtgctagtacagcctaagcacggtcttgatgatatatacggaacgccccccaaatacacatatctttcctacacggctactctactgcgaagtctacaggcagttcgctggtctctttctacattggcgaaagcaatggccaaaccaaaaccatatcgtttttttttattttctcctctttcgcagagcgctacctcacaccccacctcttgcagggcccatctcctgcgcacattgacaccaaatcacgaaaaataaatggctcagatcttctaaaaaaaaatccaaagtctccgtgcaaatattagtacttctatagtactatatgtctatatgtatgatgccgtacgactagttttttaattatcactgtcatcagcacccattacggagcactacattgtgttacagtaataagcactgtaactgagcataaagcccagatgtgtactagagcatcaaatctcaattatttatggttcacagaaacacggaaaatttcagtcgtcgttgatctgatctgatctccatgtgaaactcaagactcgtagctgacgacctcgacgcgacgagaagccaaaatcgcagtcggttttgacagcgacaccaacagaaacttccaagtctgaaacgtagtgactgtaccacagtacagttcagtactactcctaatactgcaacttttcttgcaagcgtagaaggcaagaactatacgtgtgatggtactctccgaaatgccaaaatgtcaagcacgttgccatcgcccaagcactgacctcccaccacgtactacagccacaattaagcgaattaagcatacgtacgcccaattccctgctcgatagggcaacagatttaacgcaaagatagagcgtcacatccggcatcatatcggcactcactcttgtagtgtacttctccaatcaaattttccaggaaaaaaatatttccttgatattctttttaacccaaatcctatcaaaagccatacctagctagctagtagtactgtttggcagaattatttgggcagatgtggtggtgtaacgaggaaggaaggataattaagggcataacaacaaggtggtttgtcgaattgtttgattagtcatgagtgatttgattggctcaccaacaaacacgtaccagtgggagtagggcatgcataatcatcggtggataacctcgagccatggccaccagctaccagacgagaaatcaaaccctgtttgtttctaggtagaggtagcggcatggacagttgagtcctccaggcctacacgcacagttgagtttccagtcaaaaagctacagcccagacaagcagaggcaaccatgcaacaaaccaatcatcaggcaatctgcaaaaaaaaaacctgcctgataattgagggtttcaggtcgtgtttcatgtcagcatccgaaatcctcaaagcaaaaaaagaaacaggggagaactgcattatctgattttagcataaactatgatggaatcgaattattcggttggaagaaaataatatgcatcgaattctggtgaccaaattattctactactagtggattagcgtagcagctggagctagcacggaaatggacatgagcttggcatcaccagctagccaatcatactttcagtatgctagtatacaaaatccacctttctttaatatttttgcaaattttttcttctccttttttagtgcatggtggtgttcacacttggcagaggccaaaaccgcagcatctgcaactcgccatgcgcagcaacagtggcccaaaatctcgacattgacttctaccacagatccactgagcgcatcccgaggaaaaaagcacatgcgatagcagtagtaacagcatgcaacagcagctccgccactactattactgcgaccgctaataataacaagcggtgcaggagtaaaactactcacaatttactactactcctactcccgtgggatcagttaccgcactgtgcactcgcaatagtataaactgcataggccattctatgcttgggctactcgccgccgttgtcactgcatcgatcacttgctacactagtgacctactacagtgtatgcatatgcatgacactagtgtgacagtgtgaagcaagaagggtcgtctttttctggccaagagagagagagagagacccatgttttgcaattaacatatgtacaatgacacactagggggatagctgtgggtgccaaaacctcaaaagaatgagaaaactacagcaggcagtgagtgaggtgcagtgcagtgcagtgcaactcatgtcatgtgggcaccatatgcgtatgatgcgtgcagcagccttccttttcagcgagaaaggcacgccgcagcagcagcagcagcagccaaccccacaagagagcaagttatttaagaacctgagttagatagactgatagatacatgcaatgcagccaaagcggagcaaaaaaggggcagaggggacgagaaaaaagagcagaggtagaacaagaaagggaagggagagtgtgccactacgtgagaaaccgagacgaaagggtcgcgccaccagcccaccatccaccgccacgtgggacccaccgcccgcccgcagacgcgagcaaacgttccctccactactaattacacgtaggcagtacgatcactctcctccttcctaaagaaagagagaaagagattgattttgattatactagttggttagtcccatacaaaacacgccttaatccttaaccaccacccctcccctcccgttaacaaaaagctaaaacgcgcaacagcgacgcacacgcaaaagcccagaggcaagtagcagcagcagtggttgcgcggtgctgcgttcgtctcggtctccgtctccgtcgtctccgtccactggacagggcagaggctgcctaccagacacacgccctcaacctcgcgcccgccattattgcgaccctcccgcacgcgtgcgcgcgcgcgtattatcacgaggtccgcgagcgaggcgcagagcagagagcagaagcatcatttctagtcccccagcccaagcaacagtagccagcaagaacagagtagggaggaggaggaggaaggaggacgcacctgggagcagagccagagccagagccagagccatggagcagtacgaggtggtggagcagatcggccggggcgcctacggctccgcatacctcgtcgtccacaagggcgagcgcaagaggttctcctccttcctctgctcccctttcctcttcttccttcgtcttcttcaggcttccctgatgcttctgttctttcttggctcgatgatggtgcaggtacgtgatgaagaagatccggctgtccaagcagaacgacaagttccagcgcacggcgtaccaggaggtaaaccagatcgaaaccctcgttagttcttgttcattccccacacttgagcaaacatgttgcacccatgagttgtttgctgttgcgtctgcaaaacccttttgagattaccagaaattactgcgcgatggattaaagaaaatagcttttttttttcttttcgagttcatacctgattgaatgtttgggaggacgggacagatggtttggtttgatgatttgattttgatgctttgcttgctgtttgctgcacagatgtccctgatggcgagcctcagcaacccgtacatcgtcgagtacaaggacggttgggttgatgaagtacaaattccacgcattaattcagttctgggagtaatttgcattccttcgaatcaagggttctaaagttttgtccttttttctcttcttcgatgatggttgcaggggacctcggcatgcattgtgacaagttactgtgaaggaggtgacatgtaagaacctctcacatttttcactcttcactgcctcctaaaatttttaccttccattggtgctccaacctccaaagtcactgacatcggaatcacagggcagagaggatcaagaaggcaaggggtgtccttttctctgaagaggtaagaacaccgtaagtagatgaaatggtgattttaccacctatatcaatgagcagtacaaactgttcatggattggaaacttaccgctgatttggtacttgtatgatcaaagagggtgtgccgatggttcacacaattgctcttggcccttgactatctgcactgcaaccgtgtgctccaccgtgacctcaaggtaaatgaacattgtccctatccacacaagtcgattcatcaggtatcagcatcacctaacatgcccttggctcctgtgctgttacagtgttccaacattttgttaacaaaggataataacatccgtcttggtaagaaatatatatttcaccataaatataaattactgcatctttcctttttcttggatgatagtgtagtgacctgaatattcattgtttcttgaaaacagctgattttgggctagcaaaattgctcatggaggaccttgcatcgacggtatggcttaaacctgtgctatcatgttgtgtaaatataactcgcaaaacacatttccaggtagcaaagaatacataactatgcagttacctacataaagtcacactaaatcataacatgtataaacaccattcatgtaaacccttttgattttgaatagtggttcataactaaattctttatggcttatgatcttcaatcgtactagcagaatgcccgtactttgttacggaattcaaaagaaaaattgtatggtattacatattcatgtgggaaaaattaatgtctgcatcacgaaatacaatagctttgaactttgatttttaactgtatataatttttttttcacttgtcttattaataatcatgaaaagagattgaacaacaaaaattggcaaaaaaaaatatgccccttaattttattctaaaattaaatatgtaagtacccacttctctctttagttgaaaaaaaagatgcttttatgctcccttctactttgaccttgagtacatatgaaggcccgctcgtcattgatggccaccaccattgccttcttttatgatggtatagataatggaattttgttctagaaatatgtgatgccatttcagtatagttccggcagtgttatttcatttgtatatatttatttatagaattatatatgaacagtaggacactttcctaccttcttcattcaaaatattgtgacatgtgaatgaactgataggttccattgccactcaatgaattcaacatctatgtttttcagattgtgggaaccccaaactacatgtgcccagaaatactagcagacataccttatggttacaaatctgatatatggtcacttggtgagttcccagtacaacagcttttggagtaattttcacggtttctgttatgatgctaatcctttcccatcttttaccatcaggatgctgtatgtttgagatcttagcacaccgccctgcattcaaagctgcagtaagtcctactacacaattcaaacgataaattactgtttacgtataacatggttcatgaaatatcccctcttgttttttaaggacatggcatcattaattaacaaaataaacagatcttcaatatctccaatgccaccgatatattcatcatcactgtgagtgccaatattattaactttttaatgattttcccataatatatatcagaatttatgctaaacatgatgctttgtttggcaggaagcagatagtgaagagcatgctaaggaaaaacccagaacatagacccactgtaagtaccacaaactcagtttcactgtttcaatcaaaggcaccgacagaacacttcacattcaaagttaaactgaaaaatttacaggctggagaactattgaggcacccatatttgcagccttatctagctgaatcatgcagctgctccccaatctaccttccagtgaagcccaccaaaagtaacctgggagacaagcagcagtcaagaaaaccaggcagtggcagaaagcgaatcatcaaaaccaatggatccagtgaagcattagaaaccgctgcagagcaagctgtggatacaagagacaactccacatatatttcagatgtttcaacagttggtacccaggacgcctgcatttcacaagtatctgtggatcctcaagctagaaacaaagcatatcaaaacatcgatgatttgacgctttttcaacagatagaggaaaatttgatgacaataaccgatcgacagattgatgaggccatctttcttaaagctgtaagaaccagcagcacagtagatgtcgtgccagtctctggtgcaattcagaagcctaatgaggcaccaataccaaaggaggaactgaccattggagtagtgcaagagcagagaaaggaagtgaaagcacacactcaccaaggatcaaaaccaggcacaggagacgttcccatcgttacagaagaatcatcaccgaagagcgcggtgaaattggcacattcagatagcactcctgccgagtgggaccatctgaacatagtgcagcagagagctgacgcactggagtcgctactcgagctttgcgccaagctgctgaagcaggagaggcttgaggagcttgctggcgttctcagaccgtttggggaaggtgctgtgtcgtccagagagacggcgatatggctgacaaaaagcctcatgaccccaccaaaattggaagggtcaccaaaacttacgtaggggagcgaatttcatggctttgtttgcaagtgtgctgttctggttctgagagtgtatatagctttgctacagttcatgattctgtatcactgaggctcgagtttctatttatcttgatgtatatggtttgagtgagcgagggcattgtgtgagctaactatttatcagatatttactgtacaatggcatgtgctgtttggctgattcaagtaataatggaaatcataccatgttcattcctattttcttccagccttccttactggagaactgtttatcaatgtgcagatttgttattaccgacaggaactgaatgggaagaggcaatattaaggggatgttcagattgtagccaaaataaaatgctggcaatattaccaaaattttggcaggatttcttatgtatttaccatagtttgattaaaaaaactaaatgtatgcatatctttgacaactttaccaaaaattgtatggtttgaaatggcatcaatctgaacagcccctcagttcaagcatactatatccgggaacaattttttgactaatcacttggttccgatgattctagaaacaaaacgatcactccatcctgatcaagaaataggagcaaaaatatagcctagtagtgagtagtgagcactgagcaatacttgatgatgacagaacagagaatatgtaacactacacagcactggaaaggctgacctgtactgctgtagccctctgctcactgaatgattttgtcaccttatgtttgggcattgttaccactgtcaaaggaagaacctttgccgtgcttccaagcaagaagccttgcgctttctgcagaactcaatctgctacaaatcaacaagatatggttgtttcttttctgcgagaatcatgctctgcgcactttcagttcctggggctctggcttataccctgctactgtacggtgtaccatgtccaggaattgatccctgaacactcactggaaaagaaggtgtggaaaacagcagatagaacatgcatcactgtaacacacagtacatggcaggattcagtcagcctaaccgtagacagttgctgaattgtaaggatccgtctccagtattattgccgaattgggttatttgagagctaagttctcaatttaaaaatgatgcatatatttggttggatatagaggccgggtaaaaattacccttatctaaaaaaaagtattattccagatgccaacaatgatgaaatttaacacatagtataacaagaaggaccatgtgttgtccactttggcacgtcagatctttatatgaaaatctggtgtgtaaattatactagtttgaagtgtaagcccgatagcccatgtaccacaaacagtcagtagagactagagaggcattcactacatatgaacgatggatacgtgcttggtgaagaaagaagtacatgatgcgaaatcagtacaaaccttcctgattcgatgatagtcaagagatcctaaaccagacatttctcctcacgatcgaacattgttgtagtgacttcctctgaaacaaaaaaaaaaacatcagaaagttcatctccctaatttgcaattagttaccaatactgcaaggaacagaaagcaaacgatgttcttgcatcaaggtagcacgatgcagtatcgtccttttcctattcggcgaggacgcgcgcgttcgatgaaccaaagggatcgagctcccccaaggaagtgtatttgcggatgcaatggtccaaattccgcccacgcgcaagtaggcgcatggatctctagaatctccgatagggttggaaagtgggaagcgatatcgtcggtggcgcttacctcggcggcggcggtagtgaggaacaaaaagccgaagcagtcgcggcggcagacgcgcgcggaggtcggtgcgtagtagccgttgcactgcgggagaagaggatctagggtttatggctgggagagagattagagagaggatacggtttgaaggaagacgcagagcaaggaaccacctggagccatttggaggaagaatcccaacttggggggtcgtcggatgcggcgccggcgccggcggtagccacggtgttcggcgaaatgcgcgagcggagtggacgggagcaggaggagagaattgtgcactaagacccctgatttcggttagattttttccttttgttgaatatggtcgctaaagtttcgcttcggactaaatttagtagttgaggttttaaattgttcaacaagttctccaagttaatcatttgggttaatatagtttttgaaaaaaaaacgtttcgtgagtatgccaagtcatcctcacatgcatcggataatacgaatgaaatgataattatacccttatatgccatatagaaaagaaagaagataaatgtttctcacgcgtatgatcgttttagaattgtcacttattattgatgcgtccaagcactgatcgtatcgtatgaattcctttgtcggccaccctccgtaacaatgttgggcctggactagcctgttattttttttttgtctgtgtccttttctttcttttctatatggtatataagatagaatggttatttcattcatactgctgcatgcgaggatgacttggcatgctcacgtggctttttttttatccaaagactatattaacccaaataattaatttggaggatttgtttgagcggaaacaacgaaaactaaattaagcccgaagcgaaactttaaggactgtattggctattcaccctttttttaattaggccccccggttggtggtttgtaatggtcggagtttcctcactagaatttccctctattcgacctatcactatctctactactttaaaaaataaaatatatttccgccctccgtatataaaaaaaagggcgagaaaaaaattctgtcgtaaaaaaaaggaaaaaaaatgtccgactcccctaataaaaaaaagtcagactccggaaaaaaaacttctagtccgttaaaaaaagaaaaaaaagtccaactcaaagtgcgtaaaaaaaacgttcgccccaaattctataaataataaataataaagtgtctatccatatattttctcctctaattaattaaaaaattgattctctattctttccattccagggaaaaactaagggacgctatcccgtcacagcgggacagttaacgaatatatcctactaaggatgtcgtcggccctacgtgatccatctcacattaattcccacgtggctggatctcatcccaggctcccactcagcatggtgtccctattctattagttgcatggtgccttttgaatgatgagaggacacgttgtctagtgagtggtgagaaagaaacaaaagaagtccaattcgtgttaaagtctatgcatctactcttagatactgccacggttctagttaccttggtagtggtgtttcttttatttttttattcttggtttatttcttgatcttttttgtattttcagttgaagcacatttggaggtattgattttgtgaagtattttccctataatatactatgataagttctaatgctcaagtttgacctatctcattccgtgttttctatcccgacacatcttcaatttgtaacccatactatttcgtaatagtaatataagtatcaactcaaatacgtaccatcttaaattccatgggataccaaatttgatacaagttttcgctagctttgaaacctactagctctgaaacctgtgcataccagatttgatacacaaggtatcatgcctgatatttatgggtaccaagtttgatacccaggtaccatacctgatatatatatgcactagccatgatacatgcggatatcagatgacaaatattaggtctaatacttacggataccatgtttgatacctaggtaccaagcctgatacctatatgtatcagatacatataggtattagatgagtttgatacccaggtaccatgcctgatacctacaggcactagccatgatacatgtggatatcagatgacaaatatcaggtctaatacttacggataccaagtttgatacctaggtactaggtttgatgcctataggtactaggcctgatacctatatgtatcatccatgatatatgtgggtattagatgagtttgatacccaggtaccatacctgatacctacaggcactagccataatacatgtggatatcagatgacaaatattaggtctaatacttacggataccaagtttgatacctaggtactaggtttgaggcctataggtactaggcctgatacctatatgtatcatccatgatacatgtgggtattagataataagtatcaagtctgatatgcacgggtatcaagtatggtacccaggtactatgcctgatacctatagacactactcatgaatcatgatacatgtcaatatcagatgacacaagtatcaactttgctcagatgacaacttgtcttatatgatccatctaaattatatgagcaatcattagttggtccaattagccaactgataactgtgcatggttggcgtaaaaatccaaattatttaataacaaaaataccggaaaaattatattttaccacaagcaaactcattatacaagaataattttagtgcaggctacggccagggaacactgtccaatactaacgcataggcattaggcatagcttctagctagctagcgattgacacatgtaagctactagaccctataccagccgaccaggcaagctaccagaccctatagtgtttcatagtgtgtctaggggcacgtcttgtagaggcgtgtcttgtttggatactatacgcacatctcgtttaggggagagttaaagggtataccgttgaacggtattccgttctctagcagccctcttccttccacatcctttgccacatgatttccccttttaattaggctttaatttaccggataaaatcttcttttaatggttgtcaatgatggccaaccgacaatcttttttcttttttatcccaagtattgcagattcgctctgattttgggaaaaataaaaagaggagatcaagtggatcaaaagactacagtaaattctcaaaggttgagtatatttaatggggatgatcggctctgttatcatacggacacaaaactgtattccagaagttaggagaggcagactgggtgaagtgaggtaggatgcaaagctttttcaatttattcctcaaatcctaatagttattgtattactgacaaaaaaaagcctttacccgttgcaatgcacatgtaagtttccatcatctataaaaaaaaggagaaaaaaatagacccaaaagcgagaaaaaacaccatttataagaaaatcagttcggaaaaatcacttgattcaacacgagaaaaaacatcgattataaaaacaccggtccgagaaaacatccgactcaacacgagataaaaatcgttttatacaaaaaaaaaagataaaaagagtccgaatccacacgagaaaaggtggatcgaaaaaacatctgactccacgtaaggaaaaaaacgtcgtttataaaaaaaccgctctgaaaaactgtctgacccaactcgaaaaaaaccatgcgcatataaaaaaaacccggttcggcactgtgcaatgcaaaaaaaactgtctcattcgaggaaaagaaaacatccgactccatgaaaaataatcatatcgtttatattgttttacgtccatcttgatagctaatatctgttttgtctagagttgaccatccgagacagcgtaagatttgattaatcctattattagttacaagaatgagattgaaatagtatttcacattatatgtgtacaacgacataaataatccaattcttttgggtaaatgaggcataggtaatgttgcctcatcgccgaggttttgctatttacattgaagatgtttcaatttttcttatcatatgtcttagttacaacgatcgatacaaacattatcattgatatggctatacatgtgaaacgtatattgtcattaattttttttttacccgttgcaactcacgggcaattttgctagttaaataccgatgatgatctcgttgtatttgatgatttctgaagagtgactaaagcctgaacctttacaacgagggccaacatgaactgtttacatcactcgttcacactggcatgtctaagggcatgtttgggggagcttcgcaccttctcctataatctttcatgctgctaaaagttctccaaaaagtagaaattaccccctaaagtattgggtgactacaaattaccccctaaacctgaaaataagttatttttcaccctcaactatcgatactggatgaaaaaacaccctgagtagctttgcaagctgttttggtctacgtggcagcccaatcaccaattcttttatttttaaatcagtgggccccacatgtcagtctctcaccctctcttttatccctcacctctctatcactctccaaaatactctctcttctccctccctcaccaaataacctcgaggatggtggcgggcagaactcggggcgacgaagggggcggcggagctcaggacgatggtgatcggagtgggtggtggtgaagagggcgcccacagccaccggcgctcgggacagcgtgtgtagggctccaacccgtttgttagcgcactatccaaccccgcccgcgacgcccccttccccggcggcgatggcgtggtggtggaagcgagctcttcattaacagccagatccggccaatgtggctcccgccgctcgataacgtcggcggcagcggtgagccgacgcgggagaatgaggcgggggtgggggacgagcacagcggacgccaccccgctccgcacatggctgtctccaccgccacaacttcatcttcgaccgccccgtcgtcgccctcgccgccggtcatgctgccagtcgcgccgctctcgcctccatctccatgccaggtgcgctcgccaccctcgccgccggtcgtgctgctctcgcctccacctccatgccgggcgcgctcgcccccaatcgcgccgctcttacctccgcctccatgcctggcacgctcgcgcccctcctccatggcaagcgtgtgtgggagagcaggccagtcgttgctgccgcgcagtttagaaggggagggagaagagagggggggctaggatctgacaaaaaggccctagctttgttaaagaatatgtttgttcactgaactaccacgtgtgctatttgaaccctaaaccgctctcaacagtactgtgggagggggggttgtctggtattaaaaattcatggtgaacgatgtctggttttcggtcggtcgactgctataattcagggggtaattcgtattttttcctatagaatttactcagattttgagaatatatagttgtggaatccagaaaataaactaaaagccaatagctggaaaagccaacttttcaagatttttcacctgcttgattctctccggttgcttctcagaatcttaaactctcccaaacatgacctaaatatcatgccgcaatgacaaatgtgacgcaaaattaaatatcacctctctctcaagtaataattgtataattgggaaattggagaatcgaagagtggcagcttaattatatgagtgttaacttacatgagtggcaaatagtcaaatgtctcaaaacttttgcggtatttttcggtggaactcctacaaggctatactgtggtatcaagcggagggcgtatatctattcagtaaggatgttttttttatatagatgcaaatttcttaattaaagagggtgtagcgcgagacattaccatttccattgttttcgctgcctcctacaccgatcacgcgcgcattaattgtatggcatgaccgcatgaagatgaccgtataacaactgtcgacgatggccagtaaatatataaatataaactattttaaaagacatttataaactgcgatattttgtttcacgataatacagtaacacgaatcgttcttacatcatcaactatttttttcccaaaacaaaaaaatgtttgattgtagtataactttaaaagtgcttatatctatatatagagtgtactacagatccatcgtcgcattctaaggaactacgggagtactaatgtaattttgcacggttaaatgggatttgttatacaacttcttattagctcctattttcatatgtatatatatgccatagatattagaagttctaatggatttaatatacaacttctttatttttttatttataaatacagttgtgtactttgtatacatgttactgttatcaatcgagttccatgaccaaacggcttagagatttttcattaatactagtatacgaggtcgcgtattcctgcgaatatagccatcacgttatcctgtaatatatcgtgcgtaagaaaattcattaatttaatatgtaactgaaaaatatattgtaaaggaggcataggtaatgttgccctattgccgaggttgggctattacattgaagatgttccaatttttcttatgatgtcttagttacaacgatcgataccaacattattattgtcatggttatacatgtgaaacgtatattgtcattaaatttttttcacccattgcaatgcacggccaattttgctagttaaacatgatgatctccttgcatttgatgatttctaaagagtgactaaagcctgaacctttacaaccagggccaacatgaactttttctgtcactcttccacactggcgtgtctaagggcatgtttggaggagtttcgcaccttctcctagaatctttcagctgccagaagttctccaaacagtttagaattggaaaaagtacgaattacccccctgaagtattgggtgagtacaaattacccccataaaccagaaaaccagttatttttcaccctcaaccatcgataccggatgaaaaaacccccgagcagctttgcaagctattttggtctacgtggcagcccaatcagcaattcttttctttttaaatcagcgggcccctctcttctacccctcacctctctatctctctccaaaatactctctcttctccctccctcaccaactaacctcgaggacggtggcgggcagaactcgaggcgacgaagggggaggcagagctcggaacgatggcagtcagagtgggcggcggcgaagagggcgcgcgcagccaccagtgctcgggacagcggtgaggtcagagtgggcggcggcgcggcggatgcgatagcgcatgcagagctccaacccgtttgtcaacgcgctgtccagcctcgcccacgacgccctcttccctggcggcgaaggtgcggcggtggaggcgagctcttcattaatggccagatccagccaatgtggctctcgccactcgacgacgtcggcggcagcggcgagccaacgcgggagcatgaggcgggggtggaggacgagcgcggcgaacgcctccctactgcgcatatggctgtctccgccgcaacaccttcatcttcgaccgcgtcgtcgtcgccctcgctgccggtcgtgccgacagtcacgccactctcacctccgtctccatgccaggcgcgctcgccaccctcgccgccggtcgcgccgctctctcctccgtctccatgccgggcgcactcaccgccctcgccgaggtcgcgtcgctctcgcctccgccttcatgccaggcgcg

SEQ ID NO: 4441 - DNA, 22160 bp, Oryza sativa
gtctttccgctatatcgactaccttttataacaagtggtatcagagcataaggtttcagcattggatcaagaagacatgtggaggaggaaacacgaggtggggatcgcgcatcgacaggagatcgtcacccgtggcgatgagatcgatgtcgacaacgagaacgttggggaggccgcgacctcgctcgcgatcagaccggcgatggcggaacgtgaccggaagacggggccgggcgtggccgaaggcgaccggagagatcggaggggtagcgccatggacggcgcgcccgacgaatgcggtgatcgcggatccgcggcggcaggaggccagtgacggaagggcgaaaccggcgagcgtggtacggcgtggcgaacgtgaagggccggggcgacggggtcgtggatggtgaacatgagggctgcgactgcggtgcgtgcataggcacggacagatagcacaggtgctgtcttatacgtacggcgtgcaaagactaaggagcaaaggcaagaagcaaaaccaaatcgagcaattgcatgcaaacaaggacagggaagctgcagctttggaactcgtgcatggctttagcgtattcacgtgaacatgagcatgcagggcatgcatatcgtgcgtgcacaagggatcaaggggcagcagtaccaatgcttcatacatatgaaaacttttgtgccgtggaagtctgacagattgatgagccaaaaaagaaatcgagtggagaagttggatgataaaacgacttgtcggagtcggacaaggctgactcgaccgcaattgctatggagtcggattcagagttatgtatggatacggactcatgatcgcatcagactcgtattgcttgccctttaaataggcagccgaaaagagagagccgaaccaaagcaacaaagcggcagcgattttttgggcggctcggcaggacattggtcagacgtggtacaaggggctcaataggcttgttgtgcagaggcttgtgacaaagtgcgcgcgtatgggtggaccaagccaggccgacgagatcgtgcagagcagaggcacatcgagggcggaagattggtcacatcggattatagcgaacgcggtttgctgttgaatatctgagattggatcacaagacgggattgtgaagacgaatacagacggttctgagcagggcgagtattctggtggcgacagaccagtcaggtcgcgggttggcaagatggcgccgacaggtatgaaatttgatttggtgaatccggaaattttggcttgtggcagactagggtcaaagatttgttagctcaacaaggagtttcaaaggctttgaagggtgtcaaaccggccaagatagaggatgacgattgggaggagatgcagttgcaggcggctgcgacaataaggctatgtctctcagatcgggtcatgtaccatgtgatggaggagacctcaccaaagataatttggaaaaagttggaagctcagtttatgtccaagactctgaccaataaactgtatctgaagcagaagttgtatgggttaaaaatgcaggaaggggcggatctgacagcacatgtgaacgttttcaatcaactagtcactgatcttgtgaagatggatgtggaagttgacgatgaagacaaggccatagttcttttgtgttcgttacctaaatcgtatgagcatgtggtgactactttgacgtacggcaaggagaccatcaaaactaaagatatcacttctgcgttgctggctcgtgatcagatgagaaagaataaagagggtgaaacatctcaagcggagggtttgctagtcaaagaagatcatgctgggcataaggtaaagaagaacaaaaagaagaagatggtgcaatgcttcagatgtgatgagtgggggcatataagcagggagtgtccaacactgaagggaaaagcaaaggctaatacagtgacttcttcaaatgactcggatagcgatggttgtgattttctcacgatgtcaagtgcacagtctaaggatgcagaagcgtggatattagattcagctagcttgtttcatatgacgccaaggaaggagtggttctcttcatacaagtctggtgagtttggttttgtctacttaggcgatgacacaagttatccggccatgggagtaggtgaagtcaaaatcaagctagaagatggaggtgaacatgttcttcagggagtcaggcatgtaccagggctaaagaggaatctgatttcgcttggaaccttgcatgaagaagggttaatattccgcggtaatcggaataggaagaccattgagatcatgaatggcaagatggctgtgatgactggagagaaggtggagtcgcatctttataagctgcgtgggtgcactgttgcaggtggagtccaggaggaagcggttgctgggatagcaattgcttttggtggcggcgggtctggcgcagactcgtcgggcggcttgcagtgaagctgcaaagaagacaacccaagtctggaggaccggtggatcggcatggtgattctactacttctaggtggcgtatattcgccaaggtggagtttgttagaataggtgtcaaatatactagtcctatttggttacagttggacttggagttgtaataggtgttagggggtggagttagagtcggactctgtaacctggcatctctcttaaatagagaggggggcaccacaatgtaaccatggcgactacaatgtagcgtagacacgcagggagatgatggcggcgtggccatggactcgtagtggctaggagctatattggttggggaggagcgcccataatcagagccccggggatgtaggcttcagctgaacctcgttaacaaatatcgtgcgttcctgtgtcgtcatctggcatgtcttgggtgatcgatgactgaagcgatcaggaaagttagtcgtctttccgctatatcgactaacttttataacaagtcacgtaatacagatgaaagccaaaataatccacaagtgtaaactagtatgacttaccctttttcatcctgaaggagaacggttggctgcaactttggagcagattaaattgaactcccagatatctccggcggcggctatctgaacaaatcggtggttgggattagcagcggaaacacatgctagcatggacagaggtgctccaaaccgtttcctcaccattgaaacacacatatttttggatgcttttacttactgaagaggaggggaaggagggcagcgcccattctcctgccggcgctgccggagccgagaaccgcgagatctggagcacccacactcggtacggctggatccgtggttcccagggttaggtcatccagatcaagaggttctgagcttgggccttggggtggctagcaccggcagtggaggggatggtggaaactcgtcaccggcaagagatggtggtgatggtcggctgcatcttgccgatggcgctgggcggaggctcggtagccgacccgccgttcgtcgaaggtatcgcacaggcgctcgccatgcggatctagagagaatagaggggcggcggcggctcgagggtttgggaagaggggtggggaattaggttttgggacttggctgcctgagttttatttgatggttcttgaggcccacttgtcagcgctttttttctgtgggtctgtgtgaaaacctataaaaataacacaatttttctgtgggtataagtaaccccgtcaagaaaattaatattcctgtgagttggccgcggaacctacaggaaatctagcggcccacagggtagctctcaagtctggtagtgacgggatgatcttgatgtttcatggtgcccgtatcaagcaactacttcgtactgttgtgcatcttaggaatccaagcaattaatcctccaacatctacagttctacgccatcgtcgttggctcgttgtgtgcgtgggcagcatagtacgtgtccagttgtaaaccactcatataaagtgacagactacctaagtaaagtgacaggctacctaagtttagtatagtgaacaccatagttggaaaaagtgtttcgtcccttaaaaatatttattttcacaattttattattttttaaatttatatatgtattaaatttgtggagtgatatatcccatatgatatctattgatattttttttataaaaaagttatgtcaccattccggtggcatgagtccgataagagcagtggagatgtatttttatctcttattaggtcttgttttcccgtaaaggagggatttgaaggagatttgttccatatctattagtagatattcaagtacgttgtgtttcactgtgcgcggtaatcattagtggaggatggataccgccacacttgttgtactcttgtacttgtaacatcattttctcgtaacagagatgcagatcgctcatgctccaccaaccataattccgtgcaaagaaaaaaaaagataggctagtcctaacttctgaatattacgtctaagaatgagactttgattaattaatcttttgaaatttcgaccaccaatctattataatattaaaacagtcttagaggcaccacgtttattgtgtaggctaaaaatagaaatacaatttaaaaataattgaaattcagaatataataaagaatattaaaagaataatctatgttgtgaagatgttgcggttttcgctggcggcgtaattaatacaccgtcaacgaagatggcagatcttcactggctcgtctattttacatgcggtccacttactcgaccgcttctaaaaataacttttcactacctatacagctgcccggaaaaaaattacttcgcgctataaaaaaaaatcctctccacccttatccttatcccttcactcctcaccacccactcatccattcctcccatcttctctcgagcgctgcagaggggcacgagccgtgccgtgggttatggatccgtcctccggaggggcgcggccgacggttctggcggcaggaggcatcttggacaatgacagcgagtgggtggcgaggctcctggcggctgactggcggctgaactcgggcgaggcagcaggtcgacggcgaagctaggtcggcggccactgtgaggagacgaggtggatctagctctgctcctgtcctccctacctcctggcgatggattttttttttcatattctctgtgatttgtgaatggatatgagtttaattaatggcttgtgatggattacaatgtttgtggatgaatttcttgaatggattatgagatttgtggtgaatttgggatttgtgaatgaattagggtggtagagaattttggatttggggtaggggattttggacctgtgggggattttagatctggtgggggattttcacttgcggttctctttacgtacccgccatcaaaattacattttcacaagcggctcttcttacattcccgccagtgaaattatattttcataagcggctaattttcgcttgtgaaaatactctattttcacaggcctttgattacttgcggatgggttggccttaccaaaaatataaaatggccgccagtaaaaagcattttgtagtagtgactaaacggatgttttctacttttctataaaatatataattatgttatgccttagtgttaccttgacttaaagttataaatttaaatgagaactttgatgccaattattccgcacgcacgagtatatctatcggatgtgattttcttaaatttggaacataaataaatattcttgtttgtaaggaagaatattttaatgaaaacaattaattcaacaggattacggtagatttgtagatgttttcgtaaactttattttcccatgataaacttaatcagcatatattatatatgcatggggtaattatatgataacaagcgaaacataacttaattttgtttttgaaattatgattttaatatctccagcatacatggtaaggtagataataatttgattagttacaaaaatttgttgtactataaagattcgttgtactttatacatgccgcttttttttttctgacagcccttccttttttttattcgtgacagtctcccacaggccacagcaaaacggatccagatgcctccgttcccctcgtgtttgttcaggtttaggatgctttgtttttttttttttgagtgatctgctttgtttggaagccaggccatgttcagaacttcgttcccctcgtgtttgttcaggataatttgtttggaagccaggccacgttcagaacttttttacttctgtgaccaggatcgattctatatccaacggttggttttttttttttaccgttgctctatctgacggctattatttactcagaagtctcagtgacgtgattcgtcctaagattatctcatgattctctttgcacttgagagatattggggtaacttttagcgaaaacactaattagcgaccaatcgcgcgcgcccttccgcacgtgactggacacgtgtcgcgcacggaaaggagcggcggatcgcgcgtgtacgtacagttttcctttttttttttctgttttcttctgcggacggagcgcgtgtacggtttccttttttttcgttttttctgttgtcttccgtattttcggtttcttttttccttttttttcttttttatcttttccaggttttaatacatgcgtatgcaaactttatatacgtgtatttttttttagatttttttacgtatgtatacaaagtttatatacgcgtatacaaactttgtatatgttttttgttttttcttggctttcggttttttaaatatctatgtatttatatatacaaagtttgtatacacgtacacaaagtttgtatacaacagtgtaacagtagtagcaacagtgtagtagtactactagtagtagtatagtagtagcagtagaggtagcagatagtttactgtagcaccatattgtcaaatcataaactaattaggtttaaaaagtttgtctcgcaatttacacgcaaactgtacaattagttttttttgtctatgtttaatactatacacgggaactaaactaggcctaaaagttttttacctaaaaagacagtagttgaaaggcctaactaccgtagcaaacaaaattgacagataaacttaaaaaaacccgtatagaatctaacaaattacgccactcatatagtagaataaaaagatccttgactaccaactctaagaaaggtaacactattgtgcgtaatatcatgctccttctaccataacatcatacatcaatattgaagctagatgaaagatatgaagataacctatgtgagattaaacaacttttttttattgaaaaccttatcatttcagtaatgtcaaaattgacaaacaaagtacactaaccctgaataaaacctttttcaagcgtctaggcactcctcagagcccgttatcaaaaaaatttctggtgcttcgagaaggagtgatatcctatatatcgatccctactaagcatagttaatgctatttcttttttctctaaattaagtctaatcaccttaattgtttttatcccttggatggttgatttaggtctaaattatctccccctttttcttttgttataaaatcatatcaccttagttttgtttttatgattaatttgtattaccttgtttcttttccttttaaacgatcaattcatatgtgatttaaattgttataaaatacatcatcaaatggtttatatatagtttttttttcaatagtcgatcagagataaaaattatacaaagtgtatagatattttttcaatagtcgatcaaagtcctaaccacatatatatctcccattaattgccatgtcggaaagattcataccgtgaaaattgatcttaatttcgacccagagtgtaggtcgcgtcgtgccattccaactgatctcagacccgagcccgatcgcgtgctcgggccgaacggctcatttgaccattttccatctatagctgttagccacaataacgtattccctacaatcgtaaatattagacgtttacagggttaaacttctaaaatattgatcatcattttctactagaatatgttactctaataggttcatgatattatgtatgtgaattttaaggcattttaaatattgtattgacgcaagtgtagattatacgtaaggcatttttaaccattcgagatgttgttgatgatggaatttaaagatattgatctgatcttattttaaacatcaaataattttcattagagggattaatgactatatatgtcacgctatacgttatattttgctaaactccctccataagcactgcattaattcaagccatcaaacctagagagacactctccacccacacccccatggcatccattccactcctgcggctgctgctccctctccctcttcgggagcacctctggccaagccaccaccggccaaacgatgccggcgtcggagccggcgatctccacctgatcttcgttgtacctggggttggctgcagcaacctggaggcacggctcaccgaggcgtaccggccgtcggtgcagccgagctgcggcgcgttgaaggggaagggttggttcgggctgtgggacaacagctcggacctttcgacgtaccactacggcgactgcttcaaggagcagatgagcctcgtctacgatcccgtcagcaacgactatcggaacctccccggcgttgagacccgcgtggccaacttcggcattgcgagagggttccactcgaagaacactttacacccgtaatatattcatattatatgttgttttaacattttcttatttgatttaaattaattttgatcaaacttatagaaattatagctgcatttctaacacaaaacaagcatattattaaattattctgaatattagttttaatgaaactaatttggtgtttgatagatttttttataaatattcaatcacatcaatctgctgatgatgtagtactgtagtaatctgtagtaattattacttagaatagttataatgttgcctacgctgatctactgtttttcttctgtgtgcctgatttgtagagaaaggtgccttgcaaagcttatagaatagctggaagagatgggataccatgatggagacaacatgcacggagttccctacgatttccgttacgctgctccaatccctggccaggcatcccaggtttactcgcgacacttcaaggagttcatggagcttgtggaggctgcaagtaggaagcatcgcaagaaggccatcatcctcgggcacagccttggagggatggtcgttctagagttcgtcaggagcactccattggcgtggcgaaacaggtacatcgagcacctcttcctggttgcgcctacgctcgctccggggttcatgggccccgtgaagaaccttgcctccgggccaaacgatattctctgcgtcccagatgctacggacttgtccctgcgaccaatgtggaggagctttgaggctagcattgccaactttccatctcccggggtctttgggcacgagccgatcgtgatcacaaaccagagaaactactctgcgtacgatctggaagatctccttgccgccgttggttttggcgacggcatcgagccttttaggagacgaatggttgcgaggatgagctacttcgaggcgcccatggtgccgttgacgtgcatcaatggagtgggaaatagaacgccacggcaattggtgtactgggatggcaacttcgatgaaccggcacaattggtgtatggtgatcgagatggggctgttaatctgattagcatgttagcgttcaacgaggagatgcgtcggcagccaggacagagggggcaattcaagtcgatcaaggtcgaaaacgcttcccatagggggattcttacggatgaatgggcgctaaagagggtcatgcaagagattcttgaagcgaatcgggattcttcgtaggctattgtgcttataaaacttctgtttgaattgatttacaagtatgtacaccggtggttccctaaattgggattctctagtattcttttgtgaatcggggtatgtatagggaagaaagattgatatatgtatcatccataccatttgacacatgaaaaatgttgcatatttcccattgtattaaatatttcttgcccatttatatgcaaatatccttgggtaccactacgacaaaacaatcatccctgtcaactcatttgtgccaataaaactaaaaccgccaaaaataagccatccgtgctggcgtgtaacaacaacgggaagcgataatccctcagagtgttatccaccggtatgtatacatcagtgactatgtgtgccgaatcttcttaccaactgtaacaccccgaattccatataaccgatgagaactgttttgaggaaatcctatgttcaaaactgtattcctttgtgtgtattaagtatctggttctcagggttatagataccacatacctaacagtagttgactaaatctcgacaggacccaccacataccatgtcttatacggaaacaaccttcggatataggagtagttccgcataaggaaggatgaataaagttctacatggaaacgacaaggactactcggattgtatctatattggtttccctagctctacttggacaaggggacacctataggtataaatacaaggcctcctaggaggagaggggacacggaacaatagatcaagacacaagagcaacatacgccaagacaagccgccggatatcgacatcggagataagcctatttagtccccatacggttcctacgactactgtcaggagggatctagcgctatctctgatctcaccggatgcggattcgaggaggaagactaccctgttgtcgactacgagtcagcacttcagaccgccaagtcgacaacagttagataggctaccccaaatattgtactggtgtgattatagtgaataagagcaacgaccgacttcggccaacaggagtagggttattacctgacaattcaggggcccgaacctgtataaaaatcctcatcctatctcttttactacaatctcgcatatatcctaataccaacgatctccatactatgcaaataccagaatcgcgacatcaaacatcaacactagtttcaagagctcaaatcaaaacaatcgttgtagcccgaaaatctcactctaaagtcctccctaaaataaaatctcgatgtcaaattcaaatcctatcttaaacccttctccacaaattctttcaaatttccgatatatcaaaattcactgaaatcaggaaatctcctttgcaaccatgtaggttgtcaagattttccaataataaattaaattctaatatctctccatttcatgtctttttccaaatttattcaaataattctaaatagcgaaccattccaaaagttccttgaaattcttctatttccctctcatctgtcaccttttcttaaatctactcaaatacatttcaaaaaccacaaaatctcattaatccctcccctttgaaaatgaaccaaattaatccaaagaacatctaaatttaattcaagactcaaacctcatatgaaatataccaaaactcaagcaaacatccttcactagaattcctataatatgtgcaaatttgtgcatcaaattagattccaatattgtagcgcccgttccatcgtggcgcctagtgggaaaattaaatcttaaaaaacctaattgcgaaatatgtttctttgattgttgtcaagtatccgtgcctttcccgatcttcatttcccaatctatcgtcgaattcggtttccaattcaaatcatcttccaaatcagatcctcccgcaaaagtctattttgcctccctcgggttcgtgggccgatttcttctccccttggcccatttccctctcagcccgcttcctctctcccttcccgcacgtgctgtgcacgagcaccatccgagagagagagctcatataaactgcgatatttatataaatactgaacatcaacacaatttgtaatatcttactttggccagtaaatatataaatttaaactattttaaaagacatttataaactgcgatatttagtttcacaataaatacagtaacacgaatcgttcttacatcatcaactattttttccccaaaactaaaaatgtttgattgtagtataactttaaaagtgcttatatctgtagagagtgtactacagatccaccgtcgcattctaaggaactacgggagtactgatgtaatattgcacgggctagttaaatgggatttgttaaacaacaacttattagctcctattttcatatgtatatatatgccatagatattagaagttctaatggatttaatatacaacttctttattttttttatttatagatactgttgtactttgtatacatgttactgttatcaatctagttccatgaccatacggcttagagattttccattaatactagtatacgaggtcgtgtattcctgcgaatatagccatcacgttatcctgtaatataccgtgtataagaaaattcattaatttaatatgtaactgaaaaatatattgtaaaggatgcataggtaatgttgggagacgactccgcgtcggacgtccgatattccaccaaatatcggacacccgactgtttacgcgtcatcacaccacctatgtatacagcatgcaaaaaagaaatcagtcagtcaaatgttccagttaactaacgagtgaaacatcaagttatataggttgaaacaaaaaatcatcaactgaaacatttaaaaagtttatgaaacatggtgaaaatacacgttgagacatatcactatcacatatgaaacaactaatgttaatggattgaaacatatgtttttctttcatcaaaatataatcatgtgatatcttgttgtaaaaatttaattacaaagaatacaacggtgtgatcggatagattggataattagtttaagagaaaaatcgttttgaaactagctaaaatgcatgcatgcatgcatgcatgaggtggagagagagagaggagagagagtagtaacagtttagttttgtgaaacatgctgaagacacgtattgaaacatatccctatcacgtatgaaacaaaagtgttaatggattgaaacatataattagtttttatcagaatataatcatgtgacatcttgttgtaaagatttaattacaacgaatacaacggtgtgattggattgtagattagataagtaatttacgagaaaatttgttttaaatatcgttaaaggtgcatgttataggcttggataggtgtatgtgtgtcacaggctgtatgtccgatttttcaccttgcttcggacgttcgaggagaagcgttttccgtaatgttgccctattgccgaggttgggctattacattgaagatgttctaatttttcttatgatatgtcttagttacaacgatcgatacaaatattatcattgttatggttatacatgtgaaacgtatattgttattgatgtttttttcacccattgcaatgcatggctaattttgctagttaaacatgatgatctccttgcatttattgatttctaaagagtgacaaaagcctgaaaaccagttatttttcaccctcaactatcgataccagatgaaaaaaccaccgagcacctttgcaagctgttttggtctacgtggcagcccaatcagcaattcttttctttttaaatcagcgggcccctctcttctacccctcacctctctatctatctccaaaatactctctcttctccctccctcaccaactaacctcgaggacggtggcgggcagaactcgaggtgacgaagggggcggcagagctcagaacgatggcagtcggagtgggcggcggcgaagagggcgtgtgcagccaccggcgctcgggacagcggtgaggttggagtgggcggcagcgtagcggatgcgatagcacatgcagagctccaacccatttgtcatcgcgctgtccagccccacccatgacaccctcttccctggcggcgaaggtacggcagtggaggcgagctcttcattaacggccagatccagccaatgtggctcccgccacttgacgacgtcggtggtagcggcgagccgatgcgggagcacgaggcggggatgggaaacgagcgcggtggacgcttccctactccgcacatggctgtctccgccgccacaccttcatcttcgaccgcgccgtcaccaccctcgccgccggtcgcgccgccagtcacgccgctctcacttccgtctccatgccaagcgcgctcgccgccctcaccgctctcgcctccgcctccatgctgggcgtactcaccgccctcgccgaggtcgcaccgctcttgcttccgccttcatgccaggcgcgcttgccaacctcttcgccggtcatgccgccagtcacgccgctctcgcctccacctccatgcttcgcgctctcgcgccctacctacatggtgagcgtgagcgtgtgcgggagagcgtgccggccgcttctgccacgtggttcagaaggggagggagaagagagaggggggggtgaggatctgacaagtaggccctagctttgttaaaaaatgtttgttgactgcactaccacatatgctattcgaaccctaaaccgctctcaatagtactggggggtttgtctggtttttgagtttaaggggtaattcagtcgactgttgtagtttaggggataattcgtacttttccctttagaatttactcagattttgagaatctaaagttgtggaatccagaaaataaactaaaagtcagaaactggaaaagccaacttttccagattttcacctgctagattctctccgtctgcttctcagaatcttaaactcgcccaaacatgacctaaatatcatgccacaatgacaaaagtgacgcaatattagatatcacctctctccggtaatatttgtgtaattggctaattggagaatcgaagagtggcagcttaattataagagtgttaacttacatgagtggcaaatagtcaaatgtcccaaaacttttgcggtatttttcggtggaactcctacaaggctatactgtagtatcaagcggagggcgaagaattatatgcaattattcagtaaggatgatttttttatatagatgaaaatttcttaattaaagagggtgtagcgcgcgagagattaccatttccattgttttcgctgcctcctacaccgatcacgcattaattgtatggcatgatgaccgtatgaagatgaccatataacaaacagacgatgatggttagactaagtacagtgtggaggatggataccgccacacttgttgtactcctgtacttgtaacatcattttctcgtaacagagaagcagatcgatcatgctccacctaccacaattccgtgaaaaaaaaagataggctagtcataacttctgaatattacgtctaagaatgagactttgattaaccatttgaaattcaaccaccaatctattatagtatttaaacagccttagaagcatcgcgtttattatgtaggctaaaaatagaaatataatttataaataaataaaattcagaataaaataaagaatattaaaagaataatccatgttgcgaagatgttacggtttgtttttgctggcggcacacttaatacaccgtcagcgaagatggcagatcttcattggcggtcgtctattttacatgcggtccacttacacaaccgcttctaaaaaataacttttcactacctacacagctgccccaaaaaaaatttacttcgcgctataaaaaaaaccctctcgaccccttatccttatcccttcactccacaccactcatcccttcctcccatcttctctcgagcgctgcagaggggaacgagacgtgccggaggggcgcggccgacggttccggtggcgggaggaaccttggacaatgatagcgagtggttggcgaggctcccggtggctggccggcggccgaactcgggcttttggtctgaaaccaaggagtataacgtatagcgatcaaaaacatttttacccattgcacggacattttctctagtgactccatccacaaacatgcaagttacaactaaaattctacacgtcacaccaaaaaacaaaattgaccgtgaatatattaactatttgttttttggttgtgagatgttaaatttgaacatacatattttatggagtgatatatcacatattaatacatcttctcaacttttctcaaattatttcataaccttttaaattgacatacaaacaaatttccctcagagtttaaaatagtttcccatacacatgcatagccaactcttgaacagagaaagaatcataagtacttcttacgagactaagtttggatccagggacttaactttagtccctacatttagacactaatttagagtattaaatatagactgcttacaaaactaattatataaatgaaagctaattcgtgagacaaattttttaagcctaattaattagagaatgtttactatagcatcacataggctaatcatggattaattaggctcaatagattcgtctcgcaaattagttcaagattatgtatggattttattaatagtctacgtttaatatttataattagtgtccaaacatccgatgtaatagggacttaaaagttttagtcccatctaaacagggtctaattattattttttggtagcctacagagagggtattgctttggaaagctcagagactggctagaagaattgagataccgtgacggggacaccttgttcggagctccttacgatttccgctacgccccgccggtccctggccaaacctccgaggtgtactctcgctactttgacgagctcatggcgcccgtcgaggcggcgaccaagaagaagcggaagaaggccgtcatcgtggggcacagctacggagggatggtcgcggtcgagttcattccgagcaccccacgggcgtggcaaggcgagcacatcgagcgcctcatcctggtcgcgcctacgctcccatatgggttcctaggctcggtggggtcgagttcgatcctcctcctgactgccacatccacggcgcggtccgtgaggcccatgtggaggagcttcgagtccgccatggcgaacttcccgtccccggctgtgttcggccgcgagccgctcgtgatcaccaagaagaggaactactccgcgtacgtaatggaggatttcctagccgccggttgaggcatttgtatccgcgcggggggggggggggggggggcgaaatcccgaaattgcggaaattgtccgaaattgcctaaaatttgagcaaaatttagttgaatttgaacaaatattacccaaattcatgaaaaaaatgaaaaaatgaaaaatttcggccgaaataatattgtatcaggggtgaccgaaatgaccgaaatttccaaccctgagccgccctcggcttcggcgagcgcgtcgagcctttcaggcgacgggctgtcaccaggatgtacagcttcgaggcgccgatggtgcccatgacgtgcatcaacgcggtgggcaacaagacgccgttgcaactggtgttgtgggacgatgacgacgacttggacgcaccaccggaggtggcagcgtatggcgacggagacggcgagatcaacctgtatcagcatgttggcgtttgacagggagatgggtcggcagccaggacaggagaagcgattcaaatccgtcaagatatagctaatgctaaccattccacgattgccatttatgattttgcactaaagaggatcattcaagaaattattgaggtgaatcaggtacattagtagatattcacgtacgtgatgcgcgataatcgtatatgtatcacgcgtggaattctgtgtaataaatgaatcccctggtttgtgtataccgatgggatggttgatagataaaaaccaaaaaatattgctctacttgtttcagggtagtggaaatatattgcatcccggcctttgttatccggcatataacggtgtttagattcaggggtgtaaagttttggcgtgtcacatcggatatacggacacatatttgaatattaaacgttgactaataacaaaattaattaattacagatccccctttaaactgcgagacaaatttattaagcttaattaatccgtcattagtaaatgtttactgtagcaccatattgtcaaatcatgtactaattaggtttaaaaaacttgtctcgcaatttacatggaaactgtataactagtttttttttctatgtttaatactccatacaagtgtccaaacattcgatctaacatggtgtaaaatttttgcctgcgaactaaacagggcctaaaacttttttacctaaaaagacagttgttgaaaggctaaatcctaactaccgtagcaaacaaaattgacggataaacttaaaaaaacccatatagattctaacatattacgccactcatacagtagaataaaaagatccctgactaccaactctaagaaaagtaacactattgtgtgtaatatcatactccttctaccataacatcatacaccaatattgaagctagctgaaagatatggagatagcctgtgtgggattaaacaactttttttattaaaaaccttatcatttcagtaatgtcaaaattgaccaacaaagcacactagccctgaataaaacctttttcaagcgtctaggcacttctcggagccagttataaaaaaaaaattctggtgcttcaagaaggagtgatatcctatatatttataaagttcatccctactaaatatagttaatgctatttttttctctaattaagtcaaatcatcttaaatattttgagcccttggatggttgatctagggtctaaattatctcccccttttcttctgttataaaatcatatcaccttagtttttttttatgattaatttgtcttaccttgtttcttttccttttaaacgatcaattcatatgtgatttaaattgttataaaacacatcatcaaatggtttatatatagttttttttaatagtcgatcagagatgaaaattatatatttttttaatagtcgatcaaagtcctaaccacatatatatatatatgtcccgttaattggcatgtcggaaagattcataccgtgaaaattgatcttaatttccctctcattaagccaacctaaaattgagatgtgcctactaatgagacattgaagtgaggtttaccaaaagaaatatagtacatatgtacacttctcccaattaaggaggcagtgaccagcgctatcattatcaacttgggatgcggcttccctgttcctaatttttgttcccatccctgtttcttgccagatgtcaatcgcttattggtttcgtattttctagtgggcctccacacccttgcgcctccgtcacacgcatggcgttaagtctccgtttaattctgagccatcagctatggtacggaggtaagctagcttcatggggttgccggcggcggctgatttggtcccttgcagccgagcacaagcgacgggcgagcagatcggcgacctcgccggcgagctcgagcaccacgcagtgcattaggcgacacaacatcaatctcaagtgcgggccaccaattcgattgccttgcttccgagttccagcttgagctcttggaactagcaggtacttgtctttgatcctaatcttcttttgtggttttgctttaaatttgttcttttggtacaatatcacaatgatattttgtagcataacaacattgcaaaaatattttgtagcctgaagaagtgaagataatttttgcaacctcagatccctagaatgtatagtttagtaacttgcaagtgtaaattgtttccgtactaaattcaactcagattcaattaatttaacaaaatgtagagcataacatattgatcttaccgtttctatttgcttcattcccaggccagcggatgaatcatcaggctcaacaagatttgtgaatgacgtcgttgcagcagatgtattgtccaagaacatgggacttgctcctgcatcatgcagttgtgatgcctttgatggaggtatcatgctgttgtttagcatagcaccaagatctggcgtcgatgccggtgcttgataagagagattaatttatcaagatgctaatgcatgtttagatgtgagttgtttggatgctggaggatttaacgggagaactgagacaaatggcgccataattctttttcccgccagcaattctatctatttggcgcctaaaatatgttagtaaagttaatggtgttgtttgtaagtattaaacggagatgtaatgccgttcgtgagacagaggcgcaagggtgtggaggcccactagaaaatacgataccaataagcgattgacatctggcaaggaacagggatgggaacatgaattagggacagggaagccgcatccatccacttgacgaggatgacaaataacaagcagatccacggtaagccacaaatcctaccaaccgcaattaggtgccaagttataaggaaaccaatattggacaagtatatatatgcttgttagtatagttagccaaaaggctcgggacccgacagccgacccaagcatggcacggttcgacaggtgtcgggcccgtgttggcccggcctgacctttggaccatgcctaggcttttgccacagcacgatgggtcggccaggcacggagcaaaatagacaagggagctataatagacttattcaagcaatataaagcaaaatagacttattctccaaccatataagagacggccaaaagatataggggatgcaaaatagacttaatccagccatataagacagcccaaagagatgagggaggtaaaaaagacttttttctagaagagcacgatgggatttcatgcctttaggtcagtccggtacggcccgagtcttattgtgccttgcctgccccgttggtgcagcaagtgggtggactcggtccgaccaagagtatagtgtaggtcatgtcgtgccgttccgactgatcttggacctgagcccggttgtaatcgggccagatagctcatttgaccatcttccatctatagctgttagccacaataacgtattcccgacaatcataaatattagatgtttacaaggttaaatttctaaaatattgctcatcattttctactagaatatgctactctaataggttcatgatattatgtaagtaaattttaaggcattttaaatattgtgctgacgcagtgcagattatacgtaaggcatttttaaccattcgagatgtggttgttgatggaatttaagcatattgatctaatcttattttaaaaatcaaataattttcataatggggattaatgactatatatgtcatgccacgttatattttgctaaactatctctatataagcactgcattaattcaagccatcaaacctagagagacactctccacccacacccccatggcatccattccactcctgcggctgctgctcctgctgctccctctcccccttcaggagcacctctggccaagccaccacaggccaaacgatgccggcgtcggcgccggcgagctccacccgatcttcgttgtacctggggctagctgcagcaacctggaggcgtggctcactgatgcataccagccatcggtgccgagctgtgcggcacgttgaagtggaaggggtggttcgggctgtgggagaacagctcggacctctcggcgcaccactacaacgaatgcttcaaggagcagatgagcctcgtctacgaccccgtcgcgaacgactatcggaacttccccggcatcgagactcgcgtggccaacttcggcattgtgagagggttccgctagaaaaacccttcacacccgtaatatatactacatgttttgtgataatattattactaaatttgtacttctttgataaatctgatcctaaatatgtagataaatatataatatagttcgttttatggcagttttgtgatacgccatgtttgacgaaactatcac

SEQ ID NO: 4442 - DNA, 13113 bp, Oryza sativa
tatgcctccctcatatgtcggtcctgatcgaatcgcctagaatcaggtataacgagcctgttcattttgatgtcaaaaaaaaaaaccctactaaattttggtaacttaccaaaatttttgcagaatttcttatatagttaccaaaatttgggagcaaactaaatatagtcacttttttttacaactttactaaaaattggtaaggttgaaaatggcatcaaagtgaataggcccaatgtcttccgtatctccgaaaattggtgccaatcaactttttgatggtttaaaaggtgattttttgctgacgtaatagtatgaccacgattgactagctgagtcagcgggtgagtcccatatatgttatcctaatctcatattctttctcatctctctctcgctaagtggtggtgggagctcgccaaggccccctttgcgacgtggattcctttgctgccaccactatccaggtgaggacggaggcctcgatctatgacaccgtagccaaggaggactacgccacactcgtcacccgctgccgcaagaagcctcggcctgcgtcgacgacgggaggagaactatacccaccacgccatcccgttcttcgatgacaagggattcaatgacgaggatgacgcccctcacgagtggagagtaaccgcatgagcagtcaaagcatacacagcaacaatatgctgctgcagtgtccctttctgccattgccaccatgatgggcaagcaccaagcagctgctatcctccatattcacatcctcaccgagctcccatcgccgccggaaaggatcctttgacttaactgcatgtgcagttaagtcagaggatctgcttccatcgccgccgcctagcgaaagagatggggaaagagacatatggagatgtgaggaataagatgagattaatatgacatgcgggctctacatgctaactcagctagtcagccacgattaacctaccatgttagcaaaaacttttttaagatgaaaaagatgttataccagttttacggttggagacaatttaatcaggaaccaaagatgaaggagtccaaataaaactattccgagagaaattgctccagtctccatgtccatgggccggcccatcctagcagcgcatgaattgttgcctcgcatcgcattcgatcgagaaagaatttttcagagccgcaagagagggggagacgaaggttggagctccccgtgcttgtcgcttcacgttgttttcgcctgttcaagagagtgttttttttttcactgcatccttatccataaacgtcttatccagaaagatagaaacccgtggttaatctcaagttttgtttctacaaacaaatcttaagttttacgatgatctatattatatcacttcatactgtgatgatggtgtagtttttctaactccactttaggctggcagagtaaattgatttaggcattttagttcacctatattagtgctgcatgcgtactgctggactactggagtgcaaaattgccataaattttgccaagtatgcctgatgtttgtcataactcataaatacacctccaacttttattagtaaaaacataatatattgcccggccgtctcttataaaccaatgcatagaaaaaaatcaaatgttatgtgaaaaaaactactactccctttaatcattaatatatactgttgatactgtatgtcgtttgtcaaattgaaactaatgttaagaacgtcatacattaattatcgaagatagtattgcacacatacaggatgtatatcaaaatttaataataagtgggctacgagtaacagcccgtacgcgcacgtgtggtgtgtgtgcatgtgcgtataaggcatgcttaatttatgtacaaacctatttttatacctcgaggaaaaatgggaaaaaaaacacctgtcggccggaagataaaaattccacctataaacccccctcggccgttcccacctctccccttctttttcgccacccgatccggcaacaacaacgtacgtaacctcctctctctctctctctctctctccccttccagccgcgcgcgcgcacgcacgccgccgtcgtgacgtcgccgtcgcggtcgccgccatggatccgacgccgcagtcgcacccgatcctggcgtacgtgctgtcgcggctcccgtcgctgctgccggtgtcgccgtcgctgtccaccccgcgcgcgcgggacatcgagcagccgtccccgcgggcgccgtcgggcgccgcggagttcgacctcgtcagccgcatgccggggctccgccacccgtccgtcctctccgccatgacgcgcgccgtcgccgacgtctcctcggcgcgcgacgcgctccgcctcctcggcccccgccccgaccacgagctcgtcgactccgcccgcgccttcctccgctcccacgccgccgaagaggccgaagaggaggaggaggacgagaaggtggcgaagagccgggaggtggtgcggctggacgaggcgcacgagtcgtacggtggcttgctgcgggaggcggaggagaggctggatcgcgtgtaccggacggcgatgagagggagggacatgcaggtggtggccgcggcgcacggcggtggcggggaggaggaggccggggtggtggacgacgaggtggtgcgggtgctccgggacgcggaggaagggaaggcggtggagcgcctcctcctcgccgaccggcagctccgccacctgcccgagcagctcggccggatccgcggcctcctcgtcctcgacgtctcgcgaaatcagctcaaggtattattaattgctgatttgtttctgtcattttctgtggttatcgatcgccaacctgcaaaacctgcattgcgttgcgcggttgcgttcgcggatcacgagttcacgtcgtttcagatttagaaattagaagaactgttcgtccgatccggggaattcgggtgatagggagatttgttatgttttgcatttctcgggtagtttttcagtccagaaatgcagatcgtataagacattgcagatgtgcatgccccaaaaataatggatgacgggtagaacgcaatgctggttaattaaaattgtcactgaaagcaatccacttatgagttaggtttatgagaattgtttttgcattttttttttaagatcacgcatgtttatttttgatatcatgattattgaacacgaatgaattatgagcatagaggagtcaaatatggtataaaaaagaaatcattttcttccaactacgaaattgcgcaatatgctagtaaaactgaatgtggtgatgtggtccattcaagaatttctggtttacaggctacagtcccacaaagctagaaaacactgtaaagttcagttttattttctttccatctgttagtactagctattttcattgaatttgcagaatgtcccagatgccataggcgggctcgaacacctggaagagcttcgcctcgcttccaacgcgttggtctccctcccggactccataggcctcctcaccagcctcaagatcctcgacgtctcgggcaacaagctgaggtctctccccgacagcatctcaaaatgcaggtagaatcaaccagccaaggccaaagcacgcatcatcatcatcttcttcttctccccaatggcatccagatccagttaaagaaacttcaattctcgctaatggtgatcatcacaaaatgatccaaacgtacaggtcgctggtggagctggacgtgagctacaacgtgctgtcgtacctcccgacggggatcgggcaggagatggcgaggctggagaagctgtgggtgcacctgaacaagctgcggtcgctgccgtcgtcggtgtgcgagatgcggtcgctgcgcctcctggacgcgcacttcaaccagctccgggggctccccgcggggatcgggaggctggcggcgctggagtcgctcaacctcagcagcaacttcagcgacatgcgcgacctcccggcgtcgttcggggacctgctcggcctgcgcgagctcgacctcagcaacaaccagatacacgcgctcccggactgcttcggccgcctccagcgcctcgagcggctccgcctcgaccagaacccgctcgccgtgccccccaaggaggtggtggccggcggcgtcggcgccgtcaaggagtacatggccaggcggtggcgcgacgcccgcgccgaggaggagcgccggggcagcgccgtcgccgagagccccagggtgtcgacgcccaaggagtggctggtgcgcagcgtctcgtcgctgggcagctgggtgtccgacgtcacgaggtacggcgccggccaggacaaggcagcggcggaggaggaggaggacgcctacctccagcagaatctgtgatcggagattacagcatttgcttgctccggtgctttcatccgtatgtacagaagaactactgcagaccgtcgccgcgtcgttcgtttcgcatcagccgtgtgtttgtgtgtgtttaccttcgctgattccttaccatttaccatttttgttgttgttgttttaaccgttttgctgtttaaaacttttaaacccaggttactggaccacagtgcctgtgtgtttgttatatttaccttgctgattcctaacatttttttggaggttttcgtttaaccattttgtgactttgtttgatgaagtgcagtcaatcgagaggccatgaattccgatacggtcaagctcaccatttttgttgttgtttaaccattttcttaagacaccaacgctgctttagttaaataaaagggctctggtattccccaaaaaaaaagaaagggctctcccaaaacgcaaagagagcatagatattcatcacgacagtcaacagcaccagcaaagcaacaaattcttactagtagattggagcaaagccggacaatctcaggtcattcattccaacagcaccaacagggcaaccaatagaacatcgggagaaaaaaagaatgaacgagatcatacaaacatcgattaacatacgcaacatagatcttattaatccatcaagttccagtcacagcagtagataagaggcatagagcagctaagcccatagtaattacacgcagtttacctggcaaggtaaccgctttttaagaggcgcgcacgcgcacttaacacatatctccgcgacaaatataccagtcgcacaacaccacacacagttcataagcaagcaggccctgagactgtagcagcagccccggcggccggcgctagccttacacctcgtcacattatttacgcatatacacacatagttaggttatagatagggatggctcaagagcacacgatcttcactggtctttcttctccctagcgatgaggtccatcacagcccgcttgatgcttcctccgttcttctcgagcatctccttgtttatctcagtgtcctcaaagccctgaaaaggtgaaacaacagctaacttcagaaccttgccaatacattcgtgcctgtgaggctgtgagcactgtccagaatagggcacatgtgatcttaccatttcctgcaactcctccaggagagggtcccattcgctgacgccacagagatcatcgacagactgctccaggttgtacttgttctgcctgagtatctccttgttcagatcgacctgcctaaaacccatttcctcaagttccttcagcagtttctcttctgtgagattgtcaatgccatgatgatcagatgatgatgcaccaacagacgcaggtgcattaccagcaggcacattaacagttggaggcacaggagtcacagcaggttcaggcgcaggctcatcaaagacaggcacaaaagcagcagcagttgaactggagggaacatcaacatcaatgatggggtgaagagatgttgtggaagaaacaatgggcacaggtaatggagcaggctcaggattcttgggctcgtcaatctggtggtgtatcaaatgttcaagtaactccttgtttgtgctattgacatgttggttgaagacttgatccacaggctcaatattgacatcaatcaaattacttgtgtttgtgatattgctttctgggggcaaattcaagtttatagcggcagtcctgttgttactgacaaaagaaggatcctccacctgcagatgcaatcagaatttagatgttaagaaagataggtatgagtgtcaagattctagacctatatggacaaaaggaatggtagagttgacaacctggatgtgaacccaaacacgctgaccaaatttctggccagaaggtgatgctaacctccagtaagatatatacctcccaggccttgcaggtgccacaaaatcaacagcaacatcaatctcctgatcaacaggaaacccgtccactggaatctgcacagaacacaaactcaggtttaatgattttacatattttaaatagcatgcagtctaaactacagtcaaaacagtaaactgaacaggggtcacagtatgcataactacaattagaacagtaaactgaaaagaggtcacagtatgcatagtacctacctctaatggaacataggtctgcagtgcaaactggtcgccaccaacccatataagctgtgtgcccaagggccacatgatagacccattgttatgcatacgccaaatcttagtaaacggagttgaaggtgccatcaatgttccatccaggacagttacatccaaaatgaagcgactttcaagtttctcccgctttgacttcatcgcagcccgtgaatggatcttgcgacactgaaaccaagaaattataggacaaactaattgttaatatattattttgtgtccttaaacctatttatacaaaccagagtacaggatggatgagtttgctaaataatgcatcgacaaacatacacgtgcaagcgtatgcctgtgcactcatgcctacaaattgggtactcaccaatgtagggtctctcagtaatctctggggtaagagtggcttgtcaatcctggtgtactcgacctcattgcccatgcgatgaaagcaggcatcacacaaatcataatcttcttttctgttggcaaagaggcgaagaggagggatgtcaaatactgagataggaaaaagaaactagatagagcaatagctcaattaaaatcttacgttttagacttgtatcgaggcccaacaattggttgcactccacaaccatcacactgaatccatctatggaatgtgcgtgctggtgagttctcaatgttattaccaaggtctccatgcagatggccagaggacaagaggcggccagggtaaggaaaatgtggagaaggtccatagctcattggtgcaggcattggtgggggtggacggctcaggggagcatggggttggaatggatggccagctctgcacaatggaacacgccatctggaatcactattggcttttggatcagcttcagactgccaaatagatgggtaaaatgtcgatccacgtgctggtggctgagaccaatcattcagagatggaattggaggagctggacggaaagcaggagcagcaggaggggtaggtggtgtagcagaggtcataacagattttcccttgctttgagcatcactaattcccttgctggcagatttgtcatcacctgagttcggtaaaaagggggagaacagcaactcctcaatggaagggtataatgatgcctgttgaccttgagaagatttaacacccgatgtagcaggagcctcaactgacagagtcttaagacctctagcaccagatgatttggagttctgcgtgtccaagggttgcgaccccaaacttgtgtctattttgggctcgtcattagttttgggatcaacctgtgtttggggcaaaccagttgaggagctgcaggaaccatcagcatgcccattagatgggttgttgttgcttggtgtaaccagtttaacaaaaggttttattagctcagctaattgtggtgatgcggcttcaagtacttcatgggacagcttcgcaagtgtctcaggaactggctcctggatggacttcatagatatcggcttcaaaacctcatcgataactgatttaatatgagctagtgggtcttcagtggtggtggacctgagaggtatattatctgaatcctgctgtttggcctgaggtgctgcagtgtggctgttgtttaactgaacattaatcctgagggggttcagtttctgatgaatagcagcatcatgcagatcatcatcatcatccagcatgacaatatccccatcctcatcagtgtaagtcagaatgaagtcgacatccgaaccaaacttaaaagcagatgcaatcttggaccggagagcggataagttcaggctgaattgtggtccttgcacatacccaccgaacctcttaagagtttcaccatacttcacctgaaatatgtgaaaagggataatttgagaactgctaacaacaaaatttgaatcaaacaacacaaaacacacgaacaatgaaagacaatgtatgattcttaccatcaagaaattaaattggactagataacacatatccaaactgcattacatatttataggaagtcagttgaaagaatagttgaagatccatagggtccattcagatggtagaggatttagtttaatcacttattttttgtgatgtctactattctaatttgagcctaggatagtaagattgaattattttcatcagttgccatatttccttgatgcaaaaatatatctgttgcaacttgattaagaaagaggaagctagatgaacattaaaatatgaaaataaaaaggagcagtgaaaacaaacccatgctaaggctcaatgactttctgcacttggtctatacaataattcattgtgggggtagttaatttctcagacagactcctatggtattactgggctcctaattgaatagatgggtttagcccttcctttgggcaatgtttctccaggcatcaccggattcaggaaaaaggttctatatgaagtgtacaataacgagggcatcacttgtttcatatatatcattagatagaatgtagataaactgtataaggtaatagtatattaaaaggcaaaatatcctagagaagttttggttattttaccaacagtggaactcaaaatatactcgtgtgtttataaagcaagcatgaactctgaaagcatagacaaactgaagatgttaaatctcggtatctcagctaggacaaaatattggcccgatttcatttcaaataacagtaatatcataatcatcgtacctatcaattagaaaaaggcataacaacagtaaaacctacagagtaaaaacatttccacagttgaacaaagtgcaagtacattctagattatcattgtacatgtgaaagttacacggatttgaagctgaagacaatagtttgcctacaaatggtaagatgtattattacctctcccccatgagctggaggttttagaatttagattagccatatacctcactacctcccctggcccagggaatatttaatcccaagatcatgatcccactagacaaataaattcctatcaccaatcaaacagggaacttcacactagcagataatcgaatgttcaagaagttttgaggtttggaaacattcagaaagtttgcatgtggtcgagtacagtcaagaagtaagcacatgagcatatacaagtgaggccataaaggaaacaaatcacaataaacatactaagcacggttgtacgtgaataattgcatcaaaacaacaagaaatatactcagctcaaacatacgcctaagaaatggtaccagaccactaataattgttaggagtacttattaaggacggctgaattatttttttctgaccaatacccaacacccatcagaatggtaaaagaatagaatacatcttagaaactgaactcatgtaggagtatgatttttgttttgtgcaaaaagatgaaggctcttcttttttttttctttttttgattagtttaacaccaggcaggcgcgcgtcatcaacagtcggaggaatcgacattcatcaaaacgagctgacgattcttaaaaaaagaaaaaaaaatcagaccagggcagacctctaagctaacaaagagtaatcaaactcccctaatttctcacaggccaaaaaaaaactaactagcgtacacaaatcccgcaacaccacacatttcgtcaatcaaaccctacgaaaacgataagtacgcaagccccccacgcttcccccaaacccccaccaggagcgattcccctttccccttccccttccccctccgccatcccctccccctaatcacaaaacaaaaccacagctcaatcctgaaaaatagacgatcatctcaccttgaggacgacgtcccactcgtcgggacgcgacgcgagcccctcgtacatcggcgagctccggccggacatcgcgggggtgcgggcgtgcggcgggagggcggaaacccctcaaaccctcaggacgcggcgtcgatcgatcgcgcggaagagcaacaacaatcccccaacagaagaccaaaccctagatcgatcgaagagagcggagccgaggaggaggggaagagagctgcgtagccgtgagccgcagcggcggaagagagcggtggtgcgagagagagagagagaggaggagaggagagagtggcggtggcgatgcggccgagtccctcctcgatgcccccccttttatcgcgcaaaaccgtttccttcgatgcgaagcctgggcgacaaccagagaagacggttgggccattaagtcggctgggggcccacgtgtcagcggcgcgggccacgctcgcgggggagccgtagagggggctgcgtgtaaaaacccccacaggggtatatgtgaaatttattacgtgtaatgttacgggtgagagtgtaaaaactcgtgcggtcccccatccttttcctcccgtggggcccacggtggggcccacgtgccagtgacgagaactggataagggggctctggaatatcctagagtattttaatcctgccatcttcttttcgcgcaaggccggggagagcacaccgccggagggcggcggcctccgctcctcgcctttggggtcgcacgagggtcgctgacatgtgggcccggtgggatctagtataatcctcgcatcggtatttcgtaggagtattggattgtcggtgaggtgtgccgttttgtttaatgatctgctgctagctcttcttggcgtgtaagttttggccttggcgtttgacgactaggcgaaggaactttggcgtcgccgtcgtcgaagtcgtcgaggatgacgacgaattcgggtgtgttcgccacagcggagcgatatattagcacatgattaattaagtatttactattttttaaaaaaatagatcaatatgattttttaagtaactttcgtatataaatatttttttaaaaaaatactgtttagcagtttgaaaagcatgcgcgaaaaataatgagtgaggggttggtgccgaacacatccgcaccgggtccaggactacgggagtggggactagtctcatagagggacgattggcagacgtacggttgtgttcgggagtgagggttgggtactagaatgcaaaacgaagcagcgtttagcacatgattaattaagtattagctaaaataaatttaaaaaatagattaatatgatttttcaaagtatacgggatcgactaaatgagtacggcaaacgctaacaggtgaagtcgcagatgacaacacgagttcatttaggttgaagttgggggctactgtcatgattatggataaggcatacctcctatcttaggacttatggaatatatgaatacggtataccttcacgtatacgggttgtttccgtatgctctaagaaaattcatcagatattaaggaaaatatccttacgagtcgagagactgacaaagtcctactcggtagggatagggtccttaccatattgtacggggtctgatgtcgatctgatgtttctgagttctacttggagatcaagatgacctacggtacaaaaggcaccccctgggaggggttcaaggcatcgaatctcaccgccaacacacccatcatagtctacgaagccatgtatgagattcgaaggcatcgaatctcatagcacgtgaagccaagtcaccatgaggtctcgtcgaatccatcgactactatcccatcggtatcgccaaattcatttgttcccattgtactttgtggttttttcatatcaatcctatataaactggactagggtatgttcatttcttctataagtagaggataaaattttagatattcgtggcacgcttttcaaactgctaaacggtatgtttcgtgcaaaaactttctatatgaaagttactctaaaatatcatattagttcattttgcatgtttttagtaattaaaactcaattaatcgcacgttattactatctcattttgtgtgaagcatttaatctttatcttcaggagattcaaacaccacctaagactattacttgattaggggcctgaaccggtataattcttgtctttgtgtttgcttgatatcatatcacgtagatactcgtaccaacgaaccctaataccccaatcatccagtctacgggtatcgacaaacatttttatctctgtaataactcattcgtttgctgcctcgattgttatcagaaaatcagatattcttccatcaattcagacttatcaaaccgggccttagttcagcacactcaaacctcacgctctcttgggcctcttacatatagccagaccgaaaaagtacaccgaaggtccctcaacttgttatcgagttacaaaatcgtcccccaaccgtaaaaccagatatccggcgtcccttaactaatcaaaaccggtcataataagcctttcggtggttttgacccgattttatcctacgtggcggctgagtcagcgtgtaacccatgtggggcccacatgtcaggctaccacgccagcctcctctctctcttttcccctcttctctcccttcctcatctctctgtcccttctttgacttagccggtgggaggaggagggtgtcggcgga

SEQ ID NO: 4443 - DNA, 14689 bp, Oryza sativa
atttgtctcatcccattttagatgtgttatattctaggacggaggtagtatgatacataatcggtatcagccgacaactactaggtatcaggtgatacttacgaggtatcatgtgatacttatcaggtatcaatcgatacctagtaggtgtcgcctgatatcagttaggacatgatacaaatggcagccgtctcatagcattcccattttaaaaaggtagcttatttttgtgaaaaataaacatttatcacgtgttcattttttaaaaaaggtcattttagattcacctttcgtatttatacgttgatctattttgggactgagaaaataccactacatcgcaatctggcttagcgctgtcgagggtcccacaagtctggagttgcacccccatcatccaattgcagggcagggaactggattggggggataaagctacggctagaagctaaaaaaaacctccgttctgaaagaacacggccatctcacagacatggccgcgccaccgtcacctctcggcctcgcgcgccgcgtatccggcgccggcgccgccaccccggccgcggcgtggtcctcttcctgccgctccaggcgcctccgtcctcgtctcccttccttcaaaggtgcggtcattttcctttcttggctttccctccccttctcctttgctctcatttccactgatcggacgacaacggacgggtagtattaattttgttgttctatcccaacgagctaggcgccggcccggtcatcgatctgccacgaaccaacgcgtacggtaacgttttggcacgggttcgctaaaaaatatcgttactgactaccattagcacaagaccagcaattacgtttataatatgttcggattgagtaaaatgaatatactactcgtaaataacgtgaggttatatccaaacgccaggccccgttcgaatccaagccaaggggtggataaacttttggatttctgtggtacgctttttaaactgttaaacggtgtttttcgtgcgaaatatataaaagttgttttaaaatatcggattaatcaatttttcaactttttaataatttaaaattaattaatcacatattattaccacctcattttgtgtgaaatacttaattttcatcttcatgagattcaaacaccaccttacattgaaattacaatataaacttagaatttatagcgtaattacaatataatataagtgtagggaatatacagtgttaaaataatttgattattttttggaactagtaatatgagatgttgtaagagatcatgcccatatatatagttagagatgggctagtagtgtgattgaagataaaacattgtacccaatgataatttttcgtgtatgaatgtgatacacacagtagaagggaaggtggacgacttcgttttaagatagtataaaaatagcgtgataatgtagctactcccctttgacaatgcttgtatatggtggctataggggtatacacaattcattgaaaccaaactaagcgagatcgaaaactcagtcgtcaattgtaatgaaccaaaattaatatggtcgttttgccttgtcacctctatcattcccctgtcgtccacctctgcttccaacctccccatcaccatcgcccactgctatttcggtcatgactgaagaccaaccagaactgaccgaaacaaaatagttcggtcttaactatcatgtgatgcattttagtatttggtttgaaatgacctctttgtagtggatcgtcgacgaaattaatttctacacggatggttacgtccacaaatcgctgttttcactaacgcctgcgtccacgcggggcggccggccgcctatatagggtctgttcgggggagtttctagctgctgcagcttctcacagaatcagaaactcttctaaacaatccagcttttgatctagattctgaaaagctgtagttgtagaattcaggaaataaactagaagtcagaagctgagaaattcagcttttccagattctgagaagctgctaccatccagttgcttatcagacttttaagttctcccaaacaagcctatagtaggtgtagggcaggcattgaccgatccgttgtcgctctaaaagaaaaggaaaaggttgactgtgcagaaatggaaaggcctcaggcgaggtacgacgtgctccggccctacctagggagcatgtcttctgcacacaagcaggaacagaagaaagggcagggcgacgcagaagccatcatggcgcctttcatcaggcagccttccttccggttccggatcgtgcccgatctccttgtccaccccccccccccccccccccccggggcggcgcgcgtccccgccgccgcatgctgtacttcccatagttccctgggctcggcaccggcaccgcacgaccaggcatacatcccctcattttttcgcttatatttataattatcaatcaaattttaattttttaattttttatttgaagctgattttaagatttttcatcgaaatttatttttatatatgtatatatatatatataagttttattcacaagttactttttatttgtaaatacgacggttcggctccgtgtcggaatactacaactatagaagcctctcttcatctctctctgtctgaatacagatcagagccgtcagagcatgcgtccagtactctcctctccggccatgcatgccgtgacaacaagaaggctccaaaacacagccttccctcctagtatagctcctactagctccatttaatatcggaccggtggacagtagcttactgctcgatcagaggcatgcacagtgtgtgagtgagatgaggtgcatggccgtgccatatcctatagtaggactaccttccaaaataagtgcagccatagatattagtatttagcgctttgaccatccgtcttatttaaaaaatttatagaaaatatttaaaaaattagtcacacataaaatactatttatgttttatcatctaataacaataaaaatattaatcgtaattttttttaaataagacgaatggtcaaacgttgaatataaataatactaaaactatacttattttgagaaggagagagcagtacgagtaatacgcatgctgtcatgcaatgcatgcatgcgaatatatgcaacgcaaccgctctcgcccgctgatccgctacccgctgcatgctacatgcggctgggctggcgtggtggccggccagcgtactgtgtactgtaccatgatttcgacgtacgtccgtggcgccgtgtttgcatccgtggatgcttgcatggcctgccgcgcgtgcagccatgcaagcgaagcgagagcaaaagaaagaaagcgcatgcatgcgtgtatccgtgcatgcgtctgatggtcgctggccggagttgggcatgcacgcgcctagcttaagcttagctgacggatacagggctatgaccatgcagatcgatgcaggcggcacgtctcgatccggcgcgacacgatctgatccttccccggccgcttgggagtacgtaaacgtacgtacggttcgtgccgatcgacggggtgtgtgggcgtgggtgcatgtttggaggcatcctcttgtcctacctacttaccccgaccgagtacaaattaatgtatacatgcatgtgaggtgttcttgaggctttcttaaaattttattgaaatttcataaaactatacatactttgcacaatttatcaaactacagatttaaaaacttattttataaaactacagatttaatatcttcatttatcataaaaccacaggtttaatgtcttcattaccacaaaactacaggtttagcattgttaaatctgtagttttatgataatggagacactaaatttgtagttttgtgataaatgaagacactaaaatctgtagttctgtgataaacgaatacactaaatctgtagttttgtgaaacaagtttttaaatctgtagttttgtgataaattgtataaaatatctgtagttttgtgataaatggacatactaaatatgtagttttgtgaaacaagatcttaaatctatagttttgtgataaattatgcaaaatgcctatagttttgtgaattttacacaattttatttgatcgatctgcaccgttggatgcgaatcagatgcctcgtatttagcttctctgaatgaactgcgcggcacatttctctctaagctcagtcattaagggcaccagtcgtccattatctagctaggatagttttaacactcgcgcgccaatggacggctggatcttgatcaacagctaaaacatgggactaatgttatatgataaattgataattcaggttattgttaaatagctaacggtgtgctcaacttatatgcgatatgcacatgtaatacacttttggtacaacaatttcgtttgcaacttgcaactctaacaaatatgctgactaaccgccactgccttttcaccccatccggacatgcatgatgacgcccacttttatactgtctgtatatatagtaccagtcacacccatgtcattgcgacggtacattaggtggtgtatggatccataagtcctggggacttatttcagtcctagaactaatcactttagtccatggctgttttgttatagagactaaaagggactaaagttcattaaatacgctgcacaatgaccatgttacccctaaaatcatacaaagagaaatgcaccatacccatgcatgagggcagcaggtggaaaagagctactttagtcccaataagctactcccttagggacttatactaaagcactttagtccctcctgtttgggactctacagatttaaagggacttaaagtggagggacttcttttttagacctaaaaaaacagggccttagtaaactgtgcgggggatccgcgcactaaccgtgcgtggctacttttattcaccgtgtggaggagataagcaataacgagtttctatagcctaaggtatacgtatagaacacaccacgagcacacaactagtaacaaccctttgaaaggattaccatagaaattctgaatgatttaatttcctaaggaaattttcctatgaaatactttgattcataggaaagtataaggttcttatcggttgctcatatttcctactaattaagtcaaaatgacttattagaaaataaaaaaacatctttttgtaaaaaatttttatgcatgttcttagcgacttaaaaactaatgctaaaagaaactatattgaaaatatcttaaaattgcctttcaaattaagtttgaaaattcaagagattttctccagtccaataaaatgtacctcgaggtatcggtatcttatggtaccaaatcgtttccgatcgttatatctaacaatgcccatcctgcccagctagatccaacgattagaaatgatttggtaccgtgaggtactggtattgttggaccagagcaaatctcaaaatttaaattttaactttggctttggcttattagggcaaccaatgggactcttaagaatttttctatagaattatatttctatggctcaatttcataggaaaataagtaagggggtgtctagagccaggggtgtaaagttttgacgtgtcacatcgggtattatatagggtgtcgcatggggtgtttgggtactaatagaaaaactaattacagaatccgtcggtaaaccgcgagacgaatttattaagcttaattaatccgtcattagcaaatatttaatgtagcaccacattgtcaaatcatggagcaattaggcttaaaagattcgtctcgcaaattagtcgcaatctgtaaaattagttatttttttagcctatctttaatacttcatatatatgttcaaatgtttgatgtgacagggtgaaaaaatttgggtgggatctaaacaggccctaagaggtctaatctcttggaaatttttctttcctttttttgtttcctatggtgctatcaaagggaccctcttcatattttctatgttttctatttcaatttttgtgttttatctattgctgtgttttctctatcatgtgttttaaaagagctctaaaataccggtgacgcaaatgaaatctaagatttttttattttttttctggttagtgtaatccgatacaggacattgaggggagcctaccgggagatcggtgaagtacgagaaatcataacggaacgtgcgtgcgtgcccgcctatccccgccgaccctgcatatctccgcgcgcgcatgcaccgggtccggcgcgaggcacggtctggtccgcccactccgggtccgggatcggagacggacggacgggagagagagacgcccacgcggccgtgtaccgtactgcgtgggcgcggttctccgcgcgcgaatgctacgtgcgctggattcgatttgacgcgcggcgatggatggtggtgggggagaggggatcggatctctgctagctccgcggggcacccagggggggaaggcaatttaacgggagccggctttttgtctcctggatcgttcgaccgcgccggggcgcggggcggcgctgcgctgcgctgcttgcgtcgtctcgttcgtacaagtacgggacgacgtcctatcgatcgctttggtcagatcgttccggtatggcccgtagattgggcaagtcgaacagtgctccctaacatactgtatatagggctgtgtttagatccaaacttctaacttttttcatcatattaacatgtcatacatatacaattttttagtcacatcgtattaattttaacctaaacttccaactttggaaggaactaaacacagcctagtccgggtttagtttcccctattcccaacttttcatcacatcatatcacatcaaaaactttccatcacacataaatttctaactttttttcaaactttcaactttcttcaaacttccaacttttttcagaaactaaacacacccatagttatgctcattgtggctccaatgcttagggtgtgttcggatgccccttttcccaacccctctccctcgttttccgtgcgcacgtttctaaaactgctaaatggtgtgtttttataaatgtttctatacgaaagttgcttaaaaaaatcaaattaatccatttttgaaaaaaaatagctaatacttaattaatcacgcgctaatggatcattccattttctgtgtggaggtttctggttgggaaccaggtacaacgaacacacccttatccctattgattcaaagaaaattcatcagaattttagagtctttcattactatagtaatttttttaaatatctcccttcgaatcaaagaaatgaatcttatggaatggctaatgccatgcaaattttggaggaaactaacatgagattctacctcacggaaactttcctttgaatctttatctctcctctaatttctgtgtttttttgcggtccaatcaaacagttattcatgtgtttttcctatgttttacaaccctctgttttatacttacattcatgtaacatactaaatttttcagggtaaaatttttgcgaaaatatctaaagtcgatgttcttcgttctttcgaattggagcctcccaatccttatattccttttgtttcctctaagtttccaccttccgcttaactttatttagtttccctctccaaaccaaatccgagatatcccaaagaaaattcccaaaatcatcagaagagctcgtgtttattttaagttaaaccggagtaatcatgcaaatattctaaaacccccaatctcatcgattcctattcaaaaatatcctaccaaaattctattaaaaatctctccaaaaattcaaatagatcactgtgtttcttctcgggccgagttcctagcaatccagcccatattctggatttcctttgcccatttccctctgtttgggccgtgctggcccacgactgctgttggcccagccgaggcagccgccgcacgcgccgtcctgcgccctgctcgtgttcgcacgcgctagtcgcgtgcggcctcgctcctgcctgcgctgctcatgtgccgccccgagctcggcacacgcccgctcgagccgcctccaaaacagccacgcagttgctcgttgccatccctcccttgtttcccctcctcctccagaccttctctccttcaaagtgaacgagccgaagtccgctattcctctgtagacatcaagtgctaatctcgttttcatccccaaatttcttctgccagagccaaggccggctgtgcagccgtttcgccgtcgtcgacctttttccgccgcaccatagcaccagcaggaccacctctcactggtgagaattttccccaaccttctttccttgcttctatcgggttcctatcgtgctcctgtccgccaccatggctaccaccgtgctcagtttttccggcgcttcatctctatcaactaaccacaaaaatggaaccttctcatccgggaacgcgttttgacgcgctcaccaggccacgttcgccaccggagctcgccacccaatcttctctctcctctagcggctggaatcctatagttcgcgttccggccagcatgaacatcctctcagagaaccagcaacagcttcgagttcgtagcacctggggacgaaattacctcaagacgttcttactgttccgccacaataaccgtcatccaacttttctctttttatctctctctctctctgtgttcgtggttcacagaggaagaagaacagtactagattcaatactgttccaccatggtccagcctgaccacaccacctgagccaacctaggtagttgtcaaccaaaagaaaaccgattcatatcaattcttccatcagttcacccccagattcaaaccaaatcaattctagtatctgtaacaacaataatcccaaagtgcaaccactactacacatgccatgaatcataaccctaggataaatctttttttcatccaactcaaattaactctcgatttaacattttcttttgttcgggctctgattcacaatatttattttatcgtttatttgtagtatttttgttataggcttatttggtcgtttcttcgtgtgcatacgctagatcgcgttgaagatcccaccggactcgcaggaactgaagtggacctagaaggctacgttgaagctcccgaaggccacatttcacgaggcaagccatagttccaatctttgatcatattgaaaccttgtagagaaccacttagttattttctgcattgagtatttataaaattattttgcatatgaattatttttgaataaacttgttagtttagttattacccattattacattgttattattggccaaatccatgaattgctatatcacgtcctttgataacctaggtgtagatttatatacttcacaataatattctagtggataagactaccaaatatctatactcatatacatggtttacccgtcgtcacgtggtggcgtgtcgggtgatataaaatgtgttatttgatatgagtcactcgcctggagtgatatggaagattaattccgggtgaagatggatgttgtggtgtgtgaggccgtgcatattgttataattattttgtggaaagtgtatatttacacttgaagtatgcacgggcctgtgctagttttggtggctttcccggatataaggactacccccttatgccatggaaaatgatgtaatttgcgcctatccataggactgagtaatcagacttagcctagtacattgtcccactatatgaaagactgtagggtggctctatgagcaggtttggggtggacatgtggaaggggctttggccaggttgacatgatccacaacggtggaacccgtgaaagcagcgaccgtctagccttgcttaggcctagcaagtgcccgactgctaggacggatcaatatcccactgggcagtaactagtagtaagtgggattctcaaacggctatgttgtcctcagcctagctagctgttgacatcaggtgggtaaagctgggcagtctctacagagatgagtcttaaatcattcgaatgtgccgtgcttccggttaagaagctatgtcattgggtgattcctatttatcatggtatgagtagattttaaattaaaatatggaatatgacgaagatgaggatgaatggtgattaatattgctaccattttaaaatgatgatttataattgtttgcgaataaaatgtttgataaagtagggaaaaactatttataataggcttgttatggaacctccttgatgaactatattctttgtacgccttgcatatattctatttgtattattatggatgtggcttgttgggtacctcgttactcacctcttgcataaaatgtggttcagacgatcagttcttccctgaggaggcgcaggaaggggaagaattctatggtgctgtcgagtttttgttctaggttgatctgctctcaggcgttgcctgtggtgtttttatcctattttgtgtttgagtcttttgtttgtagggagtgtgtttggcctgtcggcccctaaaacctgtcttagttatcttttatgtaataatttctgtaaaaacttgggtatatgtatcgaaagctgttctgtatatcaatctgtgtgcgatcgaaatcctggacggtcgcgggtggtttcgggataccatactcaaaccgggtatccccacaattcatatcaaaatcatatgtttttcctattcctacgttttctcaatcctgcgattcaaatgagcccttagggcccctttgaatcacaggaatgaaaaaacggaggaataggaaaaacatatgattttgacaggaatgtaagtgtaaaacagatgattgcaaaatacagaaaaacgtatgaatgactgtttgattggatcacaggaaaaacacaggaatttgaggagagataaagactcaaaggattttttctatgaggttctacctcttattaaaattcctccaaaacttatataggaagaggcatttcataggaatttcataggattccatagggttcattcctttgattcaaagggctttgtaggaaaaattcctataggaataaaatcctctaaaatttctataaatttcctttgaatcaagtaagtctaaaatatagaattgcaaaacacgtaaatatctacggagtatttgattagaccgtatgaattcgatgaaaaagatagacttcaataatttttttaagaagttgaagctcttactaagtttcatctaaaatctatattaagtgagccatttcacaagaattttataggatttgaaaatatccaatcttttttattaaatgattaaataggagttttctatagaatttaaattatataaaattcctatatatattttttatccaaggactcttatagtgcacactgcttggcatgattggctaggcctggcagcgagccgctcttaaatctctattatggcagccaaaaacagttaaatttgctcttaagcatcgagtgacaaattttacaatagttgaataaatccgaaacctccattttttttcctcaatcgatgtaccatatctaattatatgttaccattgtaactactggaagtattatgtaggagtatactgaatacaattgtttctactggcaatagaattctaatggctccggttgtttttactaccagtaataccgataaaattgttctcgatgactctgctagctgtacatgcagtggagaattcgccgctcccaaagaccccaatagtagcagtggacgatttgccagtactccacagtacatgtcctactatagcaatggggccaagacatcagacacagttctattcccctgcctgctttcctgtaaaaaaacattagtatgacatgacgggctatagcagcaacgacagcaacactcgttgtgacaaaaggatgaacggcaatgcccaagtgagaaacatgagaggcaatcccatccaataatcaatcagtccgatggagcaaccagcggcaggccagcagcgaggctagcagcagcacgcaacgcgcacgagcgagcatgaattttgttttgttggtgaccaaagggaggcacctaccaacaaggcaacaactcaacgtttcaacagaggctcaacattccaacaactcaacatttcaacaagggagcccgagaatcttgacgagttagcgtaatactcccttcgtctaaaaaagaaccaattcttatgaatatggacaagcatatgtttcatagctagaaattaatttttttagtacggagtgagtactacagtgcaggctgcagctcgctgctgtgcggagttgacggctccacgtccatcctgtccccgctttcattcgttcgccggctcgccgctgccggttcttcacgcacgtcaactgctgcacgtcaactccatgaacatatgaagttcatttctgtaagtaaatatcataaaaccataattactttaattaaattatcactaaactatagatagaaactatatatttaacatcatatatatcgtaaaactacaaatttaaaagatattgtatcacaaaactacagattaagcgatgaaattataaaaaaactacatattttaaagtttatatctatagcactattgagattatgaaagttgtagttttatgaaatctgtagtattttataccataccttgaatatgtagtttcataaaaaaatgatattaaatatgttttatgatacatatatttaagtatatactagttttgtaatactctctcattccaaaagtctaagtactatttcattctttgatttttttcaaaagtctaagtcctatttgtagtcattatgtgctatattaaatttttgatcgaaacccaataagtcattttagtagttattggttgcatgtttattagttttgtcacatgatgaacgagttaactacatcttgatcttggtgaaaaagaaataggacttagacttttgaaaggagggagtagcttgatcaaatgaaatttactttcctttctctaaagagattaagttaaataagggatggtataattgattaaggtaagaaagtagatgaaaacacgcttatcctatatatctataaagtttatttcaataagtataataatgttatttctcttttctctaattaagccacattatcttaactatttctaactattggacggttgatctacgtccaaattatatcactcttttttcttctcttataaagttatatcaccttagttttgtttttaaatgattgatttatactattatgttatttcttttccttctctcattgactcacatcatcttagtttttcttttatacgatcaattcatatgtatttaaattgttataaaccacatcaaatggtttatatatagcatatagcctttttctcaatagttgatcagagataaaaattatacaaagtgtgtcaattttacgtgttatttttactaataacatataaaacccccgcgggagtggggtttcatctggtattcttaaacattcaattcgttatttaccgctcttgttataagcgtgaattgttttgaacttctcgattgtttcctaataaatacaaatcgttgtacaacttccggacatattctttttcatctttcttttacccctcccgtaaataaataaatgactacttttgaatgcagtaaaaatgaagggtatcaaaagttagtcttgaactgttctatgcatgtggagtaagtctaaaacttacttgtgcagttatattagaggggattatggttctgatgaccatggactgttattcctgccgagcatcctcggcctgaactttgcccccgatacagactcagcaccaaactatcaacattgcaagcaagagaacaagggaaagatacagagaaggaacagagcctatagaagtatagcacccccttgatttccagcacaggagaaaactgatgaatgcggattattactatacgatgagcgggcgcagtttagacattgaataacttgtccaccgaaaatatacgacagaactattttcatcactgatagcaggagtcaaaagcttactcgatttatcctgccggtatgttaaacatgtcagaagaagagaggggtggactgactagcagaaacaacagttctacaagaacttctgccattctttgggtatgggctatgggcaccgggactcgccgccgggccgtgatccgagccgctgtgcatcaggaggtaatgttctcttcatatttgcatcctccaggggagtttcctttgttctgtgctaatagcactggctgaagcagaaaaagaacccccttggcttgtcttccatcttgcccttcggtgtgtcgccgaggtcgcctcgagaagccattagggagcttgtcccaggagattcaggaggcaagattgcattctctgaactgaacgtccgaggcggagccagaggttctggtggcgaaagggtggaaaggtaatgcagaagcatttgtacgatctgcgtgaagttcggtctctcattgggttcttccttccagcaggttgttaggatttctgatagctcctcaggcaaattatctgcactaggtctaatgttctgcagaaaatgaggcttgcatcatgtcaaatactgatgagctactgta

SEQ ID NO: 4444 - DNA, 119976 bp, Oryza sativa
  unsure (1)..(119976): unsure at all n locations
ccaatccccaaccccggcggcggttgcggcggcggcacgcggcggagatgctgcagttcccggcgctgatgcggcagtggccgtcgccgccgctgatcccggcgtccacgctgctccccgtccccgccaccacccaggaggacgagctcctcctcgccatggccgagtccgacctcgaggacaaggtaccgatcgcctcaccacccttctcccccctccccggtacgcccccccccccccccgcgcagcgctgctaacacctgcctttgtctgggccctctctctctcccccccccccttccagctgaacgagatccgcaagaccaacagtaacctggtgatcataggcaagccaaccggcgacgtcaaggaggagtacgacgccgaggccgaggacgacgacgccgacaacgtcgaggagtccgacggagacgacttcgaccaggagaccggctgagccggcccccgactccgactcctcccttcgggtttgcaccgcctgccctggtgccattgccctttcttctctgctcccatatttattgcgtgcgtgctacagcttgctatccccaatctgatctatctctatgtgttcagtttacctagtagtttttttcttggaaaaatcttaatgcttcccttattgcttgaataacatgtatcggaatagcttgttggtgcatttgcgtgtctcaatttaagaatctagtattagtttcctaactgtgtgcaagtgcccgtagccttgtgtaagtgctctcctttttatactctttttttcccaaagagtaaatttcacaaaaccttgtattttggggcatccggaacgcaaaccccccaaaccggtggttttgtgttacggatcatccaaaacctgaggaccgagctgatcaagtatctatagaagttgcataatgatgctttaatcaatgcttgaattcatggatgatttgtaaaaaaggtactgtacactacattagagtcctgttaaaaggaaaaattattatgatcataggtctgtcctgctcatgcataaatggataaacctgttacttttagtgttgattaccttttctctgtattttttccctgaagatccatgcctctatttacggtgataaatatgtctacttaaacaacaaagcacaaagttccttgtttcttgctgaatcttagtacaagttgcgcaatgtgcgagtgtttttggcactaatcacctcagaaattatgctttatttatttgttagtttaatttcttaatgcaaaaggatttttctgaattcttgctagcagtgaacttgctattatcttgcaccataccacaaaaacattattaattttcagtggctattaaagaaccatgtccttgatgtaacataactgcaaggatagaagaaccattgttgtctattatgtataattgtatctctacaagaaattattatggtccaccttgtgatataaaacaaaagatacaaggcagtacattagagataaacggacgaacaagctggagtatgtaacattgtaactggctgtaaaagctttttacctaatcatgtgttttgttgccaaagaaatgattatttactctggccaatcctgaaaaattttatggtcgaaactttttggagtcagcctatctctttgccattgcggaaatttttatgaagtgcaatgggctgtacacctctcaaaacactaattacatttcacaatcactcacataaagtatgccagaatctttgtgaagagcaatgtgtagaagatagataacacagcaccaactggaattgtgactaaccaggaggccacaatttcacgcactgtctctgctctgaccctattgagccctcttgcaaatcccactcccatcactgcaccaacaagtgtatgtgtagcagatattggcaatccaagttttgatgcaaacaatactacagaagctgctgcaaactctgctgcaaaacctctagttggtgttagttcggtgattttcttgccaattgttgctatgaccctgtaaccccacattgtaagccctgcaacaattccaaaacctccccaagcaaggacttcagtaggtatgactatctcagcactgcttgctacaccttgaagaatggacaaagctgccgccagggggcctatggcattggagacatcattgcctccatgagcaaatgacatgaagcatgctgacaagacctgcatgtatccaaatacaccatatacaatctgcaattgagctcctgttggtccagctatgtccgaaagaaatccaacttgctgagcatttgccttatcagcagatgctatcttttctgcttctgaggacagtaggtcaccaagctgtttttggatcactctgttaacgattacggctcctattgcgccacatgctaatgcttgcaggatagcgattgaaaaagtcttgctgagaggaaaagcggcaaatgatattgcagtaacaccagtaaaaactgcaattggtgcagcagcagctgcagcctgacctggatttggtgcactatatacgaactgaaatgaaatagggtaagcagagaattaacttattgtcttgtcttgaacagtcctatgtcctctatttatgatgtgtgttcaataaggtgactgcctaactaagtaactcttaaattaaaaatgctgtctagcatgctgcaagtaaagttagtctagtgcttacccttcgtatacccttgtaaacaataaatgagactgcagcacccatcaatggtgaaatgacccatgatgaagatactcttgccaaggagctccagaacactgcatttacgcctccaaatactatcccaaaaccaaccatggccccgacaatacaatgtgtagttgaaacaggccagccgtaggaggaagcaacctagaaatagcaagcgttaattcatattgactctgagaaatgttaatatgctatgctcagataaccgtaaaagggagcacacaattggatctttggcagaggcatttaattttatgttaaatatttctttgaggcatgatgtatgcatttaaattttcccgcaatcatgaaaatatcttaattccaatgattaagcagatgaaacattctcccgcaattagagtcccaccaaaaatgtcttcatcaaaattgtgcatgcctagttgtctaatgattcaagattccattagtctatcccttgtaaaagttgctatatttctagtgagcattgtctttaattgtctcattttgttgcttctgtacttctgctagttgggattgttgataagatagacatcaaactctggtaattgcaagtgagctgcacaacattcacggatggatgttacacaacatcctgaaactgcatataattggattaaaatccttacgttaaaagacttcaacaagtttaaagctatgctgttaagttcctttcccttttcagttttcacttcctaccatggaagttgtttaccgtattgtggagtttatacctcaaaggaaattgtgtaatatagtacaatcaactcatagaaggttctcatgcagtaggtttcactgaatataataaagctgctacaacttactgctatcatttatttctggggcttaacctagcatcttcaagtgcaaaggtctattgattttgccttgctaggtagatcatgctattcttgcatcatgaatgtgtcgctgatggaatgtcttaaatattttgtttcatatactgaaacttgcagaagtctcagtaattatgtactgctaatggcactacatgattgcatcctctgatcgtcaccattccagcaaagctcaaaagggcggtaactgataaggtgatctaattggaatattacctgcaaccatgttccagcagcagcgagggatgacaacaatccagcgaagagcagagagtcctttccttggaagacagatgcgactaggatgcccttctgcatggtgctggtgacatgggtgcccataaggaatgcaccagagaactctagcaccgccgcagtaagcactgcttgccggagtgtcaaagcaccagaccctactgacgtccccatggcattggccacatcatttgccccaatgttccatgccatgtagaaccctgaaagcagtgtcagatatgccagtgccttcattttgttcgtcccatggaagaccactgactgcatcgccagtggcacagtgagcgctgcaaatgcaatcaccactgagattgacattgccatccggggcgatatatggaatgccttggccatctccgacagttcagattccccgttctgctcctcctcagactctgtggcatctgcttgcccgctggagccattatcagcattggcaaaggaggatattgtggcatggggaaggctcaggtgtgagttcagtgtcttggcaggtgacacaatggctgaagggtagtacctcaggccatgaatccgaggtggcagctgagcaacagggtgacggagcaggagagcggcagccgcagctcgccctcctgctccagcatgtgctcgggcaacggagaagaaaggggaagattgagacatggagtggcagaagcaaagtacaggtttgagcagagaagcaccgagaagaaaaagatgagattaagggggaggagaggaggaaggtgaatgagaagcggtggccataggtgtttgtggaatgaagtgagcattgttttgtggatggaggaaagggcttgctttctgtggtggcccagctcgggctgagatgaacgagtggtggcttggaatgagtggtggaaggggatacgagcaagattccagcctaatccataacctggggttgcagctgaccacttgactgttttcagtctgcgttaccatcagggccacccttccctccatcgtcttttttaaagatctaactgttgtctgtttctgttgttttgattctccagtgcaatatttagcatgacattaacatcttgcatcagtttaatatggaaggcttctgaagatacttgcgtctgtggttctaaagctgatgccatctactgtgcagataaatgaaactaatacagttacatgtgaagttctcatgttatatgtactgttcttatgacagaaaaacgtactgttcttatgacacacaaacggtgactcttcagatatacagtcggtgttagtaatcaagattttccatgctcagaaatctatttaattgcagaggaagtcaacactggtctggcttctcatgggtatcagggtatgcatatttcctcttgttcgactaataaatgtttaacaagtgaacgcagctgtggtccaagaataagattgtaagcatgcttatgcgtttgcttcgtgtttctttttgttggtgagatggaccggtggttcccgtttggcagtagcgattggagcgctgctggccaaggaccacagaacagaaaatcaacttgtgtgctccaggccggatgctgaagagaagaataatcagcgtctttgtccctgtatcaggtatggaatacttgatcttgtcttctacgatcactagagattggccacaatttatcaggtatggaatacttgatcttgtcttctacgatcactagagattggccacaatttatcatttagcagacaccgcactagacacattttctgctcatcgagttggccagggctcaggtcgacattttttttttccctgcaagtcgtgtgttgtggatgaagtattgtgtctttaaagcgtgcacagtttcaagatttcttatggctgattctccttttgccgacttcactttcgaatctgtagttaggtataagaatcttcctgtgatttcagtttggtgttgcttctgaatttgtacgataacttaaaaacaaagatactgagtagtagtatacttgtagctccaaatggagatttgtaactcgaccaaattgcagggcaccactgagccatttgcaagttcgacggccgcaaacaggagagatagaagcatacttatatatataggggagagagcgcaataacataggaaaaaaatgattgaaattacgtgaaaaatgtggtgttatattttaagcaaaccatgtttatttatcggtttgattttgagatatcaaattttgacgtacaatatttccttgaaagtctaatcaaattatggggagtaaaagtggtaactctagatttatgatcaaaataacatagtgaaatcccttcacaagaaatgactcagtgaagtccatttaatgaataataatcttggactcgaattgttctgcgattttgctatatctcacttgaaagattttttctttatctctcactcgattttctcactcaaatttacagtgtattttcttgtaaattatagtgtaatttatgaaacttacagtgtaatttttgaatcttcgcatgtaagttttgaaatttatattggatttggtctttttcttaaagatatggtaatttagtatctattatggtgtttcttagttgctttttgccttttactatgtctattggattttaatccaaagattaaaaatttatatgatatgatcatagaaatctttcgaaagatgcataggtactccttgttttggaaggtaacgcaaatagccaatgaaagcgttttgaaaacagatcagtattcgctgtatgtggactgtggtggtcatttcatgggcctgaggcccttgggatcagcctgtgctcgcaactctatcacctgggccttgtgtagccgaccattccaagtcctacactcggactcaaatcactcaattgtcctttcctttgcagacattgatccttcctatggccggctgatttggaaaagcaaagtacccggacattgtgaattgtttgtgtggctcatccaatcaagcgatttcaccaatgtttaaacggccgttgtatgtgtaatctttgtacatcatgtatacttaactagacgtcatgtaatttgccttagaaagtaacaaagccttctctaaataactatttcctctggtcagaaagtggtgtttcgaaatgtgtgtaattaacgttattaaactttgacacttaagttctctttgaatatttcaactgaatatttgaaagtgatatggttagagttgtcttaaaatagttcaaaatatgtagagtaaatttcataaattccacctattattatggtccaagttacacaaaatcacagggattttgacatgtggcatataaacccaggtattttgtactaaagcttcacaaaactacatcgttaactattttgatatattcctatttgaaaatttcaaaaaaagtaatatttatatgatggataaaatatttataaatttgagatgtgattgtagaactcaaaagtatagtagatcaaaatcaaaatgatcaatgatcaatagtatggttttgtaaaactttaggatcataatatctggggttatatgtcacatatcaaaatccatgtggtttgtgtagcttgaaccataatatgtgaggttttatgaaatttactcaaatatgtattatacatttcatttaggttttatattagtaattatagtaattaaacatgtggattggcaactgtgtcgcggtctatgcgagggggtatgcttttacagtagggtagaagactacttcgaatgaatacaactcagaatgaaactcagaatgaagactactctaggttcttatattttggaacgaagggagtattaggttagaaattctgtgactcattacgtgttacagcaaccatgatgacaaaagcagggcaacattgtaccgtagatttacatggaaaccgtcaattttacctcaaactagctagctaagactgagaagattgttatgcgaacaaacgcacacaagcttaccgcgcgtatatgacatcctttctcttttcgttacaaccgtatttgcttttccgactatcctaacattttacgtgcaacatatcttgtcaggagttgagagcctacacgtttatgtgtcgtagcttgtttggctgagttggctcaattactagtttggatcaccttaagacaagaatacatatacttttttattatttaattcaagaattagttttaagatatttttgaaaattcaagtatcattttattcttgtacaaagtttttgaatataaagtttttattcgtgatgaaagtttattaacataaagttatacaatttagattttatatggtgaaaagtcgtttactttcatagaaactagtatggtggcccgcgcagattgcgcggctagcatcattatattttctctcatataatagcatatatgttttctcattatattgttcaaatatattaaaatgacaacataattttaaattttgcaataactttaaaaaactactaatgtgtaatattcatattatactttatatacgtgttagttattaattactttttaatatcaaattttagttatttataaattatatatattcctatatggactctagactcgtcttttaatatttctttttttttacttccgatttttctgtaaattgtatttctatatagactttatactcttcttccaatattatttatttttatttctgaattttcaaattatattttatatacgtgttagttattaattatttttaatatcaaattttagttatttgtaaattatgtatattcctatatggactctagactcgtcttttaatatttctttttttaaaattccgaattttctatagattgtatttttatatagactctatgctcttcttccaatattatttatttttatttctgaatttttattatttctaattgtatttctatgtggactctaaactcatctttctatattctttaatttttaatttcgaatttcaattacttctaaattgtattcctatatttatattcctatattgaccttaaactcttattcccatgtttttcttaattttgaattttagttatttgtaaattgtatttttatacggactctaaacactacttttaattttattatatttattctaaattttagtaagttttaaattcctatatggactctatactctacttctaatattccttattttttagttctgaatttatatttttttcttaattgtgtttctatatagactctatactctacttctaatattccttatttttaattccgaatttcagttatttcctaattgtatttctatatggactctatactcctcttctaatattccttatttttaattccgaatttcagttatttcctttttctattcctttaattataaaatagatttgctaggtaaactatctttaactattgtagaaagtttgtgtataaagatttttctcctgtagaaagtttgtaaatatattttttattcatgtagaaaagcttatgagcagaatttttattcattttgaatagactttaataggaatggaaaagtttaataatctagtaactatttgataaagttttgctatctaatattctcttcatttgtgtttaatagacatattagctctgaaaaagttttctattttgatcatcatctttttcttttgccacacattcttgggtttggatgctgtcgttgctttgttttagtcatgcatgcacgcagtaggtcttgtgaatcgaatgttcacccattccaatcatatgcagccacgtctcccgtacaaatgcaactacttgtggattcccctatgcaccaatgtcccgtgtattgagttgcgtttttcttggtcactgcgttagactcaaataggtcaatcatacatgaatagaaggtgtagaacattcttctagaaaacatgagaccctaattcaattcacatgttaaccccgggtgtgtttagttcacgtcaaaattaaaagtttgattgaaattgaaacgatgtgatggaaaagttgaaagtttgtgtgtgtaggaaagttttgatgtgatgaaaaaattgaaagtttgaagaaaaagtttgaaactaaactcggcctatatgacgcggatatcgtaccggaggagtgaacagtagccacacatgaagtgatcatgttaattacatgacgaatagtccagtcaaccaatttttttcgttaatttaacactcagtcagccaccattgtctaatactccatccgttccaaaatataagcatttttagtatagcgccaagtcaaactttttaaatttaactattagcaacaaaaacttaaaaaaaattaatcatgtaaatttgatattactatctttatcattaaacgaactataactatttttatttaaaatattttacttttatagatattatagatcaaattaatatttcgaaaaccatatcgaaaactaaaaataattatattttaaaacggaaggagtaataaaataagagactgagcgaaataccaaccaaacaaaacaaaaaccccccaaacccctcctcctctccgctcgcctctcgcctcgcctcgcgcgcgcgcggttcggaccctctccgatgggcgccgcggaggggtgctgcggcggcgccgcgatcgccgccgccgccggcgtgatcgaggaggccgaaactgtggtgccgccgcccgccaccgccatcgcctcgtctaaaggtactcactctccttgaactccctctctcttcgggtgcccccctttgctggattgggcttgtctgcggaaaatgttagcgcctggtcggtggcgttccgtttatgaactgcttcaggtgtgagtgaccacgatgagagatcagattggagcgtagggaaaatgtttgcctaaggtgttttggttgtgtgctttttttttttggaaagtttctacgagccagagtgtcattgtgttaggaattttgtgtttgatcttagcgttgtgtttgtcgaacgagtgaatcgatgctcccccaccaaataaaaggtctgaaatattatcttgtgttagctaacagaacgatgccattctgccatttagaatggaaatgcttgatcaatataatcaaaagggccttttaatggttccatatgcaatttatctggtgggcacatgcataattgagaaatatctgcgtaagtgtgtagctatcttttacagatacaaactttgtgtcccttactctgtaattaaattgcaaaagaaaaaaaaagagtcaaatgttttctatgatattccctttgcctgccacaatttgtgtatttggatagtttaatattttctgttcaatttaagcatcagtacatagctatgctatatcacaatgacttgacgttatgcgggagaaacatttcaggaatccggatcatgacgaggacacagaaaagccaccccttagacccactatctgctgctgaaatttctgtggctgtagcaactgtcagagcttctggaagaactcctgaggtctctgtccatctactacctttcatacaaaattatgtactcatgttccaaatatataattaagtcactcccgaaattataggttcgagacagcatgcgttttgtcgaagttgtgcttctggaaccagaaaaaactgtcgtggcattagctgatgcatactttttcccaccattccaaccttcactgcttcccagaaccaaaaatactcctatcattccaaccaggctgccagctaggagggccaggcttgttgtctacaacaaaatgacaaatgagactagtatttggattgtagagctctccgaagtgcatgctgctactaggggtggacattagagaggcaagctcatatcatcagaggttgttccaaatgttcagcctgcaatgatatatttccactttctatagatttattgggcacaattttcttgattttgaccattttattcaaactatttaacacttaatgagattatatgtagccaaatttattttctaatgagcatgtggttctaaattattgctggtgtgctgtggtatttgccactaaggccctgtttctttcagcttaggattattataatccagattattgggagtaagctgaaagaaacagacaacttattgaagtagcttattataatctggagcccagcttattataatctgataaactcatttaggtgagcttttccagattattgggtgaaaaattacccaccatgccaccccactccctctttagacttgcaaacccaataatctaggctctaataatctatgaaagaaacaactaaccgcttattctactacagattataacaatctagcttatagtaatctaactcaataatctagattataataatcccaagctgaaagaaacagggcctaaaacaatcagcggaatcacagaaacttagtttgatgcttactttgatagttaagcacttagtgaatacttatattaggtcaattactagatttatcttgtagtgcttgtgtgtattacaggatgccatggaatatgctgaatgtgaagctactgtgaaaagtcacccccctttcattgaagcaatgaaaaaaagaggagttgatgacatggatcttgtcatggtagatccatggtaagcttggtctggttaatttctgtagttaataaacgctttataaaacattcggggtttgctgtcattgtcttactgacgtagaatccttccctcattgaaaagaaagattcactcaccaaataattcttcctttagccaactgcacttctaccgtctttctccatgtctttgatttgtaaagaaacttgtaaacagtttttttagttgtatcgatccagtcactcactaattgatctagcatgctgactaaacaaaaggatttccctacatccttcttctcgtcctcctccgattcttgttgcgaaacaatagaaccttgaaacatgacctgttctagttgaatataggtgtgcaggatattacagtgatgctgatgctcccaatcgaagaattgccaaacctctgatcttctgtagaactgaaagtgatagccctatggagaatggttatgcgcgacctgtggaagggatccatatcgtcattgatgtgcagaataataccgtgatagagtttgaagataggaagtttgtccctcttcctccaccagatcatttgagaaactatactccaggggaaacacgaggtggtgttgatagaagtgatttgaagactcttatcatcaatcaacctgatggccccagttttcgtgttaacggttactttgtggaatggcagaaggttaactggttatcttctgtttcttgtttcaattgttgagcacttgagctactattagataaaactgactcaaaaaatctcacctgttatttctattgaacagtggaacttccgtattggctttactcccaaagaaggtttagttattcattctgttgcatatgttgatggaaaccgtgggcgtcgacctatcgctcacaggctgagtttcgttgagatggttgttccttatggagatccaaatgaaccacattatcggaagaatgcatttgatgctggagaagatgggcttggaaagaacgcacactctcttaaaaaggttatttttgttgttccctgttagtagtgttagcaaaaggaacacaggttttggggctaatttaatttctattctccactcaatcaactatggctggttggatacatatatataggctagtggcttacaccataaggtataggctagtggcttacatcctaagaaattaggagtggcttacatcctaaggaaaactaggagtggcttacatcctaaggaaaactactagtggcttatatcctaaggcagccaactattattccaaaaatagatgttaaaagcatatagtaaaaacaagacttaatctgtcattctccccctaagtcttgtgtggcgccttttggggaatttgaaccattccaatcctggcgcgaaactcctggaacttgacccgcccgagggacttggtgagaagatcggcgagctgatcctgggtgttaatgtagctggccttgatgctcccctcctccaagcagctccgaatgaaatgatacttgatgcggatgtgcttgctgcgctcatggaagacgggattctttgccatggccaaagcggacttgctatccaccctgagctccactgcttcagcgtctctgcccaagagatcacccagcagccgagccaaccagagagcttgagttgaggcggttgtggtagtgatgtactccgcctcgcaactggacagggccaccacttgttgcttgactgactgccaccacttgttgcttgaccgactgctagctgatcaggcacttgccgaggaagaacagcgtgccactggtgctcttgctcgtgtcgctgtcaccggcgaggtcgctgtcgctgtacccgatgaagtgctgcgcaccgggacacctcgggtagtgcaagccgtagtcggtggtgccctcgacgtaacggaggatcctcttgacagcctgctggtgctctgtcgtcggtcgctgcatgaaccggctgacatagccaacagcaaatgccaagtctggccgcgtgtggacgaggtagcgaaggctgcccacaatacgccggtactgcgtggcatcgacctcctcagccgtgttgtcgcggctcagcttcaacctttcctccatgggagtgtaggctgggttgcagccggtgagcccgcccaactcgacgatgcgcttggcgtaggcagtctggcgaagggagatgtcagagctgtcctggtgaacctcgatccccaggtagaaagagagaaggcccaaatcgctcatctgaaaagtcgccttcatctcctccttgaacgcctccacctcagcctccttggtgccggtgatcaccaagtcgttgacgtagacgcctaccaacagggcattgttgtccttgccccgccggtagacaatagcttcgtgagagctctgctggaaccccagttgcttgagagtggagtccagcttggcgttccaagctcggggcgcctgccgcaagccgtagagggccttgcgcaggcggagaaccttgttctccttgccggggatgacgaatcccggcggctagtggacgtagacctcctccttcaggtctccgttgaggaaggcggtcttgacatccatgtggtgcacacgccatccttcctgggccgccagcgcgaggaggagacgaacagactccattcgcgcaacgggcgcgaaggcgtcgtcaaagtcgactccctcctgctgaacgaagccgcgcgccaccagacgcgccttgcgcttgatcactgccccggcctcatccttcttgagcttgtagacccacttaagggtgatggcgcggtggccggcaggaagatctgcagcacccacgtccggttccgctcgaccgcgttcatctcgtgctgcattgcagtgcgccatgccacatctccattcgcctctgcgaaggagcagggctcgccgtcctcatgcgctaggtgcagctcggcctcgaagtcgcgcgtcaccagtccaaggacaggctgatcactgaagatgctgtccacggtgcggtagcgcagaggctcgtcgtcgtggtacgcatcaacacgatcctcgtcgttggacaacggagtggcgaactccaccggtggtgtgggcgccggtgtaggagagcggggcgtagccggtgatggaggagtcgctggtggtgtaggtggtggaggactcgccggagctgatggcgagccgggtgccgaggtggatgagctcggtgaagatgagctgctagctcctctggctcccccaaagtggacgtagtcgacgacgaagtctctgagcgtcgaagtcgagccgtcgtccaccgccttgtcccaagcccaacctcgcccttcgtcgaacacgacgtcccgagaaatgcggacgcgctgcgtcgcagggtcgaggatgcggtaggccttgacgccctccgcatagccgatgaagactcccggcgagctccggtcgtcgagcttcccgatgtggttgagctccttggcgaaggcgagacagccaaagatgcggaggtggctcaccaccggcttgcgcccatgccaggcctcgtacggcgtcttgccgtcaagggccttggtgggcgagcggttgaggagatggacggcagtcatcaccgcctccccccagtagattgctggcatccctctttgcttgaggagggcgcgggcagtggccaccactgtctggttgcggcgctccacaacgctgttctgctgcggggtgtatggcacggagaagtggcgttggatccctcgtcagcgcagtacgccgcgaactcagccgccgtgaactcgccaccgttgtcggtgcgtagcacccgaagcttgcggccgcattccttctccgcagcaacttgatggcgcttgatggtgtctgcagccgctgccttggagtcgagcaggaccacccacatgtagcaggacacgtcgtcaacgagcagcagaaagaagcgccggcctccaggtgtggccggagtcacggggccgcagaggtcgccgtgcacgagctccagcttctccttggcgcggaaacttgcttggcggggaaaggggagtcgccgctgcttggtgaggatgcaggtgttgcaaaactgctccacgtgctcgactcgcggcatgccctgcaccatctccttgttgccgagctgcttcagggcctcgaagttgaggtgcccaaagcgctcgtgccaccgccatgcatcatcgtcgcggccgtctgcaaggcagacgggctacgccacctgtacatggagaacatagaggcagttggcgcccctgttcaccttgacaagaaggcgacgatggcgatcccaaacccgcaagaccccgtcctctatctccacgcgcgagccgttctcatccagttgtcccaaactgatggtggagttcctcagcgcggggatgtagtagacaccggtgagcagccggtgctcgccggtcttggcggtgaagaggatggagccgacgcccttgatctccacggcggaggcgtccctaaacttgacggagccttgaacgctggagtcaagctcggagaagaattcccgccgcccggtcatgtggtgagtggcaccggtgtcgaggcaccatccgtcgatcttgtcgccgcaggatccgttgctgaggaagacgtgggcccgcggctcgtcgagttggaggggcgtggtagcgtcctgtgcgggagtgaagtgcggctcgatgcttctgtgtacgaaaaacagagccacctcgtcaccctccagcgcttgagcgacgtgtgcttgaccgccgtgcgtcgcctgccggcagtccttggcccagtggccggtcttcccgcagttgtggcaggtgttgtcgcggctgcccttgcgctcgccatcggcgccgccaagagtgccactacgcgccttctcccacttgcgtggtcgacgcttgcggctactcgacgatcctgaagccgaagagcctgtggcctcccccttcttctgctcctgctggcgggcgagccactgctccttggtgaagaaaagcttgccaccaatggtgatcggctctgagggaggtagctgcttgcggttgtcgacggccttgaggcgacccgtcacctcttcgatcgtgagctcggtgaagtccagcagcgtctcgatcgacagagccagctgcgtgtacttctcggggacgacgcgaaggagcttctccacggctctctccttgtcgatggtggtgtcgacgagctgcgccaaccgctgctgcaaggagttgaagcggagaacgaagtcgtcgatgtcctcacccggcttgaaggccaggttctcccaatcctgacgcagcttctgaagcgtggacctgcgggcgcggtcgctgccgatgcgtgccgaagcgatggcatcccaggcgtccttggcgatccgcttgttcacaatggaggactgcatctccgtcggaacagccgcaaggagcgcctccagcgcccgccaatcttccccgtagtcgacgtcgccgtaccagaccgcgtcccacatgtggcgcgcctgcaatttcaccttcatcaccatcgcccactcgacgtagttagtcttggtgagcatgggccatgcgccgccaacatccttgacgacggtctgcacaacgggaggagagccggagggtccacggcgaccacggcgcctgtccggggaaggggaggcgcgctgcctgcgagggctccgtgcgccaacgtcccgtccaccctgctcccggtcgaagtccagttgtgcctcaatcgccgctgcctgctcccggagtcgctgggcctccagggcgcggtctatccgaggatcgcgccatggatcgcgccgctcctcctcaccgcggtggagatctgctcctccgcgatgggggctgaagtcgcggtcgcgtcgacctgcgtgtcgatcccggtccgcgtcgcgtcgcacgcgggccgcgtctgcccgctccaggtcacgccactcctcctcctcctcagctcgcaaaacagcagcagcagctgcagcctgcctggctgcctccgcggtgcgcgctgcttcagcttctgccgccgcgagacgcgccgcccttgtggctgcctgcagccgcgcctccgcttcctcacacgccgcgcgtgcttcccgcgcagccgcttgcgcctcctgcgcgacccgcgcagcagcagtcgcatcgccgtcgccctcagcgtcagccgccgaccgcctgctgcctcgtccactggaagtgcttgaggcatgggacgagagagagggggaacgaatggagtggagagacattttggatggggaatcgatggaactcagataaaccttgctctgataccaattgttagcaaaaggaatacaggttttgggactagtttaatttctattctccactcaatcaactatggctggttggatacatatatataggctagtggcttacaccataaggtataggctagtggcttacatcctaagaaactaggagtggcttacattctaagaaaaactaggagtggcatacatcctaaggaaaactactagtggcttatatcctaaggcagccaactgttattccaaaaatagatgttaaaagcatatagtaaaaacaagaattaatctgtcaagtagtacctcagttaatatactaggctgagtctaaggtgcattggaccggcaactttcttgttctacgtgagcacatttcccgaactgcttaatgatattctttttttcaaaaaaaggtatataaaaaagtatcttttaaaaaataaataaatccaatttttaagtttgtaataattaatattcggttgatcatttgcggcttgtcttgcttctcgtgccgctgaaaatcccaatccaaatgctagaacaaacgcagccttacgataaaatttcaaatcaacctgatttgtttgaattaatacagaagagtaatttacttgaacttcttccatttgcttattatttttctttattgtcttccaagaatttctcatttcatattctttaaaagtaattgaaattgtgttctttaggcttagtaatgcttcatgttgcacctaaaagctgatgcccagaatttttcgtatggttgcacctaaatgctgatttgacttaattttgtttgtttttgaaaaaacttaattttgtttgttatactgtagggatgtgactgcttgggtcttataaaatattttgatgcacattttacaaattttactggtggtgtggagaccattgagaatgttgtttgcttccatgaagaagaccatgggatcctctggaaacatcaagattggagaacaggattagctgaagttagacggtcaaggaggcttactgtgtcatttgtatgcactattgctaattatgaatacgggttctattggcatttttatcaggtgagtagttcaccttttcagtggaatgtctacagacacaattatactttcgaaaggaactctagttcctgatatgtttttttgttggttgcaggatggcaagatagaagcagaagtaaagcttactggaattcttagcctaggagctctcatgcccggggagcaaaggaaatatggtactactattgcccctagtttgtatgcaccagttcaccaacatttttttgttgcccgtatggacatggcggttgactgcaaaccaaatgaggcctacaatcaggtaggctgcttatcaaccatgttgtgtgggcttctattttactgtaattttgacttcaaaatattgccgacttacttgtccacctgcactggctgcttctagtacgatattgttccatgcctttgtactttgtttattttcgtcttactattacccgtctatattatgtataaacagctaagcttcctttacttttctgagaagtatgttagtttattctagtccacgatttcatgaagtcctccatttctttgcattattatatagtaagatgtgatactgctgcctccttttccattccaggtggtagaggtaaacgtcaaagttgaaagtgcaggcccaaataatgtgcataataatgcattttacgctgaagaaaaaaaatttgaaatctgaactacaggcaatgcgtgactgtgacccttcatctgcacgccattggattgtaaggatttgtgtgagaaacattgtatcgtcgtgcaaactcaaactttctgtgtgactgacactgctggacgcatgtttgttcaggttaggaacacaaggactgtaaatcgtactggacaaccaacagggtacaagctcgtacctggttcaagctgtcttccactggccctgcctgaggcgaaattcctgagaagagctggatttttaaagcataacctttgggttacatcgttcaaaaacgatgagatgttccctggaggagaatttcctaatcagaacccacggattaacgaaggtttagcaacatgggtaaaaaaggataggtccctagaggagaccaacttagttctctggtaagttgtcaccttctaacaattgctgtcgatcttccatgttcatctgattttctagcttaattatggcatatctgaaataaaaacatgtcatatgcaactacaggtacgttttcgggattacccatatccctaggctggaagactggcctgtcatgccagtggaacgcatcagcttcatgctaatggtatcactttggccttcgtttctttctccattgttctttatattacttagatggttttttgctgcgaaaagatagtattcttgtcctaattgcttcagataacattacgactttacaactcatctgaaaatggaagctatatatattggtttggttgtccagcctgatggactcttcaactgctcgcctgccatcgatgtgcctcctgggcctgatgtttagtcgcagaaggatattcaggctgagctgatttcaaagctgtgatgtgctgcagcttcctactgtggtgtggtgttttagcaagcgaacttgtggtgttacgatttctttgctgtggctctcgtgctgtgcgaatgtatgattgctttgctggtatatatagctcaatatttctgctggtcagttataagtttgtaaaaagtatttttggtagacgagcgccctgtcgtcctcgcgcgggcaaccggggcgaaccctagcccccggccgccgtcacacttcactccccttccccaccttgccgccaccgaagcgtgttgccggaaaccgcgcggcctgccgggatggcggcggcgaggctcctatccccggcggcacggctgtctctacgcgaaggggcggcgcggaccgtcgggaaggctgcgcagcggcgagacgttgtggcggcggatccggcgccgccaccgatggatctggcactcccgcggctggatccggcgtcgccaccgccggatcagggccatggccacacgggcgcggcgttggtgcgatgccgacgccggcgaaggtggcgaggcgcggcgtcggcagcaaaggcgcgggcgacggtgatagtggtggaggcgcggtaggcgcgacggcggcggaggagcgggcggccgtggtagccgcggaggcgcgggcgacctcagtaggcgcggaggcacgacggttgtgactgtggcgtgcggctgtgcctggccggcaattggccggcaggcgcggtggctgtggctagctggcggccaggcggcgtaagacatcggcgtggagcttgtggcgactgttgcgacagcggctggatggcggcgaggtggctggccgtgactgcggtcagcagcggctgcggtgatggtgaccgtgattgtgattggaggaggcatggcggtctcagacggctagccgagggcgtggcagacggccgcacctggctgcacggcagcgattggaggggtcggaggccggcttggcgcagagaggcacagccgatggcagtagtggccggcaaggcgcgagaggcgtggtcagtggcgaggaggccggcttggcgcgagaggcgcaaccgatggagggaggccggactggcgcgagaggcgcgtccggtggtggaggaggccggcgtggcgtgatgaggcgcggccgacggtaaaggtggcgaccacggtgcgaggaggagctgccagtgggtgtggcgcggtcttcggcacacgaaggctggctggcagggggtgtcggtgcagtggtcccacatgtcggcagaggttgagcgatggtggagcatcgatgtgtcagccgtggactcgcaagtgatgagcagccggtgaaaacccagcccggctttggccggaccgacaacgatggttcattccccctcccgagggcgttgtcgtgccatctcatccctcaagggtggttgcctggtgaaagtccagtcttggcacttttgagcccctgacggacggcggcagcagttttccgctacttctctccttggagacgtcgttcaggcatccccttaccgaaaccactcgaacgattagggcaatcacgctctagatagagttgggctttgtgttggttgtaagggcgtttttttgggcgttcccgtttgtgttccgttgttcgtctagcggcggtcggtccggtattagccttctcgcgattatgtgtgttggcgctgtcggtgtgtgggtggtataatttttttttcctttatcttggttacgacctctcagggttgtaatcttataattttttttctgctctatcaatagaacttcgcactgtctcgtgcgagtcgttaaaaaaaagtttgtaatgaagataagctggttcagattttgtgtaagatcatggtaatgaaccagtatatgttttttttccctgtctgaatcttagcaaaatgttcagtccattttcttgccagtgggtcggcaacttgactgggcatttcccccagctgcccagtcgacaaaccatctggctacatgtccccgaatatgtaattcttaaaaaataagagctagcttctcaagaaaataagtagataaaaaaaatcgtatgttgcttaagatgcttattgcgattgtttatccagttattaatataaacaaaattgctcaagatgattgagcacttatgcgtcttcatttttgctcgaatcaagtgcaatcacccaaatacaacttttacagtggtatttatcctctgtttttggttctttaaatttttatatgtatgcagtaaacagaactacttaagcacaaatttgctctgctttagaaagtagttcctggtggtggctaatcatggccgagttgctagaagattgcaactttgcaaggcttttagcataaagaaggatagaaagttgtatcggccatgaaacgatggctgggaaagcctgggattgcctattggatgaagcattgcaattggggaaagcagcaatgggatattaattaaccatctactctctcgtcctatattaagtgtagtaataggttccatatcgtctgaccgtccattttatttgattttttataattaatatttttttattgttattagataataaaatatgaatagtactaattattttttttaatttttttaaataagatgaacggttaaacgttgaacacagaaatctataaatgcattttaaatggaacggagggagtacttagaaatatccttaagtggcaatccatcaccgttagtggtgtactgtttattggtatttaggtgcatatcatccagatatggaccttttaaatggcattggcttgttcaccttaggctagttatggtttgtggtcactagatgaatgctatcatcatcatcatgctcaatgaagaacgtatttactctcattcagtcgccttctcactgattgtgttgggttttctctggcttacctttttttttcaggtataatatatctgatgttgattatatttattttcttttgctttatcccttctgtgtgctgtattcctccacaggggcagacggctaccattactttattccaattggggtaggccaggtagtcaggtacgtggtgtgtgctttgcatcaaggtagcgctgcatcatatccgatttgtgccgcactatacctagcaagcataaacttacctttgcatccttttcgtgttaccatcattttatatctgcaaatgtttttgaccaactaccaagccagcccaaaattaattgttaccacttcataggatgaagacactttgaagccactactctcttcacagtacatgctatttttaatgggacctataaatattatatatttccgtcccttacatttttatatcaacccttgtttcattttaatttacatatgcacgatagagggtgatgtggagccgcggagccgcctcactgatgcggcaagctagagccagttaccatagcggtatattgttcatgcacctacatctcttttttttttttggtaaaaatggtcgctaacaacacgagccaggccgtcccatactaacaaccaaataacccttatgtgccatttagactccgtaaccctcctcctagttctgtcaccgagttcgaacactctatggacttggaggaatcactctagctaaggctatgttctttttagcctattcactaaattattagattattgaagcagattatttactctacctttcgagaaatacatttccttaagaaactttattttactgtattgcttagaccgtttgttttaaaatatttgctaagtttatttcaagatttttagtttagactacctccgtccttttgactacgtatctaaatttgttggcagtgccagtatatatataatcgactagatgatctgtggtaaaatttcactcaatcatatagatcaaacagaacgttacgaggccaacagatcgcctaaacaggctaccaaaaggaaggacagaaagagaagcacagcacaaaggtgagcaccactttgtgatgtgatgcccttgttcagttctttgtggcgtagtgctgcagctggtgcgaagcaacctgccaaataaaagcacgcaaattggctccagccgcagacccaggattttcctttgaacttgttctcgtgggatcatgctcctctaccttcaaaggtaggtgtctttatcactgacacgtgcacctaataaaccatggacccacttatcagtgataaaagtacggtgtctttgaaagcagaggatcccaatccgttctcgtgatgactgttcgtctggttttttattgaggatactcgtttggtttaagtccgtaatatcgtgttgtgtaagtatatttagttggatggtttttagtgtaattaagattttgtgcgaggaactaattcacatgttgatgttaatactgttaaaagaattttttttcatcaaagaaatatttacatcgaagtagaagaaaatgttctcctaaaaatgctctacaatacaagagatatataacattttagagtttatttgaggctctgtttaaaggaactagatattctaagaagtaactaatgaataactagtttgtgataagagatcttttaaggtgcttgggaggtactcagcgtacctttcaaactattgaatatcaaccgttgattgctaaatgtgaatttagaaatagaaaaaacacgacgatgggtaatttagtaattttttctagtcctaacaacttctaacttcttcctgattgtttgccgctagcccctactctattgactgttgctcttgtattacttttgctcactaattctcatctctcgctgttgttgcttacattattactttttttttgcagggacattataatagttacttattaggagataggaatattacataaatctatggtcattcacagtatcacatctgctagtcttttgaaggcatttttcttctctatctttcggacgacctgagcatgccggtgtcgaccacgtcttaattaatccatgaatgagctaccaaaacttcaaataatatgacattccccgttctgtgtagatcaattttcataacaaaataaatccgtaattgttcacaatttcatgtaatccatattagaaacttcgtaatgaaacaaattcgagaagaatcgaagaacttatatatgttatagtcatttccttttcatatctgttagattgatataataccaagggacaaaattacctatataccctcccacttaatctctatttttgtacctggcccaccttttttaagtacctttctatgggcaccttgtatcgtaaaccattggattgtacctaatcaacggttaacgtgattttcaagtaccggaaaaagtctcttgtgataatatggaaaagctaagtttcacaactttcagctcctagttcatttaatctaaagttgtaggtggcggaacctcggctaaacagggccttgagtaaaagttacttggtactagtgtcaatccatgattgcactgtcagtactcttgaggacgatgtgttgaaaaagatgatacatacatgtagggtacatcaccaacctatccagatattggatgtgagacgagtcggaactcaggaagcaatagttgaatgtttggatttaactttttaaaatgataaagatggatttgtattgatcataaattgcttcaaaactataactgttatatttttcatagttttatacttaaatagtttgtaattaaactagtgtcctggtgagtgtgtggtggttcaaaacatgacctatttgtgaccggagatggtgtgcattatcggctctgtttgtttaagtcatggctgataagccgtagaaaaacaatgaagaaaaaataatttataggtaaaaaaccctatctcttttaaacaaattttaatgtagctatactatgtattcggatcttcaattggaaattttaaggcattaaggtatgctgggtggtctataatattgaggtttcaccttaatttgttttgcaacaaactagctgacgacccgtgtacctgtaacaaatgttttaagagatgaaagtaaaagcaaaaactacaagtttatagcattgttagtcgattaagcacatagtgtcatctccgaaggtagccatactgaaatatgttgctagaccacctctttttacccttgtctattttcacaagctatacggttgaacaatacaagattggattcatctatgtgtggaaggtgaacttgaaggttttgtgtataaccctttactatttctataataagcaattctagggccattcacgttttgtagggaccttatgcttgtagtcccacgtgtctgtttatggtgttgtagataatctcggccaccaccactaacatcatttaaaatagtatagatatttactatatttttatttcatttttttgtgattatgcactatgaatgtgccccttaatatatgtccaattatgctgaagttgaagtgctcttattacggttgtatcacctttatgtaaccataattggttgagtttaataaagtttccattataaaacatatgttcaaagagatgagcaccaataataattttatgatcttgctagaattatataaaaaaacatatacaagtatgcaggggcatagacaagcctaagataattaggcttgtgtcccaggcttgtctccttattcccttgtaaattatttcaaaaattcatagaaagtttaaagattgccctatgtttagtaaattcatggcttctccttgcatgtatgtgtgatcatgggaaccgagaattggaccctatccagtgaagcatacctttttttttcattgtggttatagcaaattttctttgcaagtttgttataaataaataccgatggatattaaaaacgcgtaagacgtccgatgacaaagaaatatcaaacacactctatgtcaggccccgccaccccttctctctctcttcccctccctctttccattgaacgcatcaagcccctttgcccctcccctatctctctctctcgccatttttcgttagcctaatatacaggcgcagggtcgtctaccactatagccaaaatcttcggcgagagctctgacattgttgtggtgggaccctggcctccatccttttcctcttcctcatctccgctactggtcccctccatggaggaaagtttgacaggacagcgctaggccgtaggcgatgatgactgtattcgaaggagttggcaaggcagcggtagggctcccatgatagaaaatcagaagctcttgcagcaagggaggcaaatccattggttggggtagaagaatgtaggaggtaggcatttttttttctttttggagtttttttttcgggggggtgttgcgacctattgtttttcatgttgcacattggtgtacttgaagtttcactctatttcgattgtatgttgcacacttcgattcttgggtgttgcaactagtttgtttgaatgttgtatctggttgaaacatttttctctaagtggtgaaacagttttttttatcaaatattgaaaaatcggatacatttttactggaatttttttcattgagcggtaaaacatatataatatttttgtacattggatgaaacgccatccgataatttacaaatcatcgtgtgtccccgtagctatgtccgaatatcaaaggatataattaattgaacgacaaattattatagaatcatgacacagcgcaaacataattcagtggaccctagtctaatagcccccaatcagaggaactagttgttactttcatcaaagtaggcaagtattagccatattaatgctacagtgacacatcaccctataattttgtcacgtaatgactcctattcttggtcgtgtctaatcgataagaggtagtgtttgtctcccataagcgaagaatagttgataagaagtgtcaagtgaataggtggcacacagctggataacatagtacatcacttctaccttgtagaagcaaaggaaaaaaaacaagtagttacatgggggaagatttcctggtccatgaaaactaatatctccttctgaatggagaagttttagagaaatttcatatgaacggaactaatttttatagaaataatataaaatatatttgtcccagagggtgtaaacttgtatcccttattaagaaaaactaattaaggttacgctcacaagtgctggttgtggctgccaggtgttacaggaagcaagccacattttttctaaccagctagttgggctgagctttttagggggatgcgaaacgaggcaagcctttaatgcatgattaatcagtttaaattattataaattcaaaaaataaatttattttaataaatttttgtgtccaaaaattttgtatgaaacatatcgtttagcggttcgaaaaatacgtttacgaagaataagaaaagtagctaatctcaaaatcattttagaacacactctaagacctcaggtagcctaataaactctccaccgagcataagactagtgtgacattatgcttccaaacaaaaccctgaaacttgtagctagagctgctagtttcatggcacgagaagtatagatgcaacctgatctcctctaccttgcaacaagctagtgccagccagccaagttgccaacacagcccagatcagctgaagccaacagaaggcagcagccactgccagtgccaaggcagcggccaaagccaatgggctgaggaggcatgggtgacaacgccacgtaggacaaagtgcacaaacaaacggcgccatgagagcaaggctaaaaatatagccgagccgttggctataaagttttttgtagcctttttttagcttatccatagaatagttagctcatccatttgtctttctcacagattgtctcgtaatttaacagaccgttttttttctctctcctctgttttcttctccatctcaacatttagccggcttatagcctactctgactggtccgtacgtatctttgctttcagcgggctggaggtcactacctcctgcacctgaatcctccgaccacccaactccgtagccccatctgtgtgctgtcctgcttgctgctctttgcccctcttttcttggctttcttcgtgcgtctggtatacatacacacccgctaatagtatccattcggagatatttatttgtccccataacatggtcaagcctcatatgttgtgatctttctcaagttatgtgttatgtatgtcgatgatttctgttaattatagggttatctattttctatggttgataatagaatattaatgtatcaaaactactttaaaaatatgccccgcgtcatcacgttgtagaaatttattttatcgagtaaaatatgtggaaggcttcgcggcgcgtcacattgagttcccctttaccaaagtgtcataaactgagcacttcactaaaaattttataacctaaccatatggtttcaagttcaatgaaccttgtttagaaggtaccaaggagtacagtggtacaccacaagggtactgatgcgctgtagcactcgtactccttatgacccaaataaaaacaaacatcaccaaacgacgaaattgaacaggcggagaagatgaccatcggacgtggtagggatgcctcaataagagcaagttgaatagtatagcccactactggctctaaatcatctatagccaatataatagccaatttatataatagtttcttactatactattaatacctagtcccacatgtcatacacatattacatcttggagtccgtgctacagctagctatagatctataatctgctgctcttctctcttttcctttcttttttttaaaatatgtttatatctggcctgctatcgtaccggctctgagcagagcggaccaattaaggccacagcacatgagggcacagtggatctgcacgctgcaagcgacaatggagtcctccccagtacacgtggagggaggagagtgaaaggagccaggcttgcctgggccactgtgctgctggttgatggactctttgcctagtgaagcctcttcaattcctccattgatctttctttctgctagatcagcatggtcatggccatgctccaattagagtgctatacactggagtacttgcggaaatgcttcagcaactgggaagttaattaagtgagcatggactcaatggactccactgtggagataaaaaagagtggcgcttacttgcttatactcaatattatcttggagtggagctcatgatcaaccagagtgatctaaatctaatcttgtcgatgcctagcttaaaatgtgggctagaggttggacatggcaaatttgattgacatgctaccggcaagattggggttataaatgggatgggacttggccaccaaatataggtgctgcacaaatgatttatgcaaggcgcagatcaccacttttaatttgtgtgactaaattttaaattcctaaaaattccatgttaatttataattaatatagcttatgtaattacattgtttgggactaatttgatgttagcctagtcgacaactcatcatctaatttgatgtcctaaagcaaattttgtgttgcgttgtcgatcggttcgtctaatgatgattgtaagccgtacaatttactaaaagataatttatgggtcaattttttatgtataagtcattagaaatttaaaagataatgctaaaaaataaagtacaataaaaaaagacataacaacttagagcaagtataataataggttgtaggccggctaaatgctgaggtggagaagagaagagaggagaagcgggctgcaaacttacaaccggcttggacaccagaaccaagaaactctgtgagagagacaagtgggctctgtattaattataaagagctaactattacaaatcggctgtattattagccttgctcttgtaagttgcagggcaaacgatgggggaggcttaaaatttaatggtgtggacaacctttaagtaacatggtccaatttcaactacaacagtattctccctaacaactcattttaatccgatctctcctgaaacaaatcctggtgacatgagacaatccctatgcagatggtcagatttcaacttcaacagtataacccctaatatcactcgactacattttcatcctcttagaattttcaaaatgcaaaacaccgtgttagtgacatcccactatcccaatcgatcaaaaccctgcctccttaacctgctccatcagcgcaccccacacgcacttcatcctttaaaagcacacaccacccctctccagggagaagaaaaatccccaacaaaaaaacaaaagaagagcttgatgccataggagagcacaagagctcaaccacacacacacacacacagagattttgactattaattttcatcgtctttggttttaagttggtgtgtgttcttccatggccggcctgagtgtccttcttgagacacacaagaacgatcaccaccccaacatgaggcctccccaaatcatcagcaaggccaccctccatagccacccagagacgatgtcctcctcctctccggcgactgcgacgacggcgacgatgagctccttcttgcagcgctgcttcctctgccgcagggagctcgccgacggcaaggacatctacatgtacaggtccgtccgtctccatccatggcatgcatctaagctgtctcttctgttgattactctgtccattccatagtactataatagattttgaaggacatattttaatactatgaatttagataaacttactggttagattcacagtaccagatacgtctcgcctcttcaaaatttcttatattttaggacggagtattatattactgctgaatattgatgtatatggctatatatatgcagaggggacagagcgttctgcagcgtggattgccggtgcaagcagatcttcatggacgaggacgccgccgccgccggcggcaactgcgccgcggtgcgcgccggccggcggcgggcggccgtaccgcgcgagcaaaccggcgccggtggcttcgcgtactgatcgatcgaatcatcgatcagcccagccgtacgcgcgcgcgcacgtagattaattagcacaaatgaaacgaaaagcagaagatatcaagcacgacgatttggggaagatcaagatgcttgattcatcatataataataataatttattattcactcgccaatgaaaatgtactggttgattaattaaatccctttctttggagaatggattcaaatcgagcatggagtggagtacgtggcagctcatctgcgtggggcccacgtgtagatatgtgtacatacgtgtctcctctcctgatcctctgctggtcctggagtagctgtaaataagggataagatgggccaaggctgggacactcttggaccctctcctcttgaagcggatcatgaccgtaattaacggcgacaatgctcttttttaaaatactccatgtctttgttgattactctatcttttttagaagagtatataattttagcttaataatttatctccaaaattatagttttagagtggtctactagatatgtttaacacaatcaataacactctcttctcctcgtattaacaaaggacataatagtgcccaccaagtcagacacttcttgcataccctctgcggtctccctgacagcctaggggaaaggatgcctgagaaacacctacgctgatagtgctcctacgtagcgcgtgaattcgtctacgtgatggaaaaagcagtggggtctatagctacgttgggttctccgtatctcaacaaaggctgtgtttagtttagcacaaagtttagattttggttgaaattaaaaatgatatgactaaaaagttatgggtatatgacaagttaatatgatgaaaaaggactgaagtttaaagtttagatacaaactttgaatctaaacacagccaaaggaacgaacacctcgcgcaaaaaactctggcacaggacccacttggtgaggactcggtgaggagaagagttgggagatgttgtagcgccgactagtgtggccgccgttgttctcccaagctggtgaagcctcatccaagtcccccacctgagaaaatccggcggcgctgatgcggccgtcaccgtcaccgctcggaacgagggagttccggaccgccaccgctctgcgtcgagatggccccttgctgctccgctcggcgcttgctgaagatgccagaggacgctgtcgctgctccgtgtcgagaaggcccgcccgctgctccgctcgatgctcatcgccgcgtcgccgggggagctcctcgaccgccggccttctaggcttctccgcgcgcgagacggtgttggcgccggtgccactgagggttgaggggagagtaatcgggtgccgccatgaatggagaggaggggcaccgaccgggggagctcgtgcagctggtggagtcgccaccggggcacgccacgaccacgtcaccgccggcgctgacgaccgcgcctacttcccgtcatgcccgtgacgacgccatcgtcaacccgtcgacaacaccgccggccatcgccccggttgcggatctcgagcggcggtggcgtcgtcctcccacgtcgctccactccagatccgcgccgccgccgccgccgccgccgccgctccagatccgtggcgccgtcgtcaccaccgcttgaagcaaggacgagcctgacgacgccgcctcctctccgcttcggctcaacaccagtaaaaggggaaaatgggagagagaagcaccgggaaaggggaaaggtaaaaaagtggttggcttgggaatcccgtgaagtaacttgcatgagaggagtggattctatgtgtatttgttctacgtggcatggggcttacactgctactgcctaatagggtgctccttgggttggcggcaccgaagtcaagctgatgtcgtatcggtgtcagatgcatatcaaatggaaatatggcgatagagagtcggccgtctcctgacgggattcctccgacatgcttgtagtggctgcagttttgctaggctcagcgccacggcctcctgcacgagagggcgtagcgcgcagccaccccgcacatgtctcgtacggatagcaagtgtcctcgatgagtttaatggactaaggctttgtttgatttagcttaaaattattataatttgagttattagaagtaagttgaaacaaacaaatagcttattatgatatattattacaacctataagccagattactataatctaataatccactataagatgctttttttagattattaggtggctaacaactaacaaataactaataatccaaagaaataaacatctaacaacttactctatgtaggtttattataatctagtttatagtaatttggctcaataatctagattgcaataatcttaaactgaaacgaacgtggccaactcgagtcttagagagttgagtcgagttcacttttaaaatcatttttttaacaaatcaagccacgcaagctcgtcgattcattatgaggtgagtgttagccaaagcaaaactgagaagagaagtacattgataacaaaatatcagcatggggaaacgtcattttgttcataggaggcaacaaaaaggaacaacacataaataacatacccaaatattaggtcgatccattcatgcaaatgagcggagacatgatcactctcaagagctttcctgtgtttacatatgaaatcaacagggttgagaccaaggaggcaattccacggagcctgtaatacagaatgaaataacttacatagctttccagaaagttgagttgaccctaagtcaaccaaattcacattagtgtaactcagtaaggtaaaatatctctggaatctacagaaataatcaccataattaggttccaccaaagattctgattagacttccgtgctaagcaatgcacaatataccacagtgaattgagggcacagtttttaacaaaactcactaacttttttacattattcatgtcttcaaggacactgttccatgttctgttgatacaagaaaacgtgtgatcatattgaccaaacctgccacattgctgctgaatagaaagggccgtaaaaggctctatcctgacaagataatataacacctgcagtagatgcttatgtcaacaaccaatagcacgataacacctgaagggattgtcattgatgaacagtagagaaccgattaatcaaatgggatgacaataaattaatctaactccaaacaaaaggggcaacacacaagcaaaatgctgacacaaaacatgcataatctaagaaaaggtaccatgccaggacaggagcaatgtgaacggtaggtgaaattttgggatgattgggtcgttgaaactagagtaatgttcttggggtttctccagtcatgcaggattcagagcgccaaccggctgcattgaaaattttgaagtatcactatcagcagttattgaacaagatatcatccccagagtaaatgaatggaaaagaaaaaaaatgcacagaagaggtccaaattggcagcaaggaatgaggtacagaatccacttttggaagatctcagtatgcggacgccagacagatcttccagatccaaaatgttttggagtggtaatctgctaatatccatggaaaaacagggtattgcataaattactagtgatcatttaaacacagtagtagatttattagatcagaaaatgagagttatgaagcaaacatgcatgtgcaatgtcgttgtaactgcgcccagcaagagtgttcagttccatcaggtagtcaaaattgctaatctgcacaaaaggacagatctacttaaatcttgaatacacttaacatgttgggctgaaaaggtggttgattgcatatcaacctcccatctagcccagcactctgtcaattgcaacttcttacatatttactcaggtctcaaataaaaatgcaattgattaaaacttccagtaagagcagatttcaacattgaactttgcagaagaacaccaacctgggtagctaggaaaatgttgttcaaataaggaggttttgtatgaatggttgcccgataaataagcatgtttacatgctttctgtatcctagataaaaatcatatgcatctttaaaatatttaggcagctgtagtgtgctatatgattccaacaacgcaaactagagtatcatcaaggatgtacctcgaaatcgaagaaatttgacctatctaccatgaatagctctaaagcactttaccgtaacaaatacctgcacagttcatttaaatcagtatgacacacaagtactataaatggttactgctgactcagtagtccataggtatatgagaagggcacagctaataaaagcgcaaaagttatattagctaacactaaagacagtgcagcaacaagttcagtgtacaccttcatactagataataaagaatcatttaccttctataaatttgatgaagtggagatatgaagcagctccaatctttatcttgctgatcatattggccagtagtagatgcagcatcatccatctaactgtcactatcactaatatgctcatcaattataaagttaagcatcttctaaggaaaaccattactacctccatcccaaaattttgctacctagtacgaaattggacacccctgtccagttttatagtactaggaggtgtccagttgagtactaggtaactacattttgggatggaggtagtatacagtatacactagggcttaatatatccattcccatattacattggagatgaagcagaatactaccatcaatgaatataaatacaaaaaaaagaacttctaatgtcaaaaaaatcaacatggcaaacataactagtcactatacaaaggtgacatgatgaggggtgaaatcagaatcgcctgtctcctctgcagatgaggggacaccattatagttagttgccctctgttgtgcctgggttttcctgttcagcaactagtttgacatctgtgtcctgttgtggggtagatgagccagtaacttgggtggttggatcgacatttccattgactgcctttgctacttcacaattctcctccagtgcctgagctgacgggctggatgagagcacattgtcggaatcattgtgatccacacatataggttccaccatcagttcaatctggtccatttcattaggattttccagatgtccatcttgatcaaaatcagtgttctgctgtggaattacagagtctggagcaggagtggctgtattacactcatcgatggctggtgtagctaagtgacaatgttcctccaactccagtgaaggacatggacagatgacattgttgaaatcattgttctcctcatccataggctcaagggtcattgttgcatcatccaccatgtgaagctcttcctcttcctggtgttgagcttcttgatcggcatccacaatgttctgttcagtttctagcaaaagtagaggcatgtcttgagtggcagctgattcaacatgtggactagtagctgaaccaccattttccttgatctcgccaaggtcgtgaagaacatcttgaaagccatgcagaaactcaaagaccaaggcttgtgtggttgtatcagctgtggacgccatggctatcttggccttctttaccataccatgcagtttatcaacctacaacaatcagcagccttcaagttaaatatattagttaaattatgcatggactgcttgtaaaaactatttgaagtcttgcaaaagacagcacgtgtatctgaaacaaatttaggtccaattaactttagaaactgatcgtaggaactgaatagataatatggcttactgctttgcggatcataggagccttggcttgataatgaagattaatggagtcatcaggctgtaatgaagatcctgcttccacatcatcactgattgatggtacaagataccgccgtgtagcccctgtgtaccaatgcaggtactcctcataagaagacgggtcatactgctctgactctggaaatatgcgctgtcggcgggcttcccattcctgaatgtactcatgatgtgtctcttcccagttctcacgttctctgccacgtcgactaatacgatgcagcgcctgtagtgtaggccgaaaaggtggtggaatggattggcgaagcccaaattgccgcatcactcgctcaggcaaatacatctcgactattggaaaatttattagtggagcttgtgtaagccacaagtcagcattttttgtacaaagcagtggcaagcttgcagactcaatgtgcaagtacggctcccacttcacctgatctgctcgctgcagattcagttcatccctgtactgcttaagacagcgtgtagcattctcactttgtgtgcgagcacctacccaacgaaagccaactgggagcacatcctgtggaatgtctgtctctgggcacacgggagaccggaccaacggtctgccaacatgggagcgctcccagctccaaagctgcaagagaagcaatgaaccaccaatgttcttgatattgtgggaggaagcaacagaacaaagagaacggtataggaaggccagcactgcagatccccagctgtatgtcccaacaagagaaagatcagcaatcagtggaagatatatcagactcatccgtcctgttccatctggaaatagcaccccacatagaaggctcaggatatatgctcgaacatgcctctccacagtctgatcatctgtcccttctggtaattcatagaaatgcttctttagccatttgtagtgcagaaaagattttccaggcattgatggtcctcttggatcatgacctagacaatcaatgaccatctgcgcataatcatgatcagtggtagaacaaactggacggccatcgataggaagagctaacaacattgagacatcttgtagtgtaactgtcatctccccagaagccaggtggaaactatgagtttctggtctccaacgctcaacaagggcagtgatcaatgccttgtccaactgaggcatcttctggcaaatttgtgagagcccaagcaagccagcatccctcaaataaggacggtatctctcatgaaattttaaaggtttgtgatgtcgcaacttcaactgttccacagcctgcaaaaaaacattgacctcagtcagactgcaaagtttattcttcctacaagaacttgttactcatgcaactatgacaaaacttaattgctcttagattaacctgatcaccgaagattgcgtccgatcggtggttgatctttggattgagtaatgtgttggatacatgctctactgatgggcttacaagacaaggtagtgggctttgctgcggagtaaactcaacattgtcctctttatcagaagtagtacttggggaagaaggtgtggaggtttcatgaaagtccatgtcattttcagccaaagcacttctcccacggccacagccacgaccacggcggccacctcctcctctctttgaagacatgatcctgtactgttctagtatttgggaaattcatgagaccagtcagggaaaaggcacagacgttgacacttgacagtaaaaaaaacacaagcatatgttgagaatttatgcagtggtgaagccctgaaagctgcaatgggtgtgcacactttagtagcgagtctgaagtcttgaacaatgcagaggggggtctctccactaacctgatcacgaaaaaagagggagaaaaggggggaaaacatgcatattcctctttatgactcgcttcgaaaagagaattttcaaaatgaattctgcaaaatcatttcatttcgagtgtcccagacgagcctacatcgattgaacttgctatattgatctacatatgcatgccaccaaacaaacacaacagtggattccattttcgtagtatgattttccagtgacaaccaaggaactgagacttgaagagtgagaatctacgggaagatgacattagaggattgtacctgcgccttgtgccgagacgcgcccttgaggacgatgtgcctagctctagcaattcagttcgccggccacccacggctccgtccccctgccccctcctacaagtgtggctcttcggcttgctacgcccgttgctcgcccctccaccccatggccgctggtggcgaatcaccgatcacacacaccctaggactcaaaatcaagctataaccatgaccggcactaaatccggtggccggaggtggaagacgagacaaactgtggatataccaagtaatgacaaagtaaaagttcaattatgttgacagtattcagcaaatgtaaaacatcagaaaacatgctgctgtgtagagtgagcagcgagcgacctagcttccactccttccatgttgatactcaccagatcaagattcatcaaagaagaactacgagctacaactgttccatgttaatattcacaagatcacgatttcgtcaaataagaactacaagctagaactgccatccaaggagctagcaatccgccgctgcaagcaaaccagggagtgaggtcccatgtgtcaccgactcaacgcaaccctaggaggaggaggaggaggaggaggagaggaagtggacgaagcgaggagcacgatgcatcctcgaggctcttctcccctcctgcatcctcccgcttcctccgtcctgtcactgcggaaccctggagaaaagaggagaggggaagaggaagaagaagggctcacctcggatctcgagaatggaggcgcagaggcggcgtctgagggggagggagaggcctggatgagacgtcttgccggaggaggaggctcggcggcgccggcggtggcggtggctcacgagagcggcggcgccggcggtggcggtggctcacgagagcggcggcgccggcgtcgaggggaggcggcgcgaagaagcgacggaaaaaaaaaaaagaaaagaaaatcccgacctcccgagcagtgtgcttgcctacttggtaggacggcccaagtagcaattctacattgcggcccaagtagcaattcactctgcggccagcaacagtaccagcaaaatttatatcaattgaaaaaaaaaaacatcagttgcgtatttgatcctattttaaaagctaaaaaaaactaccattcgattaattttttagattaaaaatttactttatatttgtctaaattcacacaatcactaaagtaataggtaaggaatcaacatgatgcatattttaaaacattcaaactcacttttgacaatagcatatatccaaatttctccaaagcagacgaggcgtggtagggaggtccgggtccctacagcctactcatatctctgtgtcgctcaggtgggcctcccgctgcgaccagcccattaacttgtccaggaccagcaacgcggcccatgccggtcggaactgcccgaatcgcaacgctagatcgaacggctgtggtggctcgggagatgcggcacggttggcttgttgactttttccggcccggattgacgccgcaagccgaatccacgagtagtgggctgcggaattttgttttgttttttttttctccccatcccatcccggccctgacgccgccgcacgacggccggccgcggccgccgccggggaggtcgccgccgatgagccccaccgcgccgtcgcgtacgggtcgtgctctcgcccttctccctgtcctggtgctgctgctcctcgtctgctcgccagccgcgtcagctggtacgggacaatcgccaccccaccgcgactcttcttccgatctcggtgctgttcttgcttagttttatctgtagcttttgttggtcgttagctgtatgtgtttgtttgttacttggacggttcgtggtgcccttgagtggatccttgatgcgttctgtgcttggtcgttgaaattgggtgtgtgtttcttttctacccagagacagtagcgtaggtccctgtgggctcgtagattgagttaagctgcgtggaatttggtgtatggtaaacgccgcctgtttgcattttaggaattactgcttaggaatttttgtttgtacttctgatggatgttatcagtcattaccagcctttactaggggaaaatatcacagtttcttcaaattgcatcctgctaggagtaggatgagcaatggtacctggacaccaaggtggtacttgagtgaaatctatagttttttatgaacattgtggcttgagatcgaatggagtagtttatgttaatgaatttaggcatgtttaattattgtttgagcctctgcaaatgaaaaccatggtagtcatacttctatgactaaaatcattattgtctggcatcacaggagaacagaaaggtgtatgtgtttcgcctggtggacgattccctgccttctcatctgaaggtaagcgtcctggaagagcagctaaggggcgcagagatctggcactatgtagagtattccggcagaacacgtgttgcgatgtgtcccagacattttctgccctgctctcagtgagaaagcttgcatcgactggtgaaggtagtcaagaatgccttcatctgtgggaactgctcgagtgttcgatttgtgatccacgggtgggtgttaggcctggacctccagttatatgtgcatcattctgtgacatggttttcaaagcttgctcagaggcgtacttcgctatcgatgtgaaaacacaggtaaagggcatctctttaagctgtgtctaaataaaattttcttgctataccgatgtggtactttacaaggacagttgcagttgccagattatacttgctcatttcataattcatagtttgatctagataatattaggtgaaatttgatcatagataaacagttattaatcgtgcttacaccaatatacatgccacgggagtttttaagttaaagttgtggcatgttaattgcttttgtactttcttatagctacggtagctcctctctttttttattcctttgcttgcagaactgtaagtagctgtgcctctgctttcttgtgatatttttgttggatattattttgttgttcggttctgatatctcccccttgctgctttatcaggcattgtctccatgtggtttaggtgacatcctttgtggcaaagcacataaatgggtctctaatggcacagagctatgtcgctctgctggtttctctgtgcaagctttggagaccacctcgggtggagtggatgacactttctgctatggtgggaaagcaagttttgatgccatctctagttcatggacatcttcaaaagagcgtccagtattaagtgatgtggcctcttggaatcttgaagattttcgcagatgggcaagagaaatgcctgctagtgaaagagtttcatgggcaattggaggaatggttcttacagcaggccttatatttatcaggttttatatctctttcttattttcatattctaaataacaggtataggagataagtgtgactggtcggaacttgatacaatatctgaagaattggttcttttcatgcctatttcaaacaaaaatatcttatgaaagatcacacaaaactttggattatgtccgtgtgttcgtttaaacttgcaattttcttccttggctctctagcttaatgccatacacatgccatttccccctttcagatgcttgtgttgttacaaaaactaattttttgtagtttgtgcagtaaacggaagagctacattcctggccaaaagcaagctgctatcgcccgcaatgtgagaaagctggaatcaagagttaacccacagcagcttaggcgaaattaggaatgcgtaggtagcatggattcctatttccaccactttgtgattcttatatttgaatctgcaatgaatttactgttgaagatgtcctctacactggtggtcagatagatggatggcgtcactggttacaacctcctttgtcatccttgcgtagaagagcagaagagatctattaattcttgttcaggttatttctgtctgcaggatttatagatttgcttgaacatatgtatatagttttggaatggaatcttcagagattttcttcatactccttcagtaactcttgcattctgtctatttttaatcagcacgagttaaagcactcgttcaaatatgttttgctccagatagcccttaaaagaaatcatgtttgctccaggcagccctaaaagaaacttacaaacatagggaaagacagtacgttccgtgttctgataatttgaagaaaacaaagaacctcttaataattgcatgtgttttgtctctctttggttcgtgtattcattcaagaatttaaaatttagtttccatgtccttttcagattataatgtaaaatgctgatttttgtagaaaagctccttgaacaaactgagaacaggcacagcagctgctttccccgtagggcaaccacgagagttgtaactttattttgtattgagcttcatccatactttataaaagcaaaataaagaagttacagagttgcctaattacaacaaaatcttttgaaattacatagtttgtaccaatcaagagctaagaatgtttgaaaatgccatccatctacaactatgtaacgattaagaatgtttgaaaatgcgaatacgggtggggaatgctcctgcattacaaacagtaagaacaaaatccgtggaccattctatcttacggcagattcaactgcagaaaactaagacagattcaatgcaagacaggaacacttttcctcgttgaaaaataataaaataagattgtcagcaagtgaggttacatatcgcaatctgaaattgatctatgcagatcaaccctgtattacaccctcgttgctcaggaatgccctggcaagtttcatttgtagttaaggagacaaaataatcatcatggggagctcataggaaccccaaaatgaacctaaaataacccgccatccaacagcgaatatgaagatcttaatctttatgtgaatgcgccaggtattggcttgtgtacttgtccaccttcggtccagatgtgccgtacttcgcgtcatagtactctaccattgcagatcccactaacgctgctagtgttagggcttgagcatgcaacctgcaataataacagttatattaattaagtatgtgggctgtcaatttgtagcatgattgactttagtcacaactcattggtgtataatcatatggaatgtagttaatcgtacataaactgcctacatacatgaaaaggtacaggcattcagatccaaatatctgatattgccacccaatgcgttagatggggttaaggtcgtgccaattttacatctacgaggaaaaacagaacttcaaagatttaatacatgactcagtgcattactacattgactgacttcaaaaaagaggtggtaatatcgctagtagatgcgttggaaaatagcaacttagaattctaaccctctggtctcaacaatagtaatcaaaccgttcaaaaataaagaaggtggtccgtatgtacatggcttctatttaggtgtcattgctttatgcacctatctaatctagcccaaaaaaaatggggaacagaacagagaaaattatgagggccagcagtgaagggtgcacactttcacaggacaaaaatgctacaaggtacaagctatatatggaattggacaatgcatttctgctgatctaagttttgacttgctggatcggatggactagtataattgtaagtgcactatacacaaaaaaacgaagctattgttgcagaccaaggaatctttgaaaaccagtccataataatactgatacacttccaaccttagatatcttagtgacaaaaggtcacgtgaattacttcgtacagctagcgacatataaaaatagtaattacaagcaacgttttgtcataaaattatatatgcatagccacctaggtagaatatcaagttaaacagataagttactaaatttcaagtttcctgcgtttcctgcagaatggtctgcattgcaaccttaaaggataactaagcccttcagtgttgaatgtaatcaacaaaatcaaataattcaccaaataaataatggtgcattcttaagtctaccctttttttttgaaagaagggcaaaaactttgccacttttgtattgataagaggaggagaaaagcctcaacagtgaacctttacaggtcttatatctacttgcttggcgggataattgtaaacgaacaaataaaagacctactgttcaggaagaacaaattatgaaccccgtggactataataatatcctacgtggtttgattatctctagtggtccccggctgcctgctaataatcactagcttgtagtcccaataaaaaaaacaagtacactctctacaattaactggaagtaaagttcttccaaaccatgccaatggaataaaagaaggatccatagctccatattcaactacagctggcaatggtaaatggtagccaaactgtctatagtctgttgaacaatgctacactatacgttgaaaccttcctacaggctcatcgatgacccaattggagcaattctgtctggtttcagttgaaatcgaagttgctcaagtcacttcataactcagaatcaatctggaaggcatgtgcaacagaatcacttttctattgtgcaaacattatgttcaatcgaccttttaattatcatggcaaggttcaaaatccttttatcttattgtgctaatgttcacaaatcacaatgcctacaaagcgttctcaagatgaataatccgtgtattcttaatcatggtaagacacgagcctgaagctaagatagatgagacaaaggcacaaaccttgcatggatgatcttgacgctagtcttcatattgggcctcgaccagttgtacgcaatcgagctgctgatcccagtaagccataggcaaccttcactcacaaacacataacataagcaacgtaaaatagttagaaaatatccaaaaacacgaggggaaaatcaatctcaaaatttggggaaaaggggaatcctaaatagaatacacaacataatttttttcgcaagattgagagataaaatcatataaagaaagccgatgaacttctatcgggaagacgcatggattggggatttggtggtgacgcatgtagcaaatcgtacatcagaaaagaaaagaaaaaaaaacaacagaaaagtagcagatccgcgcggaggagatcgaaatcccaggaaaaattcacgagatattttacctacggcgcggagcttgtggtcgatgacccacttcctcatggattcaatcttgcccggggcttccgccatttgcttcgccgcctcttcccccatcttcctctccgatttctctcgcttctctttacgcgctttgtttttcttctttcttttttttttcgagctcttttcttctctctcgttgcaaaattgcaattggagaaagccagcctgcctctagttatatcggaggacttgtttgtttccggtcctcaatgaattcggaaattcgtttagtatccgggtaaattatttggattcctttcacatgtcccagcttgttgttgctaatttgttattctccacttgcaaaaagaaaacgtttttgtttcgttaagcatgttctgtatttcttgtgaccgaagaaagagagagataacggttgcgatatattctttggaaataaatcgtcctaataatttttaggtgcaccctctgtgaggaagtggaaatgactttatgattttgcgaggaaacagggatatgattacaatcttgagcgagaagctaggacacactccctagagcctgaaaacgccacaccgtatatggcatataatttgaaaaacccatatgacataaatcacactctgtcgtgtgatttaaagagacgtaactctctagtattattattggaattctattaaagtatacttatatataatatttgcgagtaccaatatattagaatcgtgcaccggccacaaccccgtactatagcgctgtacttcccgtgatgatttaatttaaactcattatagattgagaaaaaatactagaaaaaggtaaataaaagagaggctttactcaatgaaatacacaagaagacgcatgcatcactgtaaaagcttaaagatatgaatgtcataacgattaatatattcgatctcatgaaatttgtactgaatcacatttttttatacgtaatatttatagacactaaatttaaatattgataagttaagtcatgcaccaacgactacaaaattttgtactcacaataacactaagaaaagttaggtttttactggtggtctctgaaaaaaatggatttgctaaaagccaccgaacaattgtcatattctactcgcgcagtctaaaggccattaagataatgtttccaataaagttggagagagaatttgactaaaatggcttcgctacccttcttactaattggcattatttctcctctccctgtcttcctcttgtttcttcattcacgcaagatggcattgatggtgagcatgacaacaatgttgccatatctagttacctttgagtcttctagtgctcgatttgccgattatcaaaatccgaactctaatgcttgaactagccctatcgtggctcggtgaagagaatggtctatggataaagctggctttatagaaccagtcactactccatcctccctaacctaagagccaccacctaagaaccactttgacatcataagacctgctcctataaggctactccaccactaccgcggcaaacacaaggcccactcgacatgaggcggtgcccaatggctcaaatcagctccatcgcgactggtaccccttcgcaagaggaatattagaagaatgaacaagaaaggcgaaggtataattttcttgggttttgtcattactaaggtggtgttttaatctcctgaagataaagattaagtgtttcacgcaaaacgatgtggtaataatgtgcgactaattgagttttaattattacaaacttgaaaaatgaattaatatgatattttagaataactttcatatagaaagttttcgtacgaaacacaccgtttagtagtttgaaaagcgtgccacaaatatccgaaactttatcctctccttacggtggattcgaacggggcctaagtggatattgtattttagtactcacgatgccctgcagtaaattgccacactttttagatatcattagacaaattttcccaaaatggcaagcaatataatgtgtatgaaactagttattacaaagataatataaggtgtatgaggaccaaagtacaagatatagtcatccgtttaactaagagctttagtatatatcttctcaaagaaagtccaaacatcggtagatatagtatatactccgtattaacgtcccgaacaacaaaacaactttgcagtctctgaaaaaaaaggtacaactataaaaatatttgctcataaacgacaatgcatgagtaaaattgcaacgtcgttcttttcctcctcataaaaaaaaaagagaaaaagaatcaacgttcacgcccttcaattttgtccggctttgcaaaactttttgcagccctcgccaacgcaattcgtacaaaccggaagggggtgggtgtgacagcgcagaggccaccgaatccaacgcgaaaacggcacgtttctgccttggacggcggccgcgcggtcaaacctcggcctccccctccacgcagctccacctgacccggcggcgactcgtgagtcgtgacacccccccccccccctcgcggaagtggctcggcaggtggcgaggccacggcggcatagttggattcgccacgtcatgttaaaggaaaaactttagtcaaattatacataggtatcacatcactcaaataagatgataataatatggaagaatctcatttacacttgttttgtaagttagaagatccgttgtactcccttcgttctaaaaaaagaacctacgatgtgacatagttttgcggagagagtatctggttttcctgtttaagaatgaaaattggatttaagggctatttactttggtgctaaaataaaccatactaaattttgacaataccaagactttggtaaggttagcaatattgtcaaattttggcaagatggctattttggatgcgttcattttgttgccaacatacatgctactcacacatattgctgtgcagttgctaaattttagttattactgtgcagttgccaaatttctgatatatttatcaaaagttagtaagaaactaaacatatgcaacttaaaaaaaaatggtatgatttaaaatgacatcaaagtgaaagttaagggatctcaaatgagcttattcccgttccggtttggttggcgtagcgaatttgtcggccgttcgacgagcagctggctgggccggctcactcacaccagccgcatcgaggcccaactgagaggctaatgggcctcggccctcgggacggtttgcctccggctccggctgcggatggccaccaccaccaccaccatcatcatcggtgcccgccgcggaagaggaggagaaagggaaaaaccccgcgctgtgtagggttttaggcgggtcgaggtggaggggggaggatggccggcggctcgtcgccggcgatacggccgatcggcaagtcggcggtgcaccggatctgctccggccaggtcatcttcgacctctcctccgccgtcaaggagctcgtcgagaacagcctcgacgccggcgccaccaccgtcgaggtcaccctccgctcctacggcgaggactccttcaccgtcgccgacaacggcaccggcatctcccccaccaatttccaggcacgaatcccccctcttctcctctcccatttgctgcttcgctctcgcgatttagttgctgaccgccatgtgcgcttctcaggcgctcgctctgaagcaccacacctccaagatctcggacttcggcgacctcgcctccgtcgccaccttcgggttccgcggggaggcgctcagctcgctctgcgcgctggggaagctgacggtcgagacgaggaccaaggacgagcccgtcgggacgcgcctggagttcgcgcactcgggcgtggtgaccggcgagaggaagatggcgcggccggtcgggaccgccgtgaccgtcgagaagctgttctccacgctgccggtccggagcaaggagttcagcaggaacattcggaaggagtacgggaaagtgatctccttgctgaatgtgagctgcccatcttattagtccatgttcgttttgcgggcatttcaatttgcgtaaagctcatgtatgttattagaatctagttcatctcctgatacacatgtttataccactctgctgttttactctacacatgtttcgttctggttctgctaagaactgtgatttattttttttctttccctaattaggcctatgcgttgattgccaaaggggtcagattagtttgcacaaatactgttggcaagaattctaaatcggcggtgcttaggactcaagggagcagttcactgaaagataatatcattaccgtatttggtctgaacactttcaagtgcctgcagcccttcaatgtgacaatctcagaaggctgccaagttgatggctttctttccaaacctggacctggtagtggtcgcaattcaggggatagacagttcttctatgttaatggcagacctgtggatatgccaaaggtttccaaacttgtcaatgagctgtacagaagctcaaatgccaagcaataccctgtggctgtattgaatttctgtattccaaccacatcttatgatgtgaatgttgcgcctgataagagaaaaattttcttctcatctgagcatgccattttgctatctttacgggaaggtattgagaatctgtactgccctcaacaatgcagtttctccatcaacagcgttgaagatcctgggaaggaaatggacccagccatcgatgggtctgatgaagacatgtgtttaacagaaaaggagaatgtttcagctcctgaaaatgacgatgacatggatgaaacagatagtgatgatgaggttacaccagagaatcagaaagtgccttcttcagtgacaacaagggtagccactggatctacacccaaagatgtgagccccttgtcaagaggcccacctgctcagcttgatagatctactttgctttcagcctaccggtatgaacaacgagaaaagacgcctacacgagtaaaaagttatccagcacaagcaaatcatgttagaacagggcttgctgcaaagtcttctccttcaagtgctgttcaaccttctattatgaaatttctatcacaaaataaaaggaaacacgaagacagttgcaatcttatttctgaagctccagtgctgagaaggggaacatgcttggagcaagtgaggagaacagatttaggagtgaattcaccaactgcactaacctcaagagtatctaatattccagaggttaatgcacctcaaggaacaaatcctttgcggcaccattccctgcaatcttttgtacctgagatgccagaagattcaccacagcattctgaaccacctaatattgtttctcatcgtgatgaagtgcctcagttgcgtccatgtgatgttcacgctacagaatctgaagtggtaaggtagaattttttggagtgaattcttcaattttctccattatcttttatttttattacttttattgctttatttgccttgactggttgttctgggcattcttgttaagtgtgtatgctttgtgatcttatcttttaaagaagttcatggtgaatttctcatctgttgtcacaagtcatcttcaatctactcttagctattttaacttctgcttaatttggatcactaaacaagtactccaatgtttgtagaatagctttttttctgattggctaaattgtgattgggcatgtgtccagttcaaagaaaagagaacctagtttaaacatatgttgatgagatttactatacaatgaaatgctgcaatcctcgcaggataaccagcatgatccatgccattccaagtttggtgctcccagtcgatgttcagaagtggaaccccaaaataaactgacaaatatttccttgcctgatgctcattatgatggtcatgacactgcagcacattctggacaatcatcttatccagttatgcaatttacacttgctgatcttagaagaagaagaaggcatagttttatgatatcacatgcaaaaaaaggaagttttcctgagaaatcaacaaggtagcacttgaaactatttttatagaaaagttatgttttcaccaggcgctgggctttatgaattactagtttatttttcctacctaggtgttataaagctgcgacactggataactatgtaccagataacgaggagggaaaatcgaattctttagctgcagccaccagcgagttagataagcttttcagtaaagatgactttggagaaatggaggtgcttgacttaacttcaaatttgaatattatcagttttctaaggttccttgtgagattatactgctaatatactgtcaatgaaagaacacttgttatccaagtgataatgttgcttattttccctgcgcgagtgttttcctttttgtcgtttaagtgctatttcaaaaagaactcttttatagttatatactcagtagctcagtgcttcggaggaaccccaatgacttttgtcaatcatgaaattaagttgtaccaatacattttgtttctttagtgggaccagccagctatataactgttatttgttgtataattttggtgctttgatagcttgcttctgttcatggccctatcaagtacgataggtcgtgtgattcttgcaagttcctcgcaagacatatgttgtcttttgttaattttatctgaaagcattttattattgtgaacatttgttttttacttgagtggtgtgatttcattgttctaaataggatgaaatattaaaaaaagtgctgtatgaattctatatttctatttgcagtactttgctaaagaagtttatgaacactaaataactagtacaccttcaggttgttgggcagtttaatcttggttttatcattggaaagctggaccaggacctatttattgttgatcaggtatctctctatagtctatacatattctattaattgatgtcatagtattgtataaacccctggatatctgggttgcaccttcaagataccttatgtagtcatgtctggtgattaatgtttttttcttcttactagcatgctgctgatgagaagtacaactttgagaacctttcacagtcaacaactttaaacatacagcctctccttcagtgagtaagcaaaacttatcatttccatctgttattttggtacattgaactcattcagtacctattaaatggtagggtgttttgtggtttgtattcagaatgttgaaatcaggtttattattaccttttgttatgtatctctggtactgtatatctgattgtattcaaatacagaccactgagacttgacctatcaccagaggaagaagttatcgtttctatgaacatgagcactatcaggtattacatttattgcgtattacaactcagttctgtctactaccttcggtcacaaatatttgactgacatttaggacaagatttttcaaacttttgaaattctgacattgataatttctcaaatgcttagtgtaaaaacaaaagaaatggtgtacgcagatttgcctcaaaaagtactactatcataataccataaacttattagattttatgaacctattctagtcatataaaattgacggttggaatataaaaagtttaaccaaatcttgtccttagcatcaaatattatgaccagaggaagtaattaacatgtcggtcagtcaattgtttcccacttagtgcataacacctggaatcatgcacgatttgtttttttctcactcaacaatactccctccatcccaaaatataaggcacaactaccactaacgcataaacccaatgggatcactccaataaatacaatgcatgcacccaatgggattagagattttaagggtgggtgattttttttttaaaaaaaaagaaataaagaggagagggatgtgctagttaattgcatgcatgcatgcatatgcatgcctaatattatgaaacatcgaaaaaaaggtggttgtgccttatattatgaatggagtgagtagttgataattaagagtgagcaaagctttacttgctattttttttatctgtcagaaagaacggttttgttttagcagaagatctgcatgcttcaccttgcaaccgctattttataaaagccgttcccttcagcaagaatattacatttggtgctcaaggtatcacttattctcatgtctgaaatgtacatttttatgtgcgttgaaaagtggtttaattctaatttcccttgatttagatgtgaaggagttaatctccatgcttgctgacagtcaaggtgactgttcaataatcagcagttacaagctcgacagaactgattctatttgtccttcaagggttcgtgctatgttggcttcgagggcttgccgaatgtctaccatgataggtgatccattgacaaaaactgagatgaagaaggtaaccacagatcaaattgttttttaaggataatttttggagtaaattagctttcgatgaagtaacctccaaatgagctcctataaaagaagtgcaaaccttgtatggtttctgtctattcagaaatttaatgtcatgatttagttgtgatcagtgctcactactccctagaaacaattattcctttatatttaagaacctaactcaatgaagccctcttgcatttgcactccagatacttaagaatctaactcgatggagcatttttcttttgcacttcagatacttaagaatttgacaggattgaggtccccttggaattgccctcatgggaggccaacaatgcgccatctagcagatctccatgctataaaaactgaaggtaagagattgtcggccaacactcatattctctagtttacatgcttgtatatgtctcatctatatctgaagaaaaagagtgaagttttcttgtttcattgcaactccaagtagttcgagtcattatcatctgcaaatgtattgttctaagttctaaacattgtagacaaggttgtatcagatcatcactgttgtaatttcttgaataaacaaaccactcttctattttttcactgaaacaacaagattgaaatgtgttgccaagttcattgtgttacaaaaaccttctagtgtaaaaaaaaccccactaggtttcagaaattacgtcagtcagaagctcacaatcgtttctgtattttttgcgttctattcttttttttttcacaaaaagtggcatgattaatactcttaaggattttagtggcaactcccttgaattatccagtttacagatctcatttcagtgttgcaaaatctcgcaggatcgaaggcaactttctcatgatgtctggcagagtttaggttgggtttatgatggatgctcttgcctttgcgctgctaccattccaaggaaattaggcgctccatggccaacattccttgatgtgtatagatgccagtctctcccacctgtttgagagcctgtgtgacctattcgtgtactaacttacatatgtgatacatacatgacatgcgtgatagtggagaaccttgtttctaagccttcgaaatgggatgcatctccttgcccactagaatccttttgctcggagactaatgccggaagcgaaatactccaacacctttgcaaggatgacgagcaacaaaggtgacatcaggttatcagggaaagctatctggggaaacataaactgatgcatgtgcttacctttattgtgtggttaaaatccagacaagatgtaacttaggtacttgtgttgaaaatgcctcgagtttctgagttgtatgcaacaaagctcttggctgtatttagttgcaggcttgcatttttaacgccttaccttatctataaacagtagacacttgctctcagggtatggattaccctgtgctatttatattatctttttgagcctggaacggctggtagatcatagagaaaatgttgttggaatcagatgccggaaattggctctgctgtccctagatcatacagagagatgagcagactagtcactgctctggttgtttcgtttgctttgcatagaagctactacaatactgtagccgtaagcaacgttgcagtacagctttcctgcgctgaagaaactactagactgtttacatccgtagcataaattctgcagataattttgtctcttgttgagctcactccagcagtctagcttactgatatttgatccaggaattctgtccctgagttgactttagtttatttcaccgttctagaaactggcgataagtataaggccctctttgtttgtttaggattataagccaacttataagtcaaaaagtctaagactaaataaacaagcagcttttttgtttggcttttttaagccataagccactcttacactattaagccaaaagctaggttggagaagcttttttggcttatataagatagatgtatgactccaccactaaacttaggacattaaatttactggcttataaatcatataagccaataaactgacttaaaagtctaagccaataagtctaagcctaaataaagagagcctaagagcctttttggttcccatattacctaataagtcaaaacggtttattatgaaaaaaataaattatagataaaactttatatatttcctcgtaagcaaatgctaaaaggaaattacgttagaaatatcttaaattcaattttaaaaattcaaattctgacttttgtttgacttattacgtcaattgatggggctccagaggtttgagtactagcagtacactgtttttctagctttggatagagaaaccttgagcttcataacagcgtgatgccttttgcagctttcttagcgacatctttacgaagttgcttgattccaatcacaaaaacgatagagccataatgttataaaacctcctaaatttcaaagactacctatttatttatgcaacaattttaatccctcgtaccaaaattttgccctttttttccctctaaaacctcttagtatatttttaaggtaaaatagcatacgggaaataaatattgcttatgtgttcttttgtgttgaataaaatgaaacaataaatgaatgatttgtgaaattattcgaatgtgcaaatgaacgaaatcaactattactaagttaaaaagaatatgttctaaaaaggtttttcaagacctggaaagtttttttatttttaaataggagttcacgaaacatgcatacacactcgtctcaaaaataagtttatttttcactcctcctacacatatcaatataaaacaaaaaaatcaggatacagtcactttctcaaatcccaaaatatagttattactctctttatctattgccaatacattttttacttttacaaactgatacataatgattaaaaaaaacttaatttactacatattggggagcaaaaatgaacttatttaaaaaataacgcattgaaaaaacataaggtgtatatataatctatgggcatgtttagttggtaaaatgaaaattttttggtgtcacatcggacgtttgaccggatgtctgaaggggttttcggacacgaatgaaaacactaatttcataactcgcctggaaaccgtgagacgaatcttttaagcctaattaatccgtcattagcacatgtgggttactgtagcacttatggctaatcatggcctaattaggctcaaaagattcgtctcgcaatttacatgcaaattgtgcaattaatttttctttttatttaatgcttcatatatgtatccaaggatttgatgtgatgtttttttgaaaaattttcggggaactaaacaggccctatatattcatccgttaggtagaaaagacacaggtgaatttctacacagttccaacacgcattaaaagaaaaacaaagaaagaaagaagaaaaaaaccggccattcttgtagtacctctccaagagcttcttcggttcttcctcccgtgtgccacccgcttgccccttcaccgcgccacacgtacactaaccaacaccggccaggatccgacgcgacgcctttggaaactggaatatccccccacccgtaaccgtctcctccccagctccaaccatttctcccgtcctcctcctcctccgccccgacctcgctcgcccgcccgcccgcctccgcctccgccaatggcgacctccacgcgggcgttgctcctcctccccctcctcctcctcttcctcctctcccgctccctctccctccgcgccgatcccggcgccgccgtgtccaggatcgccttcggctcctgcgccaaccagagcgcgccccaggtgctcgacgaaatgcgcccccccttcgccaccctgatctcggatcaatgatctgatgggatttgtgtctgtgtgtgtgtgtgtgtgtgcgtgcagcccgtgtgggaggccgtcgtggggttcgacccgcaggtgttcatctggctcggggacaacgtgtacggcgacaacaagaggccgttccgggtgttcgggagggagaggacggtggggccgtggaggaacgtgccgcggttctacccgtcgacggaggccgagctgcggaggcgctacgagatggccaaggccaagcccgggtacgccaagctcagggagagggctcaggtgagagcttgtgcaagactcgctgccgctctttctttgttttttgttttttttttgctgcattggtaattgcgcgttgaaacctcgagctttgtgtctggtgctcgtgatgacatgtgggatcttgtcaccggtgttttacaaacaagtataggtgctcatttctcccatgagtccacgtccttgatcatacaggcgcaggagaattaatgaatcacttccatgctagaaaggatcataagatccaactgaggatgaatggcaaacaagagtgcttgttcattttgttacttttatcatgtttgggacagtttctgtatcatccaaactgagattttgcgacattgttatcatttccaattttaacagctcctcttttaaaaatttagtggttggaaacactatgtcaatatcatatcattcactaaattttgcaggttattggaacatgggatgatcacgattatggactgaatgatgcaggaaaagagtttggtgggaaggtgacctctcaaaggcttctattagattttctggatgaagctgaagatagttcacggtatgtacttgggaatatttgaactgatttttattttcctaatgttcatttgttatgttgtcatttatttatattattgtattctaaaattgcctttattcttcttattgtgttaaatttctttctttcttttttgtttttttttccacaacatatatgaacatacctgtgtaggttctacggtctgaatacatagttgtaaaccatcagaaatctcatagcgctctctttcttgtttatttaggaggcagcaagctggtgtttatgcctcctacatgtttggccctgaaggaaaacgggtaaaggtaaagttatatcgtgtccaattttttctgccaattttgtttttcttggaaaccccttgttcaagcaagcatccccatgcatgaatgtatcagttctcctttccatatgtggcatgttcccctgttaaccttatgatttgcaaccatgttacatatcaatctcctagatcacactgtgaattctgcacttgccattcttgttctggattacaaagtgccctgtgctgcaacttcttgttaatcagtagtctttggtttgttgtttcagctccttaaatggaattcatagcatcttttaaaatgtggtagtatgtgatatcaaggtttacagcaacttggtactatgtgaatactgaatacagatgtatattgtgtctagttgatatttgttttcctatacatacagatttaatgttgggtgaaactattcagttcaaatccatatagtgacgcaccacaacaaatatataactagtacatgagttgagaagtttcacccatttgcagaactggttgcaggcactgctccattgttactttacatgtattaaaagatagccatacattactataggtaattctgttggacaccagatatcacagagaccctctatcaagtgatggagctgtactgggagatcctcagtggcaatggctggagagggaactgcatggtcctcgatcagagatcaccatcattggatcttcaatacaagtaagatattgtctgccttgtcctaattgaaagagcggatctagaatactggctaaaaaatggatctgccagagaacaatgagtaatcatagtgaatgccataaactaacatcatacataaagaaaactggcaatatgataaaacttgttatcttgtctggggtttgcaaacatagccagctgtccatcttggacaatttcgtggcagatgatagtatcccaattcccagctaaagttatgtatcatttgttacatagataatttttgataaaatcttcgatctatagttgctttcgattgaatagttgtaacaatactatttttcacctctttgtatttatgttttgcctttgattcttcatcttgcatgtgatagaattgtttcaaaataatacaattttcttcctatgcactgcaggtaatatcaaatctatctgccaccactggacctttgttctatgtggagtcatgggcacgctttccaagggaaagagaacgactgttcagactgatcgatagcagtaaggttgcttactttactttcctatgcagacaagctattccttgattctaatctttactgaaaactcagttctcctttacctgtgctaaagtaaaattcattgatttagtagtagctggcgtacttcctgcattatttttagaaacatttttttatcaacaattcacaatatatggcctatgtagaatgcgaaaagaaaaaaaaattctcctggcaagcaggtgcccttttcttgtaatacactgtgaagtttagttaccttttctcttctatatagctgtgttaaatttttttctttttgcgatctatcaatagacaatactccctccgtcccagattataggacggcctcttttcaaggaaaatcaaaatcggtaaattttgactaacaatcatactaaccatatatatgctaagtattatgcatgttatatcactagatttatattttaaagtactttcatgtgatgctaatttcatattatttcatattcgttaggaaaataacatggcataaattaatggtcgaagtatgtcattgaagaccgtgtaaaaaaataggccttgtaatttgggacagagggagtatcatctaaaatggatacttatcttatgcatttgttatttctatggaacatatgttgactttgtgcagagaaatggagtgttttttatcagcggtgatgttcattttggagaaatttctcgttatgactgtggagctcaatatccattgtatgatattacctcaagtggtcttacccaatctgttgagaattccgtgccatcagtatttcaaccacttatgagacttgtggctttgttgacaccaactaccttgcgagtctttagccctaactgtcgttacaaatcatgcacatatggtaagctttcctttcttcgaaacaaataactgaataagtatcaagagggcagatttacccatgagcataataatgtgtccatctaatttatttcttctgtatttgatctcacgtgtattactttatcaattggtgttttgctgttgcatttatcaggtcaaccaaactttggagcaatcgaaatagattggaatgcagtgcctccccagattaaactcgaactaagagatgtagagggaaactctgttggtggtgtggagtttcctatatctgaactggatccatcaaaagcacatgccattacaaaacaagggcattcgtaccaacggcattgcgctctcgaaacagagcttccatggctagtgtggcaccgtcttgctctgttgttgtttggtacaattgctggtatgctgtctatatctatctcaaacttttcagacatctcttttcttcatactccctccgtttcaggttataagactttctagcattgcccacatttatatagatgttaatgaatctaggcacacatatatgtctagattcattaacatatatataaatgtgggcaatgctagaaagtcttataatatgaaacggatgaagtacataacaattgctcttgaaatcatccagtttcacggtctatttacgaattatttttgtgagatctagtttgtgttgatatatttcttgttttttttttgttctgtagttcttgtcatagccgtggtgttgctaggaattacctgcttatcagctgctaatattttcaccaagaaatccaagatggaatagccataaggtacagaggacagaagcagacacttcagtctaactacagatggaaaagctgatcacaccgtccatggacgttccagtgcctagaacaaccatgagatttcaataccaatataacccattgcgcagcctgttacgcatcacaagttttatgaatgtaactaacaatctgtatacgtgtatagcatgtttagaaatttctcatgtcaatttcgttgctttatggtgaataggatgactgttgtctattctctgacccctcttacatcattgaagtaggctccgtttgaacatgcatctgtttctgtttgaacattgaagatcattcgttttgtccgtttagaaagacatgaaagagctggtagcctggcatgtcgtccggcttcaaatctcaaatcccatagtgatgtctattatcgtcttctgcgaaagtggagaaccgaaagtgtggaacacgttatcatgtcgtaacagacagaagcagcctttgctcgctgacttgtgctcgtctgcatttggagcacacggattcagtgcccagacagcgagtgctaactggtcagtacgcggcgccaataaggctgtgtttagatataaagtttggatctaaacttcagttcttttccatcacattaatctgtcatacacacataatttttcagtcacatcatcttcaatttcaaccaaaatccaaactttacactgaactaaacacagcctaattcggttcattcgcccgcgacagagcacatcatcaagtcgatgccgtggacacccatcactctccatcagacgacgtgaacaaaccggcgacggcaccacgcacgcgcagggccgtatggcggcgaagatcccggtgatcgacctgcggctcgccggcgaggcgcccggcgaggccgcgcggctgcgcgacgcggcgcggcgcctgggctgcttccgcgtgtcgggccacggcgtgccgcgggagctccaggccggcatgagggccgccgtgcgcgccctgttcgacctccccggcgacgccaagcgccgcaacgccgacgtcatccacggcagcggctacatggcgccgagcgccgccaacccgctgtacgaggcgttcggcctctacgacgccgcgtcccccgccgacgtcgacgccttctgttcctgcctcgacgcgccgccgcacgccaggtaggtaatttccgtcgcagacagtgtagttgtggagattatgggtaccccatacccacacggcatggttatccgactagttataggggataacttatatatatgaaatatgtaacagatcatgacttgggtattacgtttccctgtatattatggaacggcctaaagtcctggtttgataagattgtaaagtagatttaggaaaccgataccgtattggttatggtttctatcttgtaaccctgccccccaacctatataaggagggcagggagcccctctaggggcatgagacaacctgatcgtcagatcaatacacactcggcggattcaaatccccaaacaggagtagggtattacctctcattgagagggcctgaacctgtctaaatcctttgtctctgcatccatccactttaggtctcgtacgctacccccttttattattgccgaattcatgtttcgacagttggcgcgccaggtaggggttgcgtcgagtttcctatcaacgagcgcgatggaatcaatttcatgagtcgccgacttcgttttcgctttgggagttttcacttcctttccgtcgaccacttcttcaagctcctcttctctgacttgatccaaatcagtcagggggaaactcaatctgatttttatcattatttatcatattgatttttaatctcagattaatctcttgctattttttgttgttgttcgcatataattacgcggcactattgaggcgattgatgctggtcatggactcgaggcgtctcagctttccggtcgatcggccgcgagtccactctgccggcttgtcttcgccaccaccactgctgataacaacaacgacttcaccgccggcctgcctccgtcgccgccgactggtgtctccgcctatatggttggttggtcacaccaccgttgttgggcgtctacgtcttcaccaccggcctgcctccgtcgccgccgactggtgcctccgcctacacggctggcctattatgccgctgctgttgggcgtctacgacttcaccgccggcctgcctccgtcgccgccgagtggtgcctccgcctacacggctggcctattatgccgctgctgttgggcgtctacgtcttcaccgccggcctgcctccgtcgccgccgattggtgcctccgtctacacggctggcctattatgccgccgctgttgggcgtctacgatttcaccgccggcttgcctccgtcgccgccgagtggtgcctccgcctacacggctggcctattatgccgccgctgttgggcgtctacgacttcaccgccggcctgcctccgtcgccgccgagtggatcctccgcctacacggctggcctattatgccgccgctgttgggcgtctacgacttcaccgccggcctgcctccgtcgccgccgagtggtgcctccgcctacacggctggcctattatgccgccgctgttaggcgtccacgacttcaccgccggcctgccttcgttgccgccgagtggtgcctccgcctacacggctggcctattatgccgccgctgttgggcgtctacgacttcaccgaccggcttgcctccgtcgccgccgactggtgtccacacctgcacggctggcctattatgccgccgctgttgggcgcctacgtctacaccgccggcctgcctccgtcgccgccgactggtgtcatcgcctatacggttggtcggtcacaccaccgttcatgggcgtccatgtcttcaccgaccggctggccttcgtccgccgccgactggtgcttccgcctgcacggctggcctattatgctgccgttgttgggcgtctacgtcttcaccgaccggcttgccttcgccgccgccgactggtgtttccgcctgcacggctggcctttatgccgccgttgttgggcgtctacgtcttcaccgaccggcttgccttcaccgctgccgactggtgtttccgcttacacggctggcctattatgccgccgttagtgggcatcttcgctttcaccgtcgaccgccttcgtcgccgccgactggtgtcttcattgttattgatggacgactttgttcccacattggccacttctgccatcaccaaggggaatattacaaagctaagtcatcatttattttattctttatatgatatttttccttttcctctgcctcactataccaattggtcttccattgagtagtgagtcgggggctacagatgttatatcatatttttcataatatttatcttgattgcttgcgacataatctgagtacaaaagtacctatcgagttatggagttctatcttcctatgctttccgtttggtttgccaatggatggttgcctttgggccgattcctagcacccgggggctcgttggatggaccgagtaacgcaaggtgctaagtattattcggaataaatcaaaagcatagagataagataatttattttctgctcttaataattgcaaaagtacccgagtagtaaactccgatccgtgaaactttgttccattaatgacgaactcatgtcactcatatgcatgtttgggaagtgcttaggccgactcccagtgcttggtggctatgactagtcgggcagagtgtttaaacgtaatgagtcatctgctcggggaaatcaaaattaacaagagaagaaatacgtatttataaactgcctgaatttttctcgagtattatatttacatcagatactactcatcctatatgtttgttctgcaggatccaaatccagatatgcataaaagggattcatggctttaagcttatctcttacgctccaggaatggatcagtcagaacatcaccaccggctcgccgtcgtcgccgccgactggtgtcttcgcctatacggttggttggtcacaacaccgttgtcaggcgtctacattttcaccgaccggccgccacgtccgccaccgactggtgtttccgcctgcacgctggcctattatgccaccgttgttgggcgtctacgactccaccaccggcctgcctccatcgccgccgactggtgtttccgcctgcacgctggcctattatgccaccgttgatgggcgtctacgactccaccaccggcctgcctccatcgccgccgactggtgtttccgcctgcacgctggcctattatgccaccgttgatgggcgtctacgtcttcaccgaccggcttgccttcgccgccgccgactggtgtcttcgcctgcacggctggcctattatgccgccgctgttgggcgcctacgtcttcaccgaccggctcgccttcgccgccgccgactggtgtcctcgcctgcacggctggcctattatgccgccgttgttgggcgcctacgtcttcaccgaccggctcgccttcgccgccgccgactggtgtcctcgcctgcacggctggcctattatgccgccgttgttgggcgcctacgtcttcaccgaccggctcgccttcgccgccgccgactggtgtcctcgcctgcacggctggcctattatgccgccgttgttgtgcgcctacgtcttcaccgaccggcttgccttcgctgccgccgactggtgtcctcgcctgcacggctggcctattatgccgccgttgttgggcgcctacgtcttcaccgaccggcttgccttcgccgccgccgactggtgtttccgcctgcacggctggcctttatgccgccgttgttgggcgtctacgtcttcaccgaccggcttgccttcgccgctaccgattggtgcttccgcctgcacggcagacttattatgctgccgttgttgggcgtctacgtcttcaccgaccggccgccgcatccgccgctgactggtgtcaccgcctgcacggctggcctgttataacgccaactgatgctaccttcttcacggctggctacatcgctgtcactactaataggcatcagtatcgtcaacacaagctgcctacgtttgccatggctgccgactggtttcttcacttccatggctgcatgattctgccagtgttgattggccttatcttcttcaccgccggtcgtctcgtctgctgctgactagtgccctcacctctacgtctggtttatacagctaccactactgatggacatcatcgtcttccgttgccgactggttatgccgccgccgactagtgcttttatcttcacaactgcgcgtcttcgctaccagtttgcttctgttgccgccgactcgtgttcacttcatcacggcgatgcaactttgtcatcatggtggagcgacttcatctttattatcttcggcactggcaaactctattgctgctacttcgcaagttttactacttcaccaaccacgacgtctttgtgaacctcgacatctcggcatgcaatgccatgatattttactacaaccagtgactctccaatattcaggatttctacttggacaccttcagcacatatcttcaatcaagcaatgactactcgacgacaagaagctataattctcgactctatgttcagttgtttcccaactaaccaaagagtcgggggctacacaaatataaggctcaaaatttgacaaattttatgtcaagctgaagaaatcaattaatcagccaatgagtcaactccaggagtcattatcttcatctttgcttcggaacagacattctacttcaacaacttcaaatatttcggtttagacgagttgggcaacaacatcaactctcctccaattatttgtcttcacggttggcctactacgcaactgccgatagaggatctcatcgttatcatcggctgctacatcgctattgactggatcaccgacatcgtcatcttcatcaacatcttgtcaagcctcatcaacatagcctactctgctgccgttgatgggaaacttcgtcatcatagtcggctatctctgttgccgctaatcatcattaccgtcggatgcgtttgtcgccgccgattattttcttcatcttcatgattggtggatttcgccatcaccgttgatgcgcgtctacatcttcatcgtcggtttgcttttgtcaccaccgactgttctttcgttgttgttgggcgcctacatcttcactgctagctgacctgactgttgccaactggtttcttcgcctccatggttatgcaacttcattacatttgattggtggcatctttactaccactgacatcttccgttacttctgatgagcaatttcgtcttcatgttggtcatttcatctccatgccgactgcgtcagctattgccaatagacaattttgactatgacagaaggacaagctatatgctcaggggctcatcaactcaagcgtgaggattatatctccaatttggacttgttccggatacattccacatggattcatagtcatgagtctattttctatgctcaaagactggaccaattattattccccgtaagggctatcaaccgaatacttgcgccagtcgggattcaattattatatttattttggagtatcccataagggataatcattcatatcagaagctattcatatgagctacacttggtctatattacccggaagatttattactcgggagtatgttacatgcgtcatcctttaaagggtgtcgaaggcatattttttggcctaggcctaatatgtctgcagcccatattttcaggtgtggcctgtcacgttcttttagggacttaggcactttttgcttaggccaaagtgcgcgtgatcaagtgcccaataccttaaaatccttttataccgcagttactcaactttttaggagttggtacaatgcatcttaaaaggtgtcaaacagtaaagctttatatagctggcccgctgacttttttatatataagtcaaggtgctgtttggatttttaagcaattgattagatacaatatcattgcttttcgccacgtaagtgtgcatttttattgaccaatattatggcttaggctgattatatattatggtcatttttcaggcggttggtaaatcctttatgagtttacttactcggatgttataccacatatgccatatatttccaggtgtggtgaaaccatgtgtcttttagggacttaagcacatctgttaaagcagtgtgcgcatggcgtatgcccaatactttggaaatttctttattcacagcattcaagcttctttatagctattttgctatatcattcatcatattttacaaagcagttggtatatcacccggatcatgttatttggaggattcacaccgcatatgctatatattgatatcaagtcacttggttgattacgattatcaaaaccactcggttggttggattatttattccttgactatatgcttggtttgttcaattaaccacattgtcgggggctacacctattaggtgcatctagtcggtgcacctgactttattttccagccctccacagtcttctgacttggaaaaagtactcgggagatcatggcgaagatgattgaagcactcggctttggagtaatctagttcgagagaagattatctttccgactgtgaaggtctcaggggctactgtggagattatgggtaccccatacccacacggcatggttatccgactagttataggggataacttatatatatgaaatatgtaacagatcatgacttgggtattacgtttccctgtatattatggaacggcctaaagtcctggtttgataagattgtaaagtagatttaggaaaccgataccgtattggttatggtttctatcttgtaaccctgccccccaacctatataaggagggcagggagcccctctaggggcatgagacaacctgatcgtcagatcaatacacactcggcggattcaaatccccaaacaggagtagggtattacctctcattgagagggcctgaacctgtctaaatcctttgtctctgcatccatccactttaggtctcgtacgctacccccttttattattgccgaattcatgtttcgacagtagtgtagtgcgcgctcgctggtccatcactctgatcgatcgttcgatctgttgcagggaggccatcaggagctacgccgagaaggcgcacgagctggtcgtggacgtcgcggcgaagctggccacgagcctcggcctggactgctcgttcggcgactggccgtgccaattccgtatcaacaggtacaactacacgccggacaccgtggggaagaccggcgtgcaggtccacacggactccggcttcctcaccgtgctccaggaggacgaccgcgttggcggcctcgaggtcgccgacccggacaccggcgagttcgcgcccgtcgaccccctccccggcacgttcctcgtcaacctcggcgacgtcgccacggtatgtatgacaaattccgatgccgctgtgccgaactctacttgtatagtactacctccatcccagaatatagcaacgtatctggacatgactaatgtctaaatacgttgttttaggatgggtctcatctcatcctagattgatatattctgtgacggagggagtatatgatctttgtctggtttcgcgtacgtgttgtgagtttggcgcgcgggtgcaggcgtggagcaacggggagctgcacaacgtgaggcaccgcgttcggtgcgtggcgggggtgcagcgcgtctccatcgcgctcttcctgctggcgcccaaggacgacgtggtgcgcgcgccggaggcgttcgtgagcgccgagcggccgcgccggttcagggatttcggctacgacgactaccggcggctcaggcagtccaccggggagcacgccggcgaagccctcgcgcgattagccgcatgatgcagtaataatcacctttaccacggtgtgtaccatcatgcagtcacatacgggagtactacaattgagaggtttacttacagtatatgttcaaacgggagcgggtgtttactttgtttgatgcactgcatcaattaaaatattaaaatatacttgcattacaaaagttaatttgttgattaataatacatgaacaatacttaaagttaatcataatttggctctgtttttgtccatttgagcctctgacttactcaattgatgagtagtagtgagcgaagtaactcatctgagcaaacagaatccagttaaacggttgatcatggaaaattttgcttagtaactagaagtaagaaaaaaaagagagttggcgaggagggtaggttacattgggacctcctctatatgaaaagacctagccgaccataggctcgaccggagaccgtggtatacgtcgaggacaagagcgcaaacgaacttaatcgccgacgacctgaacagacatcacggtgtgtaccatcacggtgggcgcgcaccatgcctaaacactgtcactcgccaactctcctgccctccaattcaaccgtcgttggacaagcctgcgctaccgggggatggccgcggctttatcgggcgcgcattccgcgccggaaaccgatgtggggactaaactctggcagtggcgcactccgagatgacggtgggcggatcgatgataatcagcagcttgcctactccctccgtccaaaaaaaaaagacaaatcctggatttccgtgccaacgtttgactgtccgtcttatataattttttttataattagtattttcattgttgttagatgataaaacatgattaatactttatacgtgacttatctttttaatttttttcataatttttctaaataagatggacgttaaaacgttggacacggaaactagtgtttatctttttttttttttgaacggagagagtacttgcgatcgagtcgtcttctattccgaactgagatgtctcccactgcccccacacattgtgattgatgtgtcgtggtgtggtacggtgtggctgctactacagtggagatcaatttgcttttcatctttttaatcgaatggattatttgaattttcaaattttgcatatgctgtcttagctcttaacgcctgacaatttctaagttgacagggatccggaattttacatttgatgcattattggtctaatatactactccggagtatatgctgtgtcgtcacatacgaacgacaaactgtgatacgcgcatgcatcgaagtgatgaagcactgcaagctgcatgcggcttagtacacacacgaatgcttagcaacatgcatgcttgctctgttcctccgaatgtcgtttcatggtgaggcatagtgcttaactgaagcactgcgaaccgcatgcctgttagcacaattcataatcatcacgaaacttgtggatgtgggtatgtttaattaggaactacttgcttcgttttaatcattttagcattgccaaaaacggaaagacaatatatagaaacagaggaagtagctggtatcaaaaacaatatatagaggttcagaagaacaaatgaagaaaagagttggcatcttgggccatactccagtgcaacagcacccaattcaactgtcgttgggttagatttgtccagctggcacctatagagaaacaaaataacaaaagaggcaaggtgtggtttagagaaataacaaaaagagttggtagtgggggtttaagtgggcgaacccatgcaccacgaagaaggctttgcagcagggtggcgaagcgtaggctcatctcgtgcatcggacagagactctgtcctttgccatgagtcccgggggggaaccccggctccgtggaaatccaaagctgcacaactatcgggcctgggcttgaggtagagagccccaacccaattaacccgccagcctatacaggccgaccagcctggaccaaatacgccaagtcccctactccgaaagccccaatctcctctaccggctcgacgcaccgacctaacaccgacccaactccagctggctggtaaatttctctcgcggggggccttctctcttggcccgcgaccccatcagtgagtgagtacccattttctcttatgggcctctttttcaacgaccggcctgcaacacagcaggtgacctcggtccaacaagagcgcgagcgcccccacgccttttcttcccatgcaactatctgacggcggcggcctggcgacttccccccttccagggcacgccggcgcgcgtccgatttagggagggagagtttcgtttcggcgacctcgaccccggcgatttgccatgggctcgagcccacaaaccccaacaaccaactctttagccctccgaaagctggagtaacaggcacgcgcgaccgagcccggctggtggagatggtgggaagcgcgtatttaagctggtcttggcgtcgttcggcaagcggtatggtactaatcgagggaatagtgcttgtagaggacatcggtagtgagaagtgggtgcttgagctgacttgaaagcccatcttacatgggcctcttccttctctgtttttgtctcagggaaacatccgagatctgcagctgggcaggccggcacggagcccgcctctgggtgtccacgaatccgctgaatccccctggtgttggaacagcgaagcttctcgttagcctcacggcctcacctcaccatcgtcaacttcaccgagaagcttatgcaaacagccaaacagtcttttgcttccctgaccagtgaaagtcttgtgtgactgacaatcatgttccatttgatcatttgatgcattcttctcataactctgattaagttaattggtgtggtttctcatggtactggagttgcacaaggtaagcacttgagtaggcgtaatgatgggcggaaaactgatcgtactaaaaattgtgcgctctcccgggctaaatactacaaataccctcatcttttcgtttatatttatacttataagtcaaaatttaaatatttcacattaaatttgaagctaattttgagggtttttttatcaaagtttatttttcagcctttacttttattactaagaacacataaattattatcgatgggcgcgtaagttgattaattgaagtagaaatctctagcctgtctccgaggtagcagtcacccagtagctccgtcacgctgcctgttagcttgcggttcaatatgcgttgtgattacaacaggcaaaacattgagcaatccatttgtatacatcttacaaagacggtgagattagcacggcattaccctgcggataaggattgaatatggagtaccgaggtagcatgtaaatggcatggctgttgtgcgttgtgccagggctcattgccatcacgtgttcatgcttcacacgtaaagtacatacagacgttgtaattagatttgaagatgtgtttattgacaaggtattggcaaaacggccgcagaacaccaatgtctaggtcggcttgaccaactatgaacaatgttgaaaataaccaatcatggcaccctacgccagggcaagaaccatagccacactcatcaatcttcaactcgcaattgcagcatagggcagctagtagttcggaatgagaatggacaattgccgaatggccacgagaagttagaatccggcccaccctgatggttgctccactttcttcgctgctcctgagctgaatctctgggaggaactcccctgagcagtgggcctgttgatctgagcggcagtactccctggtgatgtcctgaaactatctggcccgaaaccccaaccatctggtgattgtcttgagtttgcgttccttgccaggttttgcgctccattggtagaatgatcaacctttggtctgacctgagcaggttgagatttggggtcagggaatgcctgccatgttttggcttcagagctaggtaatgagtttgcgagcattccttgctcaagctcccacaccgttccttcaatcttctccttacgctacatatgaatgcaagtctcaggtaagattctaacagaattaagaaataggttaaatacgttgtaccagatatacaaacggagcacgaacctgtggcccggagtctggtaatcttgagctgactttgcttgatggaggtgtagtctcggcaagagtgcgcttgagctcttgaatctcctggcgctgggagcggcatattgcagacaacttttcaaacttggctgtcatctcggccttctctgatgatgttttcttcaactgctccttcagattggacacttctgcttcaagctcagattccttactagcaacattggtcccagaatggagattgtttgcttcaaaatcagcgacaaagctgttgaagggatccttctctgattttggttgtgattctttagttttcaaagaactttgtgactccatgaacagatttgtgttagcaccacttgcaagcccattgtttgatacagagttacttggtgtaccccggacagcctggccagaacgaccatgtctatctccaggggcactgatgctgatatcccctctgctttggttatgctttgatgaaggtgatggttttattggttcctcatcaaacaaagagttcctattatctgcaacttgagaaccctgtgcatgctgtgttgcccaaaatgcacctagaggtgcatctcctgcctttgagcttccatgagataacgaactattggattgttctattggaggaggaggcgggttccttctaggcatcacatgtgttcttttataagcacctatacaagaaaaaaacaagacaaggctccaattatgcaaacaaattattgcaatcttacatgatttggtggcttctgtctgaattgacaatagcaaaataatgcagtaagcctacctcagccaacaatcacactatcttttagaaaatatttagaactaacaatcagactagaacagtaaatgtttattctagcatgcagtgcacatcatgatggcatggcacaaaggctgtatatcctagaggacaagaaggtaggtcatgacagaaaggttgcttagcctataggacaagaaaataggtcaatgacaaatgcagtgaagcaatgcccataatcataacatccaaacaaatcatagaggatgccaaaagctccctgatgagaaaaagatatacgagtgcataagaaataccaaaaaatatgtttatttgaagatggcccacatacatttgaagcaaccccacatgaataatgaagtgcattctagtgccaatagcatgtctttcagcataccttcatcttgcaaactcatggaaatgcctgacgaagctccatcgggtagatttttctgtaactcgagaggtagtagttcatttacacgaaaccagacctgtcaaatgtacaaagtctaacatcagatttagaaaaatatgcttatgtggttcctaaggctacatgcaacagtctatgactaacctagtatcatggagatgaatggccaatcaatcaaagctcttgcctgcgtgacatcaggtctgtcatttggagaggcttccagcatatctttgatcaactttgtgacagcggcactatacttgggttgctctggaatacgataattgccattaagtatctgcaacttggactctccatcaaatgcagacttgaagtagcatattctatatagaaggcaccccaaggcctgccaaatgtcaattcaaaaaaattttataaacaaattcaccttggtttgaatataatgcattgcaggatgaatatatagatttcaaaaattaagaacagtgtgattcaccaagatgtatctaaatgctaagtagatatgccagcataataattaaagtggatatagcatataatagtacttgctgtgaatataattacacttacccagatatcgactttctcactaataacttctcttctgtaaagatcccacatctggaaaatgcatccatggggtcactgggggttacacaggttttaaaaactataaattactccatgggcaattgtttctttacctcaggggccctatatgctggggttgtatgcttccggatgatatcttcctcaatccccatctcttctggcctatcaaagcatttatggtttgttgatgtgcttccaaaatcgcacaatttccatgcaccgtctaatccaagaagaacattttcagctttcagatccctaaagaatcagaaaagaggcagaatgtaagatgcatgtaggtgataaacaataaagcgattgctataaaaccaggtccctcatttacacctaatctggaataaccctaactgattatttgtttgcatatgcccagccttgagaaaatagacaagctacaaggtgcaggagttccgcacttcacaacagaacataaatttagtacatacacagtttgctaatataccagcaattgcttagtgaattcaagtaatctaatcaaacagtaaaacagaacagcataactactgcaggaacgtactttcaaatacttgataaaagcacataaaacgttctagcaacgatgagatataactatctttgatactttaattttttttttcaacatacctatgtgcaattggtggtgactgaccatgcatagcaaaaactgcattgcatacatctctgagaatcaaaagtgccttcttctcctcataataaccagtacctctgctctccattgcgctaaccaaggacttctcacagaactccataacaagtagtgcctcctttgtgcggcccatatcaaaaacatcatgggcaactagtgtaaccacattaggatgccctttgaggaggttcatcacctggatctcctccattacaagatcaagcaattctgagtcgttgcagatgatgtgcttcattgcgtactgctttgatggatgcattgcgtcggatgccagatatacacaagagaaacctccttgtgcaatagcattgcgtactgtaatcttaatgttgccaacatcaatggtgcgaccttccaatccattttgtactttccccccgaagggattgaacctccacattatttttttttccgcgtgcccctacgaatataaatgaaaatccactgtttaatttttgtcagtgcgctcttacaaatatttctgtgtagataaaaagaaagagtgaagctccaatatgcagtaagtaaaactgtaattgtaaaagtatagcactatatctgtgtactacaagattaaaagaaatactagctgctcaaacaaggttatcaagctccatcacctaggccctaatacaattaccgtttaggatttttactaatctgaagatttaacatagcaactgcacatggcacacccagcagttaaggataaccacatttgacaaaggtaagaaaataagaagtaataagccatgtcatgcaatgagctgaaattttactttcggcctgtctgaattggataacatagtattaagctaggaccagcaaacaaaacgtaaattctttgttaaaaagaggagaacccatattctctgtaactaattaattatttaagggtaatccaagtatccaagtgaaccaaaatgggtgtgactagtcacccacaggtaaacccgattgctggcacagttctccactaagatatctgatataagcaatggcgttgctgtgaggcactaactccgcagaaatcacagaatccataagaccgtgtattctaaactggttaatcctaagcagagcggatgctatgaacacatctccagtacgatcagcctcatataagatcatctcgtcgaaaccgctgtgcatcctcgataaacaccagaagtaaagggaattcgtggtgcctttcagccagatttcaaccaagcatctaaaataaccaccaaacaaaacaaccaactaaatacgctcccgtgccacacacccccgcgcgcgcagatcgctgcgatcccattcccacgcacgatccaatccaatccaatccaaccatccctccccatgccaaatgcagatccgagcgccccgcccggtgaaaccgaacctacccacgcgggcgggccgcggcgtcgcgttccccagcgaaacgcgaatcgcgcggaagagcttggccaggccaggcgaaggcttacgcggcgcgcacctattagatcgaaggctcctccgtactcctctggggctcgcgtcctcgccgccgccgccgcccgcgggcggattcgcagcgcgatctgcggtggtggaggaggaggttgctgggggtgcgcctgcgttgtgatgcgacgcccgtggaggtggaggtggaggcaggcgagggagggagggaaaaaggaatggacgaggggcgagacgtggtgatggatggagtggtggaggtggaggtggtggaaccgtggcgtggggagctttgcagttgcagccttgcagggggtgtggccgggtgtgggggccacgcaagggggtgtgggctaaaatattttccttcttttttgcgcctttttgttttcgtttttttttttttgctcgcgtcgccttcttattggcagcctcagcaatcaaagaaaggtgttgtaaaattccaaatcagcatcatcccaacttgacaggttattagagcaaagttaataatacagctgacttgttgtatgtaagattctttatagtcttctctcagcccacccatataatagttagctctttataattaatatttcatccgtttcacaatgtaagttacaattaatgaatctagacagatatatatgtctagattcattaacatcaatatgaatatggaaaatgttagaatgacttacattgtgaaacgaaggtagtacatggttaatttgtcttctctcctctttctctgctctacctcggtatttagttggcttacaacctcctattatactttctcttagtagttccaaaatgcatggtgcattctcttttttttattttagatgaagaaatttcagaaggattgcaagtcacaaaatcgtaattttaattcaaaacaagaaaatcaattagtataacacaagcctgaaggcagagataacacttgcattttcgaatatggatgcaagaatctataaaaccattgtgttgtctagtggcttataagttgcatatagtcattttatttctaaaactagaaagaagaatctctaaaattagcggccattcattataccagttatgtttggatcacatcaaaccgaagcggaagatccattagtgtagcatcgcctctacaatgaataaccatacatcatctatatgccattttgaagactagttgttgtttgattcatagccttagtttgccataacattagcacgcaggtttaatcaacttagcccaacgtttggtttgtttacacttttcatgtgtcataacattcaacttagggtcctcgcttgtgtactattcatagccaaagtttgcatagctaatagttccttagccacaaaagttgtggcgtgccgtatcttagctcaaaatatttggcaaaataatacatgcaaccaaagagctcaacacaccgatcagttctgcaggaccatcatttgccttttgacttatcaattgcatacaaaaattgaattgtgaaactaaattttagagttgatttgtaagtttttttaatcgtagttttattctggctttcaagtcgttaagaacatggatatatataagtatattcattatttttttctattaataatccattttatggcttactagctgtagacaaggtttgctaaaccgtccttatttgtgagggtatgttaagagttattggaagtagggtttggtaaattttgttcggatccaaattatgaaaaaaggataaattctcctaaaatttataggatcaatacatgatttgcaatgatatctggtgacaaaactttataaaaataaagctaattctatattttggcatgactaaaaggcaacattggtccaaaatcgatgtttgatgctcgtgaatgttatatgtgaatgctataatcatcatagttgtagacattatatatttctattgtcaaacgtggttttttcccgtgattttctttttatttaagtcaaaagagcatgtttaccacgccttatcgtgctgcgattgccacgacataaccacagtaatcgcgatattgtcataagatttaaattttgatatttaaattttagaagataaaattcacatggtctttagcggtaaccaaacggttaccgtgataaccgtcttattgtggggtaacggtaatctcccatagatcatatgagaaacttggttgtaggttaaacgattaaacttgcgttgaaaattgacgatgatcgaactctcgttaacaaccttctaaacttgattttaagtttgaaaggcttgaacacaagtgcaacattctcaatttcttatattcgaaatcctggcaatcccttttaaaatcttgggagcacttgtttctttgccactacttgcggttgaccggtactttcacgttcgaaacctcaaccaaatcatggtggtgcacggttttcgggtttggtagcatgttgttatcgggtaccacagggtgccccatcgcaaatcgagaatgaaacagagccacagacaaacacagaggtgcgaagcttcgtgaaaaaggcaacgcgtcggtgcgatgctgcagtgcagtttgcctttgtgcttgtccagatccgacaaaatttttcgctctgtcagatcaaatattaaatataaaaaaataactaattacatccgtggataaattgtgagacgaatcttttaaacctaattgctctattattatttgacaatatggtgctactgtaaacatttcctaataacgaattaatcaggcttaataaattcgtttcgcagtttacaaacataatttgtaattttatttgttattaatttatatttaatactttaaatatgtgtctgtatatatgatgtgacgtaccaaaactttacacccataaatctaaacgccccctctggtgacagatcgaaacgttggggctatatctgtcacagacaaattcggtgttactacagcggtgcatgtatcgtacatttgtacgtgtaattcaagcactttggacggatggaccaatcactgatcaatcgatcatgtgacttctccggctcaagaggtgacagcaaaacaacatgggcttaacagatttaaatatcaacctaacatgcccttacacccgcagtgagcagtgaagatcttcaactagatttaaccatttataaataagaaagcataagtatagcttaagaaatgctcaaaataaaaaatagttttcaaacaattgtaatagctattttattcaatgttagattaagggttgggaaaagaatatttatagtttaaggttacctaagagatgatttttaaggaggtaaaaaatatcaagctaacaatttttaaagaaaaagtattaactacagcaaaataaaccaattcggagagaaagtactctctccgttttactcagtgtcatattatttcttagtcaaaattctttacattcattcaatcaaatttatagaaaaactagcttacattcattcaatcaaatttatagaaaaaatagctaacatctactctattcttacacacaagattggctttatgggcatcgagaaatgcaaatatgtagattggctttatgggcatcgagaaatgcaaatatgtagaattaattattcttgatctgtagatgaaatatgactataagaaatagatgaagagagtacgtcattctagcattttctctaatattaatgaatataaacatataaatctctttaaattcattaacatcaatactctttaaattcattaacatcaatacaaatgtaatacgaatataaaaaatgctaaaataactcacattaaatcgaagtactacaatttaattttattttatattaaacatattttaatacaatatttgtttttattataaatattactataatttattacaaatcaaatttgaatttttttaaaaagagttctatttaattaactatagctaaatttagatttggtattttgtgggtagggaggcccacacaggcaagtcctgcaaaagtaagcagtgtcaatacccgcgcgagcctcttcccctcgcaaaaattgccgtgcagggtttgagtcccgcaccgcgagcggctctcaccgcaacgctttgttttccttactcattagtttaaggcaagttttttcgttgcacctcacccaccttatatagcaccagccgcaccccgcatctcctccggccagcgaggtgggattattcaccacattccccctctcgttcgttgcgctgtgtcgaccatatatgggccgtggtggcccattgacctgagagggttggagcccagccgtaaaatgtgggccgcactgcgtcggcccataactagatgcgaacatgggctaggcccacttaattcaggtctctgaccttaaaccctccgctcgcctcctccgcgaagcatatacacccccattctcttcctcgcgccgccgccgccgaagcagctgcgaccgccgccgccgcgattcgagccccagccatggcgaagaagcggaagcgctcctccgatgcggcggccgcggtggagaagcccgacgagttcgcgccgcagcgcccggagcgcaccctcttcggcttcaaggagaagcccgcggacgacgaggaagccgaggccgaggccgcctctgagggagaagaggatgccgccgccgccgccgccgcggcgccgttccgcaacaaggagaaggtgctcgtgacctgctcccgccgaatcaactaccggtgagtggcgccgcaccgcgcgctcgtttttttttcgttcggtgtgatgtggcggcggatagatcgattgatgtgtggatgtgttgtttttgtggggggattggggtggtgggttttgctcgtaggtatcggcatctgatgcagaacgtggtgtcgctgctgccgcacgccaagaaggacagcaaggtcgagtcgaagcagagcaagggcaatgcgctcaacgagctgctcgagctcaggaactgctccagctgcctcttcttcgaggtatatatttacacatatactgctacgatctcaagttgcttcaggcctcatctttgatgcgctgatggttgcgtgcttgataggagaagcatgcaataggattatcactagctgttgaatcgttctatacttctgttcttaacatgcattaagctagtgatttgtagttctagcgctaaaacaatttcactctttagtaattctatatttcttttctgctgcggagattactgagctactacttcactatgataataaagcttggagcttcaaattctctgttcagtttagaccttagtattgcaattctgatggtggaacttcttctatatgtatactacagtgcagaaaacagaaggatctttacctttggatggttaagtcccctggaggaccatcagtgaaatttctagttaatgctggtaagtatgtcaagtatttgtgagctgtaatctgtacaagattatggacattattccatcagtgcctaaatgtccagtaatgtttacatgcagttcacaccatggaggagttgaagcttacagggaaccatctgaaagggtcacggcctcttataacattttctacaaattttgatgaacaacctcactggcagcttgtgaaagaaatgctaacccaggtgcatgactgatttgatatgttattttgctctacatgcattcttatcaatgaacaagttgatcatgcactagactaaataactaatctttatcaacttattgtgactttagtcttggttttttgcctggtaacagcgttcaaacttgagtagttgaattaaatacatgttttttgataatgtcttattgtacttgtagaacccagtttgtgaattcaattcacaagtattgagagtgttctgttgtttatggactagcctgtaggtatctgctgtactgtctacatgaaacactttacatccatttttgacatgttgataactttgattaagaaagtgtaatccttttaaaaatctggttctagacttcacaattttttagtactttccatcatacacctttttcttaatgctgtcagttttcagaattaatatttggtcatgatgccaatatgaatgttgttttagctttcacatgttatgaactttatggagaactgggggaatgcaatccgtgatgaagttatacatgcttcttttctagtaaagcagttgagaaacaaacttgccctaaaaaacataagaaactaactattatttgctctgcagatatttgctactccaaaagatcatcgaaaggcaaagccttttcatgaccatgtgtttgtcttctctatcgttgatgaccatgtttggtttagaaattatcaggtaatatattagtctgtttgttttcttaattttcattaactcctgccagttacaagcaatagaagttcctagcattgtctgaatattaccgtatgatcaactttgtcagatttctgttccccacaatgagattgacaaggttgataaaggaggtctggacaagatgacacttgttgaggtaaaggcgcatagcttctatttgtataatatttttttatgtttccaagtttagtttcagttttgagatcgaacttgctgtgtaggttggcccaaggttctgtttgaacccaatcaaaatatttggcggtagtttcggtggccctacattgtacgagaatccattctatgtgtctcccaatcaggtatcccttttttaccaccaattgattgctgtgtatgtacaatacatatttctgagcatcttaggtgagcacctgaaaatgttaaagcaatctaggtttgtttgttctggtcatgcttacgctttcttttgtgtatcattaaatggaccaacaaaagtttttgctgttgtgtttgctctgttcattgattcgtctaagcattgtgattttgattcaactataacaaatcatttaccctcatgttgcacgactgcacgtgtagttcatatgtttattttgttatcttcgtcagatccgtgcactagagaagcggaagaaggccggcaagtatgccaagaaggtcaaggctaaggtgaggaggaagatgcacgagatggagaacactctggagcctgatgaatttgctgaactttggaaaggggaggactagttcagctatagtgattgaaccatcaacccccgttaaactagttgctctcgctgtcacccgacacgagttttgtttactatatctcgtggaatttcttgtatgacaccatgagtctattatttacatgaataagattttagtgtcctatcctaactccatctcgtctcgtgcttaaaagtataattcgcattagtagacttatatgtgcttattgcttgttacgtttttttgttaccactgttttaccatgtttttggcacaatacaatttgaagggcctgtttgggggagcttaaaattctgagaagcagctgtcagcttctggcttcttagttcatttttcagaatttgtaactatagattctcagaagctatggattgtttggggcagcttttggaaaaagctacagctgggacaagctccactaaacagggccaaaaacgaggacccgatgtgagcaagcttataggaaggggaaaaaagagtcactttccatcgtttggcgctctgctcataagtcagttctaaagtttaaattttaaaacttaattttgaagttgattataggtttattttttatgttggtttttaaactgcaataacacaaacataaagtttaccaacaaatcttttttcttctgttgcttatatgtcgttttatgccctatcagacaagatcatgcaaccgaaagtaagtaccaaggatagccgtgaggtaatcaaaaaagatttgaaattactttttgtcaaaataacgagggggaaaacatctacccgtaaaaatctgtctagagcaaacgcttcgctcttattatgggctgtgaacttagcaaaacaaaacggacggattagtttcatgtgcgtccctgatatatgtctgagtttcatttgcatccctcaatcatataataaaaacgtttattttacattagttttacgagttggagtatactctatatctggttttgcatccctcaaccgtaaaccaaatatagattacgtccattttgtacttagttttacaagttggaggcatacccagttttgcggttaagggtcaagcaatcaatactttttgagggatgttaagtggactttttttccacggccgaaacataccgcgtgcatacgtgctgcgttaaacgagcccaagaccaaaatccaggagagcccaagaagctagggtttccgcctccacgccgccgcacgtatataaacctgcgaccaaaccctcccctccattctccttcccaccccaccgccgcctccaccctctctctcgcgccgcagcgaagcgcctcccgcagcaatggcgccgacgtcgaagctgtcgcagggcatcaagcgcgcgtcgcggtcgcacacctaccaccgccgcgggctctgggccatcaaggccaagaacggcggcaccttccccaaggccggcaagcccgccgccgccgccgagcccaagttctaccccgccgacgacgtcaagccccgcgcccccagcacccgcaaggccaaccctaccaagctcaggtctcagccatgcgaccaactatcggctgctcgtgatctatggatcggtgttcctgagtgatttttatctgtttgtttgtttgtttgcgtgatgcaggtcgaccatcacgccggggacggtgctgatcctgctcgccgggaggtacatggggaagcgcgtcgtgttcctcaagcagctcaagtccggcctgctcctcatcaccggtaaaccccttcccgcctctccccgtgcctgtgatactgcgatgattgattttggcttgtggctgtgccatctgggaagcttgtagtgtgcggatctatgaattgattttgtatagttgcacttcgtttgttatttagttcgggaattgtgaaatcagtacctgtagcttatgtcgatttatatctgatgcaaatgtgagatttattacccaatttataatcgagtgttcatttccctaatagatactgtattattcatatccatgcgattgagtcatgttaattgttagtagtaacaactgtattattaagaaataaaaccaaataactcaaaaaaaatgtagggctaaaactactaaacttttgatgttactatgttctctaaaccgcaattttagtgcctactctgaattgctcataagagctggtctttcaaacaagcagggacaatcaatccatcatagttattttggcaaatattgttttgttaggaatcttttgcctcattgatatagattgagctgaaatttgcatctgtaatacaaagatgtaaaatggattgtgctgttttttgtaatggaaattccatataacatgcacactgaatgcaaaaagggaattgtatatttttgccactcaccctctggcatattttgatgtttttagtagaatgtaatagtctcactttgttttaatcaagttaatttcattttgatgggatctgacctaagccaggaaattggttaagctctgattacaatcaatgaattggttgggttcagatttttacaatcaaagcactggattttggcctaaattcttattgttctccttcaggaccttttaagatcaatggagtgcccatccgccgtgtgaaccaggcctacgtcattgccacatccacgaaggttgacatctctggtgttaaggtggataagtttgatgacaagtactttgcccgggacaagaaggcaaaggccaagaagaccgagggtgaactttttgagacagagaaggaggtatgtcttgattctgtatggcattcctccatggccagttaccggtttagctccaatgctaactcacctgcctattctctgttgaatcttataggcaaccaagaatctgcccgacttcaagaaggatgaccagaaggctgtggatgctgagttgatcaaggctatcgaggttgtcccagacctgaaatcctatcttggtgcccggttctctctcagggacggcgacaagccccatgagatgacattctaagttagtcggtacaagtttcaagttctgaggaagtctttttgcctagtgtgtttctgtacttctgaattttgtacccgggtagtgaactctccatttctgttgaagtctgcctgtcaaatattatgagaagattaagagaaggattatctactttggtggttcatggttaccgtacctactcaaatgtgcaatgcataacatttgagccataattaagctattgcgttgcaagttgtgtactggtgtctatttgattttttttttgcttgtttccgcgaggttaacttatttaactttcagtgcttgatgcatgccacttaggccggtgcaatgctgacgagttgcccttaacgtttcggttgtttacaatttgtttcaacttgtttacggatatattgatttaaacaaaaaagcatgtatgagtttgatttgcagcattagtgtatagacaagatgatctgataaaagaagggcgattgctgtggttgcaaacagtaatagcagatggccgatttcgcaacaaaacaaggtaatagcggattagtaacatatcagcgtgctcggccagattttggacatccctatggagtgtgggtgtcggtaggagtacgaggtttatagattcaagtatgcaaacgatagtgaaggtatgatctaataagagtgattgctccgtctcctcccgtaaaaaaaaaacaacttataactgaatatgattgtaacataatacaacaaatcgtaacatttataatcgtatatttgtctttttcgggatagagagtaatgaagatataagtggtattgaggtggtatataaaacggagacagggaatggtggaagtagtgatggttggttgtatgttttacatgaggaaagggaaatgagtatcattcaattctatatttgtcttttttgggatagagtgagtaatgacgatatcagtggcattgaggtggtatataagacgaactaagaaagggtcgccaccgcgggaacgtgaacggttagatcgaccctactgcgagatcgaacggacaatattggtgagaaccaatatgttattaataaaaacttagggttttttttaaaaaatgctgacgtggcacggtaaattctcagtgatcccatggcatgtagagaggttaatatgtggaagggcatggggaaggggcgaagtagtgatggatagctgtatgttttatatgagggaagtgagattagggagaacggattgatgagtgcatacaacgatagatacatattgttgaatctcaatagaatggacaaaaatgatttaaaaaatatgctaatagcaataatacatagtcatattttggcgcgaaaactcaaaactatggtacaatcatatttaatatatattagtgacgatgtgagtggcagtgaggtgcatatatgtgataaatgagttaaaggtgataaggcacatggataaaaggggttcttattgtatcttgtaactgtttatgattaggtgaggtgatacttgttgtgtatgggaaggatggagaatcggaggcggtggttgttcatttccagtatgttttactcaagaaataggagcgtgggagaacggatcaataagtcgatgtaatcataaataaaataccattgaatctcaatagagtgacaagtcaattttaaaatatgctaataacaataataccttgtctctttttatttgttatgtgttattttggcgcaaaaacacctaacaacggtaacatcatgtttacaatacattttttccaattaaaacgggagaatatttattctttgtttctcttttctatcccgctatttggaacaacgatcactgtgactaaactacattctctattttaagattacctctacattagttttccttttcgtttttgttcaggtatatttaattgatggcaaatactattagtgcaccatagttgatgcagaaactaggactttgcattttgcttatctaaattaataattaaaaataaaaacctgaaattgatataatattgtaaataccgctctacagtccatccatacattatatatttttcaaatccttttcttttgtttcccaatttttgtgttgctgggttttttgctttcctcccttccaaaattcaaacgaagccctaggctccaaacagccctaggctttccgcattgcggcgcggcctcagcggcggccggcggcgtgggctccggcggctcgagctccggcagcgccggcggcggacggcttccttttggtcttgcgcgcgtaggttggattggatgtttttttgctgcctccgtttcgatgatttttgttttttttttggtttgctccatttccatttacagccatttcttcgccgcaggaaatcgaagccttcgtttgacgattccttcccaaagctaagcccctaccaaatggagaagttcctcgtggcggcgcctccaccttccggcgatgctccggcggcaccggttcctccgaggtgctccccccttccccgatctcagtacacccgttactgaactggattgcgttttttttttcgcttctctgaccttatctcgatccgcagacggcaccggtggagccgcgtcgccgccgagctggacggccgcatcgacgctaggtttcggcaccgggagtccgttcgcctgcgcgattcgttctccgaggtgacagaaatctcggaaaagagcatttgctttgtttccgtgttggttattacgaagttgttttcactactgggattactgcatatgagttagacactggaactggaattctctagagcggctaacgacatatttacttttttgtttctttttagtaatgctaatcataggttgtagattccaatagcaaagctgctcccttatgtttcttctgttgcaataagctggtagaagtgctagaacttgcgaagtagcacttataggatgtcattggtcgccctgatctctttccggttgctcaatgttctttcctgagctggtggtcaggcatcaggaaaggggtccctaacagcttaggcgcgggttcgataccgtcgtcgtgctcgctgcctagtccatctggaaggaaaggaacaacagggtgttctatcagcagcagcactcgtggccggacgtagctagggcagcggcagaggaggctgccttgtggagatcggcaggtctgctcccggagttgacaatcagcattagggtcgcaaaatttatgccgggacatatcacctttgtaaccttctctttgtttcttttttctgtccgggttggtttgtaagttgttgactttattccctaatcgtaatacaaagatgcgcaaatattttgcgcattctcgaaaaaacaaagctatggccctttttgatttagtagatcaagagtttgtgtcaatgtcctccaaggttcaaattggtgcttatggctctatgctcgctgctggagatgtggaaaatattgtttaagagaccatctcaactcgtgtacaattctatagatgtaatatgaatcagccagtagcataaaggtataacttgaaatagagcttatgacatgtactttattaactatcctagcacagtatctttctttgagaatggcagaaccgtgtatgccatcatagcagggttttagttttgaattctgcaggacaacaaggagggtggttttagttgttactatgccagttttccagttctttttttttaaggaaaaccattttcatgttttattgcaacatattttattggattttgattaatttatttatttttatgttgggaagataaggaccttcagtcacaattactacatggaaggccaggagcgatgtacaacatatgtaatgctcatcctgtgcttttttaaaaatcttttttagtgtgcctctcccctaccttatttctaccgacaaggctcattatgtaccttgtaatgttgaatccctgttcgttatttgactgatgagttctaccattgctcctatcagatgaatcgagttgttaacgattcagtcctgggatttcaagcagtaaggtcagcatttttattttatgttatttgctgtatttcattataaaagcacaattttaaactttaaagtagttggctagttgctataatctccttcctagagtttcactctgctgtttgtagccatccttttaatacactaataaccttgccttttttttttcttttggcagagaggggatttcagcaatggaatttgataaaaaggtagcgttgaaatgtcagttcaattttccttgtttagcatgactgcctactgcaattgcttgtaggctggaacatatatttttttttgaagactattgttacatattgttctgtaaaaggaaaaacaatatttatgcaataatacgttgtaatttagaataatgccattaaaagtttcctttttcatacatgccaatgccatcgcatagtttctagtaagagacatgccattatgagctactggtgtgcacattttacctaattaccccatcttcgtcgctttcctcccaacctttctctactnnnnnnnnnnnnnnnnnnnnngcactacgatagtgcagctgcctctgccatctggttctactagatctgtcatctgagtctagcaggaggtggctgagatagagtggcagcattggaggaggatcgacagcaccattggggtagggtggatgacggtcctttgcatgcaacgcacctattgcaaagtgctggcaccttccttgcagcactggcagccatggactttgctagcagatctgtccatgtggctcccttgttggcagcacgtccatgttaactccaatttgtcttgtagcgttaggccgtccacatcttgaacggcagcctccacctttgagggatccaattcatgtctccagcacacctcccatgctcaagaggtgtgctggagatgggagtggaggaaatgtggaaactgtgggaacatgggagatggtggagagactgaaagggaggagagagcaagaaaaatggggcaaataggtcaatttggatatccaatggcatatggtgaacacatcaactttgtaatggcatgtttctaagcataaatttgtgatggaatatctaaactataatgtttgaaatgacatttatctatttttcctatataaaatgtttacacacatttcttgtgtttctgattggcagggaatataccttgcatcagttacagcctcgggatgtttaaccgtgcatgattttgagaccttatactgctccacatatggtccatcacggggtaagttaaaacagagcccaacttgaccatctaagagattaaattggattatatcaagtccacagacatgtcggaatccccttatacataagcaagtactcaaaccgttatacataagcagaccaagagtgtgagtgtagttttaaaatgtggatatttcctttctagcacaaaccattatgtgtttataaaattgcttttccttgtcactgagatagacctgccttttcttgtcaatgtgatattgaagttaaggacttaattctttttccaagaatatgggtacacttctgtagtttttgttactgcattattgttggtacaaaatgatgcaattcagcattcaaacttctacacatctagttggaatatatgcatctgagagcacaccaaaagaattgcaatggtgaccaatgcatcatttccatttttttggaatgaaactacagttaggcgcacccagcagttaattttataaattgggtaaacaatttgtacaaaaaaggaaaagagacaaacagtttcaattacaaagtttataaccaggcaagaacaatgcattgtttcattttccaacaacatactctaagagaagggataaagtgagaggtggcactccaaatgttctttctcaaaagttgttataatttcttgataagttgcttttttttgtaaggttctccataactttctgcctttgtatttatcataatccttctgcaatttactgtttgttggtaggtttgccagatgaatcatcaaactatttgctacatatatcaaactcaatgcccctatgtgctgtccgatggaatccagcaaatcaagatgaggtctgtaattgtgcactagctgaatctttatgtgtgtggtattttagatttctagcttatttcagatcagaaagtactttgtcgatttaacattgatgggttcattttgtaaggatgaaccgtgtcttgtattatctgtcattctatttcttattgttgtatgcctgctgaggatagtttgtacatgtataccaaataacatggacacctgtttgatattggctatgtcccatcagtggcaaatcttcttctccatcatttatctcttataattgcattcatgctgcagatagtttgtgtatctagacaaactgacatggttctcctgtttgatattggctgtgtctcgtccacgccaactgaagtaagtgcccttttcccatttatagttcgttttgtcttctctcattacaagaactgtattctagtaactctagatcaaatacttttgctttgctttgtttgccaattttaactcaccgaccttctgttattaataatttagattttacggaaaggaagatccagatatcctgtgctctctgaattccgcaaaggtttgactgatgtagctttttcttcagatgataagtcatggtatgtgacaaaatttgtattgttcacccttggcatgccaattatgtttgcttcttttaaataatgcaaccgtaaatgcataaactattgctagctagtatttgatgtaaagcttggctgtgattgacagcatattgtgttctttcttaatttagaagttgaggttaattttaacccctattgtacatacaatactatgtaaacccaggaattctacaaattttgcacattgcaatgatatttcttttgttgtttgggtgggcatggggtatgttaatatagaaaataggattatagccagggtatgtggattgactggattctgcttatggtggttgttggtttgtaaaagcaagctactacagagattgccaacagcgtccctcttcttgttttttaaatgaaacaatgttgttactaatatgctatgcttatttgtgctccttccttaggttatttgcatctggccttgatggagcggtcttcatgtgggacatgcggctaagtaaaaaacactgtcttgagctcataggacatccagaatctcaatttagcagtgtcaagctaaatatagataaccgggtacgctaatttagcagtgtcaagctctttgcctctttagctttctgaattatgttctcatatcgacctatctctgtttaagattctgagtttccaacttggcttgtaaattgaacttagtgttacagaattttagagatgtaaaaagaagtttggttatttgtgttaaagtttgggccattcatagatggaggctgacagtttattttctagaccgtgtttgctgcaactaaagagggcaccgttcatgcctgggatctccgtggagggagggcatcagctgcttttcaaagccataatgaggtactctgctagctcttcctcatttttatgcggtatcgcaccatcctacttgatcttcattttgataatttttatgatcatatattcagaatagcaaacttctgttcatgattttttcttttgggtctaggttcaacaattatcatcagtgaagatatcaactttgttgggcaaaattccatcgctaaaggtatgaaaaacaaaaacaaacttatgattgcgcataaggaaattaatttctccttttgcaagtttccattcttgtgagcatttagatgtttcatgtagtcacagtatcggtgagatgtgaattatcaaattcatatagagtacttattaaatacccaaatttagaattaatgctagctattgttttgcatgcaactattaagtttgatgatattgacttgcggtaactcagtagaatatagaacgccaaacggcaatgatatatccctcttgagcttgtttactcttctgaaaactgtttaccagaaaaaaaaaactatatgtatgttaacttgtcaattctcttgggtcaagttttttcttttgaaaattttgaaatcttgatatttggaacaaacctaacagtcattatgcacatctagctgaaaagggaggtcactggggatttatttagtgctttaaaccagtcagattatgtattcttgctgcgaactggcagtttgcttagtttttgccatatcaggaagtacctaaaccctggacatacttctgttgtcctaaaataagttcatttcttgccattgggattaaaattagtatgggggaaaacaacaaaatgacacatctcaagtaatgaaatggagggcatggtttctacggcttgtttgaagctattataactcatcctccaattggcaccttcattaaatgtgagatagatggtatatcatctaatgggggtttccttgctactatatatattattttcttttaacatatttgatcactgtcttcaggaccaaacgaacattgtgtcgagtgaaattctttcaatagacttcaaccctagttgctcatatcagttagccttccatcttgacaatggctggtaagtagtgtgttgcactgttattaattatctgactgtaaagcaaggttactttgttgacttattggaattttccatccaccatcctttcgggtgacatatttaattactcttctacttgtttaagtgttctgtgctatggtctagatctcagtgacaatcttttccatatgcatgttaggtctggagccttgaacattaacaccctcagtgtgagtcacctgcactgccctcctcctgattggttgtaagtagattacttctgccttcacaaatcttcttagtcaaagtaacctttgctaattggacctattgttttgttgttctcttctgtttgttttactagggagcacatgaacttcatgtggcaaaagctacatagaaaaccgacctggttgccgacatcttcagtaagaatattatagatcacatgcaattctttttattaaatttgaaacctgcatatcttgttgcaaggtgaaaaggatttcaataatgctgaataaggcactttcatttatcactgtagtcataataataaatatctcatctggcattgaaatacattggagctagatgcataacatacactttacattatccagatttatgcagttggatctgcctccaatactgttggcatgcatctactggattttcatccagatacaagttcagcatgccatgtcgactacaagtgagctgatatttgctttccttttcttcttaatttacacaatcatacattttgtcaacaatcttctttggtctttattctcacttggcattccatgtttcagtgaggaaataagaggctccgatgaaaagaaacctgcagcaaacaagtttattccttcatctcagagagttgtttcctgtgcagcacatcccttctgtcatactatacttgccggtactcaggttagttcccttccatcttcagttactagaatgacctccatctcggcgtataattgggaaagctatatgcattacgcatcagttgcagatctgagtctgttggcaaaagttaacttcttgttatcctcttcagttttcatctttgctcgtgttatcgcaaaagcaagagtctatcaaaaactcggagtagcggtgtcatggaacaatcttgatttgcctccaagacaatatctccaaatgcagtcacagtgctctacattagctcgtgggccgtcctgcatcggagaatgatcagccgcatgggagcacaatctattggtcccaccacagaggctcccaacctgatcgaccggtcaaaaagaactaaatctcttggcgttacatgattcgatcttctgccagtgcattgcctccaagatgggcgacagatttctgtgttgcaaccgaccatgtatgtactttcatggcatgctcctaggggctctgaaggttcgcttacctgtacatgatttcccccgttccctgaactccctatctctgtagatcgtacataagttgtgtttcccagtttctcgcaatgtcggtgtatctcctggatgtaatactgtataatgaactgcttcatccgttccaaaatataacatactggtactagattatacataacctagtgccaacatgtatcctgtgcggttgatgccgctgctgatccagaccgtggttgtcctgggctcctggccggcggcgccgttggggtggcggtcagcaaagaaggcggtgtgggggatgcatgctcaccgagccaggaggccctggacagctctcaccggaggcggcagagatggcacagagatttcgacaggttgagccgagcaggcatcagtcagtatagtgcgcaggcttccgtttccgtgctctgatcagaagcgagcggctccttccctgcatcagtttctgccgcagcgtgcgcccttctccgtggaggcctgacatggagcgccagtgtaatcgtgtggagagcacacgctgcatgcggtcgtctctggcgccggcaccggcacggcggcaaccgtctcttgcgcggccgggcgcatggtatcaccggctcaccgctggtgaaaagggaaaaacgagatttggagggagagacacccctctaaatacttttttaaagaaaaattatgagtgtgtcaattgaacatgagactttagggttgaaattatagaccacttgtcactacactatcaggtgcatcttgtagcaccgccagtgtccaggtggcctccgccttcaaaaagtattcgccttgtttttgttcgcccatgcgaataattcctcttttattagagagcatgagaaagttgcttgaaatcatcgtagtgttagctaacagcaactgccagtcactattttctgcttcggttgctcttcccttctcttgtctagcaaaaaggatgatgtgatctgctgctaaatctggacaaaatttcccttttttttttgcccagatttaaatattgtttgaaaatttcgttcaacaatcgtgataaaaatcctgaaacctcccaaaattcagaatatgggtgccccaaattttcttttccccttccgaaagtgcaaatcagcaatgggtcaaagcatgtttgtttcagatgttttcaacagaggagttataaaagctgatgcacataaatatgaagatcggatccttcagggcacttcttcgagaatctagaattctacaaagaaatggtgtttgcatgtggctgtgttctttagtctgctttctctcattttttcgcgcgcacgcttcctaaattgctaaacgatgtgtttttttgcaaaaaaaaatctatagaaaatacttaattaatcatgccaaatcgttggaaatgttcccaactccaactagggaacacagaggattgagaagcaaaggacattggggtccttgatagaggaggcaagctaggaaggtgtatgaagctgaacaggtggaaatgctgagaaacgagaagcctgccatccaggaggctgagaaggaagaagtgattcccatgtgcacattagaccacttcttttgtgtttgttcattttcagtatcttttgtgtttgcttatttaacatatggaaaaaactgatacgatcagtgtatgcttgtttcaacttagataaatcagactggtgttcctcctacctgaattaaaatcatatattgaggtgttcgagtcattttgatcatcttttccattggaattgttgattcctggaattggagctgtgctaaatatacccatgcttgccatgccatgacgcaataaataacagacctagcacacatctcagcgtgtatcatacggtaaaaaaaaatcgagtgatagctaagaaaaatcgtttcgagtgagatatatttcaatgaaaaatcattggttgaaacagaaaattggggttacggaaaaaaatatttcaatgccgccttttctcccaaataaaatccccatctttatttagatcgtcgtaccttttcaaccaaaaaaagggaaaaatgacagttgatcaccaagacaatcttaaagactgaatcttgctaccagcttggaagcatgcaaaactgagataggcctctatgattttctagtaaagcagtataatttccattgggaaatcaccaacaacgtgcaaagttctgatgatttctactgctcaatactgtataatcaagtaaatcaggacgttatgcgacgagtcacaatgttcacaccaaagagaagttatgttctacgacagaagtgccatactgtagttaatacaataacagagtcacagaaaatcttgtcttgttagctactaacagttgtcgatgtctcaatggagcgtgcagtaaaaatatacagaagctatacacagttgaaggtctgctgcagtaagcatgtaccagtacgacgaatggtattatcaacagctaatcctatctatgccctcaagaagagagctaggctacccccccatatcccagggtcctcaagcagagatccccctcaatggtacacaaaactgagcaccatgcctcaacaagcccaggatcacagcagggatggaagaagagcagctgatgcaaagggtttggctaggactagcggctaagaaagcagcagacaagtgggaaaacctcgcagttgcaggcctgagcaggcctcactctctcctctggacagtgtgatcagctcatctcatctcatctcatctcatggacaacagggtgcgcttctggatggtcaccttggaaggctgagcagccttcggagctctcttgaggttcttccttaccatcttctctatctgctctatggagctggacagttccttctccatgagatcagcaagagctggatcatttggtctggatggtgtctgaaaggagcagtcagatggagaagaagatgatgccttcggcttgccctcggccaagtaagctgttgatgtgcttgcaacagcttgggttgagccaggacaaggggcagcagcatccagggccttttgagttggtggtgttggtgtgctttgagggacaccttcttctttttgtactggagttgctggatccacagatcgtgaagaatcttcactcaactggatctgctgccgaaccgcagcatttccgaggcgacttttcctctcaactgcctgcaaatggtaggtaaaattataagcatattgtcatggatgcgtgattatatccattaacttgaaggatgtatcagcattgttatcctgctacgactcagtactgcacaagcatatgttcaacatatgagcataaatacaactacagggaaaaaaaggcatgaataactataaaaatgacagagaactatgtacaacaaaatgaacaacaaaaccccttttctctttcccccaacgacagcattgaagcaaaatgtgaaatctggattaactggtattataataaaatgagatatataactctggttgtttgacactgcggaaaatacacttatttttgctatgaagataaggactaatatatcagctagcaagaatttcatcaaggccaaaaaggagctgttttgtatttaagcagctatatacacaacaagccgaagtactgaatatgtaccaatcaaagtacttcaaaaagttatccttaaagtttaacaggaaagtatctgttaaactatcgaacactgagtaaaatttaacaggagaagaacagaagaaagcactgtagcaaagccaaactgaaatcgcacccggtaaactacagcttgatgaatacatttagttcaattttttcaggttaagtgaatctcaaaagatatgactactggcaaggcaagcaagttaggctgttgccaaggttctatatagcacaaattccaacattgaggtatttcctcatcctctattaccttcggtgcacaccattgaaaaaaatgtatataactaaaaaatgcacctacctctataatgcaaagcagccatgaattatgattcatgataaaacagacccaatcccccaaattggtggctctttagttttagtccataaagtgtacaaccaacaagtccaacgaatcacacatatcatagttgattcctcacatgatcagaagatcattaagaaatgcaacagacatgaaatggatgaatggcacatttacatgttttaagcctgttatttcactgaacttctcagaaaattaatcagtattttatctgattactggtcacttaaaatgacggataggcatatcaaaacagataaagaaaaaaacaaaaaaaacaccatttgttcagaagaaagtccctcgttgcttcttactaacaaaattcagcgattttgttgcagtgacagaaaagatgcccaattataaccagcagtagccagaagacacttaatttgctagactgcaactattgctagtaatattcacaataggtaaccaagacatcctcaactcaagcctaatcacaatttcagaatcatgtgcacaacatttagcattaccatatcaccgtgaacatatcatgcatcaaatataacctaacctgaacacaacaatatattgacacaaatcctcaagaacataccatgcataaaaacctaaagtattaaaacatgatattagcacaaaatgaccacacaattttacaggattcagagaacatccaccacaaagcccatgggaactgttcatcaccttgacgactgatgtgatatcatggagtgggctacacgacatataatgcaaatttgtcatgaattatgatgattcatgttataacagaccgaattccccaagtgtgtacaaccaaacaagtacaacaaattagacatgtcatagttgattactcacatcagaagagcattcaaagtttaagcctgttatttcactgaacttccctgaaattttgcatagtatgtcatctaattactgatcacctaaaataagatagacagatcgaagaagatacaaaaaagagcgaagaagcatcggttggtgaagtccctcattgctaattcatttatagtctgatatgattttgcaagtataaaaaggtactaattgattatagtatcaagcaattgtgttcctcattttagtgattgaaatgcttactaacaaaattcagggactttgttgcgataagcagaaagaaatgcatatttatcatcagtagtagtcgaaggacaccttaatttcctagactgctactcttgctagtgatattcactatctgtaaagaattcaacctcgaacacaagaccaccacaattccagaatcacgagcacaccaatcttagcactatcatatcttcaagaacataccattcaccaattataccctacctaaacatgataactgacacaaatcctcaagaacacaccatgcatcaaaataataaaaacctgaagtcctacacatgatatcagcacacaaaaaacgaccacaccaatttcacaggattcagagcacatccaacccaccacacagcctacgggaatggttcatcaccttgacgactgacgtgatgtcgcggagtgggctcctcgggtaccactcgggcagggggctcctcctcttgggtgtagccctcacggtcacagcccaggacggcggcacgttctccttgttgctcgtcggcggcagggcccgccgagccagcggcttgaccgccacggctcccggcggcgacgtcgtcctcctgataaagaacccaccacccgaggggtcggcgagcgccgccctaccgccggaatttctcacttcaggcatcctggagatctgcgagaagaactcatgagcaactaatggaatgaagatttttcgcacaaattctgcgcggctcagatttggctcctgcctcttccaagtaaaaagaaaaaaaaaccaccaagacaagaaattgcccccaagaaacaccagaaaacatctaagctccggttttttcaactcagattcgtcctgaaatcctctaatccccatcgatttgcaactaaatgacccagaaaaaaaacacagaagggtttgggggaaacgaacacgaaccaacgaatccccacaaaaaaaccaaccaaatctcccaaaattcagccatctcaccttcagattcctgccgctgcaaccccccgcacgcgaatcctatcccctcccgcagatctgcaaaagatcagaatcacaccacaacgcatcaggaaaagaaaataatcgcccaaagaaacccaagaaaacaaacaccaccccacccaaccaaaaaaaaaaaaaacgcgaaaacaacctacgatttgctcggctcttctccgattccttccgatccgggccccgcggcgactactaactcccctacgatagaatcacctaactatggtggaatagatccctagggtttggagcttggaggtggctatggctatggctatgggctctaactaacgggagggggggagaccaggagaggcggcgcgtgggcggggggattcttatcgcgttttgaaatggccggtgcacggcgtgatccgtggaccgagagcagcatctcgccgtccgtaggagggatggacggcggggattgttccggtgtatggaccacgtgtatgcggtttggggatttggagttcttgaccgttggttgctttgctctgctctctcggctgagaagtgagaactctgcatcaaggtgttctttattattattattaatttattttttggaatttggacggtaaaaattgctccgaaaattggcacatgatgattattttttgagcctcaaatgggagcatcgatttttattcatctctattaaaatatggagtatatatttacaacaaagtgttccctagaaaactgatttcaagttgttgagagaacatgacaaacatacttcgacatgtgggactttgtctatagtttgtgtattactgctcttgtttttaattcatataatatcatgtatgccattgtgattaggcacctttggcgtatcgtagggacatgtgcctccgacatgtgggaccgtaagggtggccccaccagttagggactcgcgccactacccgtaactctgtaagaggagttgattccaagccattgatgatcgaattacgtttgtgccagagcttgctagtgctcttgctgttgtggatggtggtggcggagcttactgcttatgaaaaaaaaatcaatgttacagaatatggaccgatatgtgattttgtggactatagagttcctagagagttgtgactatgcatttccagcttcatatactcagaagaacaaatatgtcttttttacttaggagttaacggtcaatacacagtcaacatataggagtgatataagagggtgtagaaatttagaccaatggcatataagaaattaggacaattttcagtggcatatgagattctctcatatctagttacacggcaactcgatcttgtttttacgagttcaactgcaacaacattacttgagcatagacgtactcgttataaacctctagacattatccatatcttgagaacgaaggcggaggttaaggatccctgttctttgctctatcttccaaactcaagctcgctcgttttctttctgtacgcttcccaaatgtactaatctatatgtttgagtactaaactatacgttttctaaaaaaaattctatacgaaagttgttttagaaaatcatatttaaaattaactactccgttttacgtgagtatgaaattagttcccaacaccacatgccgaaagctacgaggcaaggcatagaaatcattccatcgttgtcaaacaccctagcaaagagcaacaacgcgtacagtacccccagcttgtctcgcttcgaacacaacaacatccatcgccagaaactgcaacggtcgatccaagcaggaagatgctactggtttagtagcatggcatgtccccatctcaaggaacactagttgatgcgaaggaaggacttatgcctggtgtgtttggattggcatggcctatggggacagattagaagtaagcgctcccatgatgtgcttagctgataggtgcattctcggtgcctcccaacctcaatccagctcgtgtggtctgtgagaactgaagattatttcggctcaagattgtaccaaggatgcagaaatggtttccgtttagaaaagatgcagaactaggtgtatgtgtaggaagaagaggcagatggatagctgctgatgactttgaagttgaagtaggtgagaaagaggactagtgaggcaaatatcttgccttttttgtttcgcaaaatcaagtggagtaggtttcaatttaagagaggttaaagacaagcaaaggagtaatgtggagcagatagaaaaagaaaaaaaagacgaattacccctcgaactattatggtcgtccgaattacccctctaaaccataaaaccgaacatcctttacccccaactatgcaaaccggatgaattaccctcctcgacccaatctacggtggttttggtctacgtagcgtacgcgtggcagtccagtcaccactctattataaaaaaaaaatgtgggacccacctgtcatctcctcattctctcttctctctctcactcttcctctctctctcaaacgggtcggcggcggtgggggaggacgtggtggcggcggtgtgcgggcggtggcggagcgcggggaggacgcaacggtggctcgtatatcccgcgtgcaggagctcgagcttgctcggcggctcgtcgatcccgcgaaggaactcgaggaggggcggtcgccatcgccatcactcgcgccgcgcgccgtcgccatctcccctcgagccccgcctgcgccgcgcgccgtcgtccgtcgtcgccgtcgcctcgagccccgctcgcgcgccgtctgtcgccgtcaccccgcgccagtgtgcccgcgtgatgccgccgtcgcgtctcgaaggaggcgagcgcggcgacggaggaggcaagggggcggcggaagagcgcggtggagtcggagtcctccacctagcctactccgccctagccgccggagtgctcgtctcccctccaaggccgcagcctcctccgccgccgccggctctcctcgcctcacctcgccgccgcagcctcctctgccgccgcagcctcccctcgcctcacctcaccgccgcagcctcctccgccagtgctcgcctcctccgctgccacagcctcttgcgccgccgtcacctcgcctcgcctcacctcgccgctgcagcctcctctgcctctgctgcggcggccgcctcgcctcgccgccgcagcctcgcctcggcgcccttccctcgcccagctgaagagagagagagagagtgagagattgggagagaaaaagagtaagaaacttacaggtgggatcacctattttttttataaataaattgctgactggactgccacgtaggatcaaaaccaccgcggattgagtcgaggggggtaattcgtccggtttgtatagttggtggtgaaggatgtccggttttgtatttcaggggataattcgaacgaccgcgatagttcgggaggtaattcgtactttttccatagaaaaacttgcgcggtaggaacaacaatcacacatctcacaaaattgttcacatgagatcgaagattccaaattaattctactatcagtagagctatgagaagtgggtgcacgacttcaaatcacagatgcaaaactagcatactgcaggacaacgctatcggctgattgaaaatccaataatatgaataataacatagcattgattgactggctactgcagagcagtgctcatacgaacaaaaatatcaagattttgatttaatgaaaaattaagacacagccacgatgtggctccatgtcagtgttcgtaacaagtttgcaagagaatttatgtatgccagtattggtaaaaaagagaagcttttttttttactaaaaaaatagaagcttttggacaaaggaaaaaacacatcacaagccgtcgatcaatagtttgacgaaaaaataactaattacacagattgcatgtaaattacgagacgaatcttttaaacctaattgcgtcataatttgacaatatggtgctacaataaatatttactaatgacggattaattagacttaataaattcgtctcgtggtttacatgcggattctgtaatttattttgttattagactacatttaataccttaaatgtgtgtccgtatatccgatatgacacgccaaaactttacacctctgtatctaaacacaacctgaacttgctgcaggtttgcacatgttagaactcactaatcaataattttgctgaaaagctagacacatacgggactacgggagtctcgagttacaatttttggtttatggcgtactacgagcaagtttaatagtacaattagttacaagctataattttatacatgtcatctatagatagttttagagataatttctacaatagatatctctaatctcttcactatacacttgactatacagtgggtcctaccctcctctctccctcctaccttttctctttgccctcctgtcttgtgcgcaggctaacatggtttcaccaatcacaaattaagaactgaacatgaaatggggctcaccaggtgtggaggaatgtgctgcagctagcgcttattttgtcgcccgcattccttctctctcttagagcaggtttaattaaacaggcgactgccggcggtaaaaaacaccacatcagcgatagagataactagaagatgggtgtatgtacagctgttggttatacgcacaagcaccaataaattgattattatttttttacgcctaatccgtacccacgcattgcctcacatagacccacatggaactatgggataagctttttctatagtttctttcttcttggagtttgtgtgtagtcggcgatatagtcgtccgctaccacccactctcctggttttttccatccagctcatcactttggccaggttggatgcgctatcgcctgcttaaaccgtttattatacctgctcttaccctctctttctttcaacacaccaaagaatcagacgtggtatttttgtgcctgctctactagacaaacgtatgcgccggttatgatcatcttgagcggagagcccccaaggccccaaatgaaatcaaggcgttggaggacggtccactattgtcaccttgtcctcgatgcaggaggatcagcaattcgatcgattatagtcacaccctgcgaccgctgctactccagtccctcgtaacactctgcttagggccctcgctgagcgagacataaaaccattacgggtgccatacgaagaggggttctccactgttttctagctgggctaacagctggatttctgatgcttaccattcctatatcgaacgatattgggatgaaacaattactatacgtcgagtagtgtatctgaactcaagcttgagacaaggtatgtgcatggagtgatagagtagctagctctttctccttatatcacttgtatatctcctaattgctattttggatatttttcactgggtgttgggtatagtgaaaggcggccggacaaggaggagaggagatacataagtggtgcctcttaatatttggtggttcggctagcttcagaacctcttaaagtgatagaaaaagcactgacaagaaggattgcaccaactatatctttatgctaattaacttatggataaccataagagcatgcccatcacaaagtactaagcctaatttccacatcatcaagagccaaccatctaaacaactcatacaacagttaggtctctaccaataatgcctaatatggagtatttattttaatgaccctaaatcttatgctctgttgattggcgtgttttctccttaaaattaactgagcctgaaatctgaagaacaagctagtgatgattgatatggatttaattagggaaaaaatttaatcttgaaattttcaatggccataactgaccacaaagaaatactccctatgtttcatatcataattaagtctttcttattcttttttctttatcaaatttcttgcggtttaatcaaatttatagaaaaacccagtaacacctataacatcaaattaatttcataaaatgtaacatcgaatatattttgataatgtgtttattttatataaaaatattgctatatttttctataaacttgatcaaacttttaaaaaatttaactacgaaaaaaatcaaaacagcttataatataaaacggagagagcagtaacttcgccgagacaaagatagcaacttcatgttctttatttcttgagcctgtcaccgaaatgcaagcaaccatcagtcgtgtcacaacgtccacatatacaagcggcggagggcgctagcagatcttcccacggatcggtgcaagaacagaagccgcggaggccggacgtcatgccagccggtggcatagttctcgtgaagcccggacgagtactagcgtatccgctgagtacagattatcgagacgtcgcctcgcagctgatcagttctttatgggtgatactttggttcctggtgcctcctagtcccagtgaaggatcaggggtgtctgtagaactgtagtacaagattacttggcctttttattttctttctggacagctactagattttttttattgatcccatgaagcacatgtttggtgtctgtatatactatgagagaagaggattggagatcaggcatatatgtatgctgaggttttagtggcaaatataggatggaaaagatggtaaatattaagaggactcttccgtctagataaaaatcaatcatgggcagcaaagttgttttcatttgtatttgccctttagtttaaattttcaatttcattaagaaaaactaaatacaaaatgaaaaataactttctctttttttatacataggtcatcggcattggataaaaaagggcagagcactttctagttatggacccaaatcctttagcatggaatattttcttttttaattaaaaacccttagtatatgaaagaatgaaaatgtgtttttgttattttctcgtggaataagaagccctcgtaccttaatgaaatgaaacaacagtaaccagcacatgtttatatatagtcattaatttggtgcatgctgtggttattgcatctcacgagagttattgtcccttgtcgagactttctctatgggctctatatataggctgtgtttagatccaaactttggatccaaacttcagtccttttccatcacatcagcctgtcatacacacaacttttcagtcacatcatccccaatttcaaccaaaatccaaactttgccatcaactaaacacagccatattctagacacacaacgactaggatgtaattctctgccatagaaaaaaggtgatgggcgcatggaacaagcgataagaaggacggagcaacacatcctgtagggattagtggattattgcctggatgagtgaaatatacttgtctgttgtctcctaatttactgacatcactcaactcgaaatggagaacatgttcaaactacaaggcatgtctagtatggatgtactgacaagcaaacaaacaatggctttgatcgtttgtacttgcagccagcaagctgcgtcctgttgctgctacatcaaatcagcttgcatagagctggctggctgcagctgcggtgttgtagccagcacaaacgatcagccccaatgtgtgttgttcttggtgcaggcgcgcgattcgtgcactattcggccggccctctccttgctctatccacgacacatctaggctcgatccatactacaaccttcatcccaagctattgccatggcatctctggtcccagcactaggatcttgctaagtgctcgacattatattgtcatgtgtaccatatctaggagattctaccaaaacacggaggcatttctaatggctatgtttccaacgccttccattcctatacggaacgatgaagctagctagcattatgtttggcttctatctgaactctagcttgcacaacaggcatagcatggcagcaagatagagctcctctttatcacttgtatctctcactattcttttgaatctttttcatcatattagtgaagggtgtgtgtaactagaggagacgaggtaggctttggttcttgatatagttcgtgtgtgtggggttgggggggattgcaccaagccaccaactacagattaattcactagagctagcctactgatgtaaagatgggaaaaatattcagagcacatgagtaagcaggtggtactaatagtaatagagcctgaaatctgaattaggagccagtgttggtcgatatgcatttaattaagtgaagactttgatcttgagatcttttaggtaccattactgattacagattaatagctgtgtcatgccaaaaggattaaacaaaagctctacgaaaaaaaaaagataataaggattgagaagctagtgctgtactactgtccagtacttaattctcagactttcagaaccaacgtgactagtaagccccccgttctggtcaaggcagcttcgtgtatagatagccatatggcccgagtcccacggcccagcccaagtcacgtcaatttggtccggcccaagcacagcacggcccgattggggtcatgctcgtgccggcccagcccgacagccaggccgcgcttgggctgctctctcggcacggtgggccggcacggcacggcacgatcaagaaaaatagtagaggcacgtaaaatacacttaattaaccatatgaggcaaggcccaaaaacatgagaaatacaaaatagacttatttttcagtcatatggacacaacctatagagtttagggaaaaagtagacttattctgtggagaagaatgatagctgttgtgccttcaggccagcccggcacgtcccgagtcttactgggccgtgtatgcagcccgtgggctggcacgacatggtctagcatgtaggtcgggccgtgccggtccgactgacctcagcccaagcccgtatcaggcggcccatttggccatctttagaacgcatcctcttcagagcaatcgatcgagctccaatgtaactcgaaatggcttgctgatcatgatgctgggcaaagcttcgtcttccacctgtgcaatatcctcatattaactctacttcttagcctagctcttagcacttgcatatcgtccgccgaagagcagtatgtatatttacccaaacatatagactgatcagccctgatcaacgtgctcaacacatccaaaactcagatacacacattcatatgttatgtgtttcagatttactactactctctaattcttccatacgaagagagcatacaataccatatgcatcagcgacaaatatttcttaagataacgagaagatacgaggaagaaggccaacgtacaggagacacaaaaggcctatacattgtgtccacaaccacaagtgaagaagcaagcgcctgtcgatcgatcgcgagctccctcgctccatggacacaagccacacaactccaacggcgagtacctctctccggagccatccgccgatccatccacaccaaacgatcatcatgatcactgcgccactggaccggctcctggacagcacgcaaagtgtctgagcagttcttcaccaacacagaagttcttgtaggcggtcaggttggtttgtgtgattctttgattcccagtgcctcctagtcccagtgaatggaaaatgagcatgtacgtacacaactgtgatacacttttgatcgatattttacttcacttcacccttttggccatctactgtatatagtttttgttggatatatagagtatatatcccatgtaactgcgtggttggtttttgtattcggaagagaggatcgatcagagagcgtgtgtaataaataatgctaaggttatggtagctagaaaggtaaaggcgaggcgagctaaatgtacaggttatataagagcaaggttaataatagtgccgactgctgactccaaccgattgccacgtccttcaatcaccagccatctgcaacaacatacaacagcagcgaatacttcatcttttaatgaagctaatctctaaccagccattactttaagtctattcatttttccgttggttgttgtgagggcaggtgggcccatggcaggcaaagtgcctagctagactcacgtgtagagctggacataaggcctcctccaacaaggatgagtcagctagctcataaatctccacatcagcttttgtatgatgtagaagagagagaagataaggagagagagtgcactatctcttcttcaagagctaagctcctaaacaaaatatgagaggggttgtggaacccaaagcattttgaacaatgtgctatgagacaacctattaaaaaggtagactttttgctatctcttgtatgaggtggacaagcatgagctagtgcactagctcaaccattgaaggaggcctaatagtcgctcgcttctctctttgcaagctttctttctctgccacacgtgctaaaatcgtataagcaggctataagctcactattgtacctgctctaagactcgtactaccagtccaccgtaaaaggggttacaaatttaacagcaaaactaattagcacatatttatttagtgcatgttttactcaaaagtcatgttgtacgtactgatttaagactatttttttataaactcaaaatccatggctatatgcattttggatgtggaggctggctgttaggtttgcacacaaagtgtagattgttggtcacaagtatgtagcatgattcagctagaaattaattgagtgtatcacatatatatatgggtccttagttatactagcaatgcaacatgtatagcttcatcaaatttcaacaaaccaaccaaaaaccgggatattaaattgtagcacatgcaacatgcctacaggttggtgtgaaaatatatggctacgaactaaacaagcctttaaggatctaataacatcttccttactttgaaagaaatagtaccgagtataaatatatataccaatgttatacaacggtggtttaatttcagcttatagccgtgttgtatatcatgttgttttgttgtttttttccttgaccataattatagcctcgtaattttttcatcgaccgtaacctaataaaccttgctgagcggcaaggggattggggctgatttacagagccaaaga

SEQ ID NO: 4445 - DNA, 19583 bp, Oryza sativa
  unsure (1)..(19583): unsure at all n locations
agaaggagccaatagggaaaagaaaccacccgcccgctgcccgctactgagtttatgatttacgtcaaccaaccttttcatccgatcaataggaaaagagaacggggtcctaccgccgttcttttaaaaagagtttcgacggcgcgaacaatatctccgacccccccaaccgtttgtggaaagaaaggcgtgcaccgccgccttggtcgctcgtaaggggagaaggggcggggggaggggggaaatgaatcctagggttagggttagggtttgggtgtatttatttaggttaggattaatctggaccgtccattcaatcggacggctccagctgctcccacgtcgggccgccggcctattgggccaccgaatggaggacgtaaaatggacttcaatggagatgaaaacaggccagacacatagaataaaagggagggaatataacattttctatattcggcccaatcatagaaaggaggattttgattttttttccaattaaataattgttaaatgcttttttattattaaaaattagcaattaagctctgataattacaataaaattccaaagagtgtaactaatcatggaaaatttaataaaattaaatttaaccatgttattttatttttcacacttgctttacttgtaaattgatttttatacacctacctatttaaaaataccaaatattttaattaattacataatgtaaagttttcttaactttttctcaatttttttttctgtacacttcctgttgcaacgtacgggcacctttgcttattttaattaattacataatgtaaatttttcttaacttttttctcaattttttttgttctgtacacttcccgttgcaacgcacgggcacctttgctagtatatatatatatatatatgctctaattgggcactttttaggaacgttaacatccctccattgtttgattgaatgtattatcatgaccgtagatcctcttgagggtccatgttaaataaatcatgccacactttacgcccaagaaagatcatgccattgaaaatgatatggactcttatttaataaatcagaaattagtaattaataataaatatggtggcaaaaatatcaagcttagactgtcagtttagtattttattaatctatttttaaaattcgaaattaataattagctagttgtaactgacgtggactctcttttaacataagcaactacactttcaaaggaaaccaacacgttaaatataatattagagctttaatatttatagtgtcaatattcattaagaaggggtgaaacgatgatatgttcgcacgttatccgtaggacctctcaaagaaagaaattgaaggatatatgaaacgtttgaccattcgtcctagttaaatttttcgtgcaaatataaaaatatttatatcatgcttaaaaatatttgatgataaatcaagtcatattaattatataaatttttttaataagataaatggtcaaacgtttagtaaaaaagttaacggtgttatacattaaaatacggagggagtattaggtagagttgtcgtttttgctacggtatgtttcaggtgttagggcaccaacgttgcaccaacattattttcaataggtcccataatcagggtagttagtaagtttgtgccaaatccattatgtgttatggatagggtggtaaacaaggcgaggcactattgaaaataaaatcctctaacttcagtctctctagtgagtagaaacactacaaataatatgctttatttgcttgttgctagtaatagcacaaagatccgctttttgttattacctcttcccacgatgcttattacctaatagcaacggtgtatttattgcttgttaccgggttttctattacgggtgtgtttagttatttggttgtaaagtttttgatgtatacggatacacatttgaagtattaaacgtagactaataataaaacaaattacagattacgcctgtaaactacgagacgaatttattaagcctaattaatccgtcattagtaaatatttattgtagtatcacattgttaaattatagtgtaattaggctcaaaaaattcatctcgtaatttacatgcaaactatataattggttttttttccacatttaatgctctatgcatgtgtccaaacatttgatgtaatttttggccaaaatttttttaatctaaacaatgcctacattgtaattgcccatagataggccctgcacaaaaaccgagttatttcaccctgttagctgaaatgcagtgatcctgccacttggtcttgatgaaacaaacaagaacaatagtgaatgaacccagaagatcgagaatcattagaagacaaaaataaaaggaccacccatcatttctacgacccagcagatttgtcggattttacatcatcttgcaagttgcagttggaccactaaccgactaacacaagcagtgttttctgcacgatctgcaccgatttccccttccctgagccagccagtcactgatagatgactcccactctcctattgcttcacacgttagtgtttataatggttattagtaatgatagaggatgtaaaccttatttcgtgcgaattctcgaacgagctctacgcattcacggagcaccaccgccacctcatccgtgacaagtgttactctggtgactggaagcagcaattgagcgtcagataagtagatgtgcctgctgtaagagagaaacattagtaacattgaaccacaaattccttgatcaatagttttctgatcatatctgaagctctccgtagaagcttaagcatatgcaacagaattgagctttgtaacaatcagcaacaacacaatgaagagggattcgatgaaaagctacggtagatttgcgagtgaacaattcgcagacttaactgctggtttcagtttcttccaaaagaaaagaaactgcagtttctgctaggtacctagttcttcatctcatagccaaacatgcattaatcttaccaaatatacaaccaaagattttgagaactgaacatgttgccaaatgaaaaaacgcaatatatcaaaagtcatgtgcagtatttcataactaatccactatgaacttcagataaccagcgcattattgcctaatcgaccttactcaaaagctctaattagatcattatatcttgccaccaaaacatagtagtactaattactgatatgttattacgatatatagttttaccatcaacaagctattagtacgaaaaacctatatgcacatgggatacctgtcaagaagtgcatatccactaaatctaaaacttaacgtataaagatgccacatcatcatccactaacaattattatatttaaacatcgtgtaaacatgttattttatctataattttataatttattaaattttatagctttttaaatgcaaacatgttaagtcatcatcttatataattcacataatatttcaatatgtcatttttcatcttttttataatatcttataaatctttatagttcatcctaactcctaacttagttaaaatatgctcctctctctctcctcttattaagttacatcacttcaattgttttgttcttagatgattatctatggtttaaattatctccctcttttattctcttattaagtcatatcattgatccttagttaaaatatgctcccctctctctctctcctcttattaagttacatcacttcaattgttttgttcttaattctcttattaagtcatatcattgatccttagttaaaatatgctcccctctctctctctcctcttattaagttacatcacttcaattgttttgttcttagatgattatctatggtttaaattatctccctcttttattctcttattaagtcatatcactgatccttagttaaaatatgctcctctctctctctcctcttattaagttacatcacttcaattgttttgttcttagatgattatctatggtttaaattatctccctcttttattctcttattaagtcatattactgatcaattgttttagcccttcgatatttaatctacggtccaaactatcttctttcttttctttctctcgtaaagtcatatcagcttacttttacatttgaatcatcattatacatactatttaaatttaaattattataaaccacattaactttcttaagattatattatctagtattctagctatatatcttacacattatttttacttagtaaactcccgtagtaacacgcaggatttcacctagttcaatatatgccaccagaggccacgctaccaagttactactagatgtcactagagctaattatccatttcacaactactagctagtaatactaattaagtatgacttaattacaattagagatgattaattattactactgctacagcattgccaacttcttaacattgatagggtagactttgtccggcgagttggagccgtacgccttgcgtgccagcctggcattcaccacgtctgtcgggtggagcccatcgaagaaggcgtacttggtcctgtcactgcagatggccccccccttctgacacagcacgcctcccctcgacacctcacagcaagctcgactcgttttcctgatgcctgagcaattataaaaaccatcaaagcaaattaggcacttaatacagctagctttgttgcttgcacgagtgatgaggaatgtttggattgatggacaaaaacacatgaataataatattgtaggaaaaagaaatatatagaaatatatgaataattaaaaaaacaacactgaaaaattaatatggacgtggttttggaacatgaattttagacttgcttaaaataaaaaaggtgtaatagattctttcaaggaattttttccctagatttgaggacattttttcccttgatttgcactagaataacaatagaatagataatgttaggaaagttttttcaagggattcttgatccattcctgcattccaaacagctatatagctaaaaagactataattttaaattccttttgtttttctttaaaattcccctaccaaatagaccctggaaatatcacgagaaaatagtagtggtaggaaaggaaaaggggagggtgcatcatttcactcataactaatttcttttgagtttcagaaatatatgatcgcttaattattaccatattttgccgggtgctgtattatatcgctaatgatcttgtaggaattgacgtagacgaagctcgcggcgggcatgtgtgacctcacgccaccattgtgatttttaacgatagatcttagcccagagttgaagaggagcgccgcatggttcatcggctcaatgcaagcatcactggtagcgttgaggaaggtcctcaccacaggggtgcaacccaggggttggatggagaatagcacaaacttccttgcccctagatcatacaatctctgaaaaaagtaaaaataagagtcataatttaaataaaacatgtacaaaagatatttattgtatctgttgattattatgtgtaatctcgaagaatataaaagggatgatatggagaaaagaaagactacagtaccaatcaatgtactatccatccaactactatgtactcttgcaatattattatgtcatgtacccttcacattcattacttctcagtctgagttcaaggtccacatatatatagctgcctgtacattttctccccagttccttctctttatttcacatgtaccaggaactataccaccatatccagtagttataattaattaacatgccatatctgtggctttaatagcaaatccatatgttatgggtacacaaagatatactcctacttaattaaggtgtgcattaaattaaggtggtactacctgcaggtggtttgagagcttggtgaggagtgagcttgtgaactctgacaagggggcccttgtgggcccactaccagcgttgaagtagttgagcaagtagtcattgccacctgtcccaatgataaacaggctcttgggcaggtaacactggtcaaagaaatcctggcccttcatcttgtgtccggtggtggtggtggctgtggttgctccctgcaggtgggcccgcaggtcagggagtgtcactgcctcaaagttggtgatctgctgctttaggctcaagacctctccctaataagattagttacagacacaaattagcaattaagctggctaattttacatcttaattcttttgaaacacaagaaccatacactttatttcattaagaaaaaaaagtacaacagagcaatttataaaaatgaaacctataaaaaacccatcgcaagcaatgcgtataaataaaactcctaaccatccatccaagggaagcaatctattttgatgcttagtttataagttgatttgaggtttctttatggcattatgtttctagttgtggctttcaaacttttaagaatagatttataggggatgtttggattggttccaatttgttttggtagtttcaaatagtgttttgttggtatttggattaagaccaaattttttacctagctagtaatatatcgccctacaaaatttgaccgcgtcaaaatttatctagattttaacactaccagtattttagtagggttttaaaccaaatcagcccataataattttaccaaaaatatgtcttgaaccttttttttcacaacttcagccttagctcaaccgaatagagcctcaccctcaaataaacgcaagcatcattacaaggaatgaagaagtatactccatccatcctaaaacatacgacgccgttaactttttacatattgtttggccatctatttattcaaaaattcaatataaatttgtaaaaatagaagttagattatagttttttataataaaacaagtaacaataaaacaaacaatatttatatttttaaaaaaaacaaaatgattgatcaaacattataaaaaagtcagcgtcatcgtatatttttagaacgaagggaattactatatagggacaattgctcatcaagtaacgcagaccttgttcttgccggtgaggtcgaggatgccggagccgccggaggcgaagttgacgccgtggagggcggcgcggccgcgggtggcggggtcggcgaaaggcgggaggaggccgccggcggggaggcgaaggagctccccgagggcgtcgatgacgttgcggccgttggagaagcggccggtggcgcccagcgggaagtcgacgccgtagggcgcgtagtcggcgcgcacggcgccggagccgttcaggtggttgttgttgccgttgtccaccagcgagctcccgaacacgaacaccgccctcaccgccgccgcccttgccgttgctccgccgccgccatggacgacgaagctcgcagcagcagcaggtttgcattggtggcaatggagatgcagcagcaggaggaagaggaagaggtagaggtagagagttgctccgacgagcttggccatggccggcaagctgatgagctagataatgtggctgcacaagatcgatagcatctgctacttgtatagcagaaggagagaattgaatgctactagccggtaggtttgggcactgcatgcacgtcgtggtttagtaattacagtttgggggagagagagaagttactgcgtgctggtttttagtatagcagcaatttatgcgggtgcaaggtgcaatactgcaatgcatgtacagtgtccttcccgcgaaggaaggatctggtgcacacaacggcacatgccatttgcccaactgtaatttggccttgttgagttcgcgaaaataaatattttgggtgtcacatcaaacgtttgatcggatgtctgaaggggttttcggatacaaatgaaaaaactaattccataactcatatgaaaacctcgagataaatttattaagcctaattaattcattattagcacatataggttactgtagcatttatggctaatcatggactaattaggctcaaaagattcgtcttataattttcatgcaaacggtgcaatcagttttttattgtatctatatttaatgctccatgcatgtgtccaaatattcgatgtgacgttttttacggggaaaaaaatttaagagctaaactaggccttcttctatcccctcctcccacttataactcgcaacagctggtctatatgcaaaaagtaaccaccgaaaacagtattttatcttaaatcatatttatagtagcttatttctagttatatacatatctgatgtgctacgagctaggtcttttttttaaaaaaaaaatcacattgatatgttctagggcacatctatattgtataaacaacatgtgctcaaggacggagaacaaggaaatgttcaagacaggcagtaattgcttatacactttgtatcttatttttttctataatttttcatagatatctaacacaaatcaagaagacaaatttagggctctggacttaagccctagttgttctgtcttatctcggccattgtgcattttgaccattgaatatatcaaatccatgcgtaagatctttggtggtgttcgattctaacgatcgagtcaagtttgcaaaacaagaaaaccatttgtgtataattaattaagttaaaatatataaaatttcaaaaataaatttatttaatattttatagtgacttttatataaaaagttttcgtacgaaactcactgttttacgttttacatgtttagaaaacatgttaatagaaatcaaggtagaaacaatatcttaatcataatcttaaggaaaatatgaatacatgaatgtagaactcaaatatttggagatatgtttcagattagggatggcaacagggcggggtgggttgggctggaatgcccctgcccccgacccccgacttcaccctcctcccccgtccccggcctcgaccgttgatgcagggccaaatcaacccccgtccccgacccctccggggccccgcaacccgaccgggcccccgcattggatagcatctccatccaatcagaaaaaaaatacaagacattcatcaaattagcaaaaacaaaaattgcacatagtggacacaccatcaaaaatagaatgaatcgtcggcatcgtgaatcgctggctgccgccgcgcctgtcccctcgctgggcgccgcgcccttgccgcaacctcgccggccgttgcgctcctgccgcaacctcgccggccaccgcgccttgccgcacgaccgggcctatgcgccaccccgtgcgtcgtttgcactgccggagggagaggtggaggtggactcgggagggagaggtaaaggggacgggatgggaggccagaggggagaggagaggaggggagggaagagggcgaccgacgaccggcgagattcagaggtgcgccatgcgccttgcatcgcgccgccgtcgtgcgccctgcgcaacgccgccgccgtgcgtgatgtggacgggagggagatggggatgggggagactagggagaggataaggttagggtttagtaattttatttatatatctcctttttttttgggttgggctgttttggatcttttatgggctatattttgagagttcatatacacttcccggggccccgcgagtgaaatgtctcccctgtcccctccccgctcaaatgcgggtctccggccccgactcccctgcgggtccaaaatcgcacccgcccccgcccccgtaggggcgggtccccgcagggggaaattgctatccctatttcagatcagttatcaacttgaacttggcactgcggctgatatcgtgtttctggcttttctgtttgtgtatgggcaactggccatcgcgcatttgcactgctactgtactgagctgaccgtgcatgcatatgcgctagatcgatcagtatcatgagtgggttaaattaattagggttactggcagctagctgctgctgggccaacgttacaatcagttccataaaagaaaaaaactcaactcaatctgttctataaaaaaaattctaaagattaatcgtctaaatataatttagacatagagggagcagctggtagctcgatcggtgacagatggtttaattcgcacattgaatgagaaagtacttgacccagaaggaagacgaaggaatagaaacgctttgtccgcaggtgttctcccttcattgaagtgtttgtctatgtgaagttccccttctcctggtcataagttttcagtgcacacatgatacagtgcaatgatgctctgggcgcgtctcatatggtttgagaacatctgacgttactgttcaccccgtgactgacatatgggcccgccactctcaggcccacatttcagccatcaagttagagggaagttacgtcagaggatctcaatccgtcttatatacatatagtagcatttattttactgatactgatagaagagaataaagataaataaatatgaatagtctctttgtgggtctcattgtggaaaattctaattgttgtattctgatgttttctgatctattagatggaccctctcatagagtatatataggagtacagagacttggagtataatacaagtaagagtagatttatctctaggattctatctctagtactctatcttatctataggatatatcttatctctatatttgtatttgactcttatccctaaccgacatatccatacttctaacactcagagtagtagctagatcgagctcacagtaagctataagctcataaaatcaacacatataatatgttaactatctctttctctcactttaaatatatttatcttcgagtatatgtagagctagctattatataaaggccaacaccttttattttttttatatctctcttacataagcttatatctgccttatagtccaatattatccttgctcttagatcatctctatgtttgacttatcatccattgctaaaatttatattttaaaaccaaattttagagttaactttgaggggtttttttattgtaaattactttcagcattgaattttaagccatgaataatacatatataaaaattttacctacaaattattttaaagtcaacaccaatagttacaagatccgcaagcccgtccagacgaagaggggcaagaaaggtgggaagaaggcagccgataaggtacagttcgaagttcttgcgaagaacctcatcatgagactcggacatttgcatgatgtcgatcatcttgtcatactccttgtatgatgcatgcctatacgagtgctctgcatggcactacggtggaaggtggagagtgtcttcttgatcttctctgtgtccatgacaactttgccacagagggagaggttggtacaaatccggtgcagtgtggagttgtagccggcaacgctcttgaagtctgtgaacctcaggcgagcccactcctgctctgcttggggcaagatggtatacttcagcttcttgaatcgcttcttgagtgaggtccaaagagcgagtaggctctttaatggctcaatcccatttcctcattcttgagcatggcgcatagatgttgtcataggaagtgcaaggcctcatcgttctcgtcagggataagcgcacgatcttgcagtgtgcccatccagatcgtctggcaaagcttcttggccctgaggacactctggacattggatgcctaggttaggtagttttggctgtgcggggctagataagcgaactccttgttcgtgattcctgatattctgttgcaaagtgataaaaaattcaaaagtaactgctagtaacatgcttgcaaatacgaatacaaatattttattattttttccaatacttctatgtaggaaatgcgaattattcaattaaataaatacaataaagaaatgctagagttcatacaaaatatatacaaaagaagcataaagtgaatatattcatataaatactgaaaataaaatttttaatatcaagtaacagtaattaatgcctcaagtatgaaaagacaagttcaaattctaaattcgtaagacacaatatgctcaaaaacgaaatataagcgaaatttgcaaaaaccaagggccgttttctaagtttccatgcggtggacggttagaaatggaagtttccgaaattctagtattgcgcaaggaaactccatgctgagagttgtgggtgtgattttcaaaaaaaaaaaaaataataataaaagggccttttgcaaaattgccaatttcattcctttctctcttgctctttcctttccccattgacctcctcagcgtggcgctgcggcgaggcgaggcgcggcgctggcacggtgccaaaaacctcaatcggctagtgccgatgactccaagtccgcaatggtggttttcgtcggaagtcacataaaaggaacaaggaggatacaacaaggaatttatttttgaaacccagtatacaagatgcaaagtggattttcgaggttttgaaatttaatgtacaagatgtaatgacttaataagactcggcccatgccggtccagcccgaagcccaccgtgctcctccttacaaaagtctattttgcctccctcatctcttttgggccatctcttatatggctatagtaagtctattttgcatcccttatgtccccttgtatggctagaataaaactattttggcgctctcataaaataaaaagtaaaccgaaggtccctcaacttgtcatcgagttacaaaattgtccttgaaccataaaaccggatatgacgcatccctcaacttataaaaccagtgcatactagatccctcgggggttttgactccgattttatcctatgtggcagctgacttagcgtgggaccacgtaggccccacgcgtcagcctcttcttctctcccctctccccctctcttcctctctccccacgggcagcggctggcaggcgcaggtggcgtggggagcagctgcacgggcggaagccggcggggaacaattgggcggcggtgcacgagctcctccgacttgctgaaagagcggaaggccaacgcggcgacgaggggtgcctgcgtgacttcctggagagggcgaacaaggacggcggcacaacgatggagtacagggagcgcggcgtgttcaacgcgagcgagatggtggtggagatacagagcgtggaggctatggggaacaaggacctgttcgtggttgggagatcaccagcatgcattccgccgtgctgctcatggtcaccgctgttaaatatgtgatccgaattttgggcccacaatatattcggattagtttcctagtaggagtcctattaggtgtctttcttttataccctatatatactcttgtaagccgtacgggaaggggtgacgttcctattgtgattcccctacgtttgtaatcatctcctctatagtgatcattgccggtcggcgcccgtggttttttcccgcaagggttttccacgtaaaaatttgtgtctccgttgtgcatctattttcataacaagtggtatcagagcattggagatcgttctactattcccggccaccggcgattgtttctcgatcgaagaaatcgatcttatcggcggtggcggcggctcccgtcgtctcgtcgattcccagtccgactcagtgtttcttgtcctcgtgcagaggagaaaagccgcgcaagcaatcgaagcagaggagtactactgcagcgcacgcgcaccgaggaaaagtataggagtatcagccgagaggtctgtctagtacaggcggatttttcctataggcgaatttgctatacgcaccaagcttgtgtacccaggagatctacatacttcgctacgtgcacacgagaagtgtaccaggtttcgtgtttttgctaggtttaatttctttctagcaaattcaggattaattcccatggcgagtttgaagtatgatctaccgctcttggaccgagacacaagattctcactttggcaagtgaagatgcgagccgttcttgcacagcaagacctcgatgatgcgctttctggatttgacaagaggacacaggattggtccaacgatgagaagaaaagggatcgtaaggctatgtcatatattcatcttcatctatctaataatattttgcaggaggtgcttaaggaggagacagccgctgggctgtggttgaagctggaacagatatgcatgactaaggatctgaccagtaagatgcacctgaagcaaaagttatttttgcactagttgcaagatgatgggtctgtcatggaccatctctccgctttcaaggaaattgttgctgaccttgagtctatggaggtaaagtatgatgaagatgatttaggccttattttattgtgttcattgcctagctcatatgcaaacttcagggatactattctttatagccgtgatactctaactttgaaagaagtttatgatgctttgcatgccacagaaaagatgaagaagatggtaccctctgaaggtttaaattcacaagcagaaggcttggttgttcggggcaggcaataggagaagaacacaaacaacaaatcaagagataaaagttcaagtagctaccgtgggagatcaaagtccagaggcagatataagtcatgcaaacactgcaagaaaaatggacatgatatctctgagtgttggaagctacaggataaagacaagagaaccaaaaaatatgtaacaaaaggtaagaaagaagaggaaggtaaagctgcagttgttactgatgagaagtctgatgcagaattgcttgctgcttatgttggttatgcacaaactagtgaccagtggattcttgatactgcatgcacctatcacatgtgcccgaatagggattcacatgtgcccgaatagggattggtttgccacctatgaagctgtgcaaggtggtattgttttgatgggtgatgatacaccatacgaggttgcaggtattggaacagtttagatcaagatgtttgatggctgtatagaacattgtcagatgtgcggcatattccaaatttgaagagaagtctcatctctttatgtactcttgatcgcaaagggtacaaatattccggtggagacggaattttgaaggtaactaaaggctctcttgttgtgatgaaagctgatattaaatctgccaacctataccatctgcgaggtacaactatattaggtaatgttgcagcagtttctgattcattatctaattccgatgctactaatctttggcatatgcgtcttgggcatttgagtgaaattgatttggcagaattgagcaaacgaggattgctagatggacaaagcatcgggaagctcaaattttgtgagcattgcatctttggcaagcataagagggtgaagttcaacacatctacacatactactgaaggtattcttgattatgtgcatcctgatttatgggggcctgctcgtaagacatcttttggaggtgctcgttacatgatgactatcattgatgattattcgtgaaaagtttggccttatttcttgaagcacaaatatcaagtttttgatgtgtttaaagagtggaaaactatggttgaaagacaaactgaaaggaaggtgaaaatccttcgtactgacaatgggatggagttctgttctaagatatttaaatcatattgcaagtctgaaggcattgtgcgtcactacaccgttcctcacacacctcaacaaaatggcgtagcagagcgtatgaataggacaattatatcaaaagcccgttgtatgttgtctaatgtagatttgcctaaacagttttgggcggaagccgtttccactgcttgttatcttatcaatcgatcacctagttatgccattgataagaagactccaattgaggtatggtctggttccccagcaaattattcagacttaagagtatttggttgtactgcttatgctcatgttgataatggtaaattggagcctagagctattaagtgcatttttcttggttattcgtctggtgtgaaaggctataagttatgctgtcctgaaaccaaaaaggttgtgattagtagaaatgttgtcttccatgaatcagttatgttacatgacaaaccttctactaatgttcctgttaagagtcaggagaaagcaagtgtgcaggtggagcacttgatcagttcagggcatgcaccagaaaaagaagatgttgctattaaccaagatgcacctgttattgaagattcagattcttctactgttcagcagtctacaaaacgttctattacaaaagataagcccaaaagaaatattaaacctccttgaagatatattgaagaagcgaacatagttgcttatgctttgagtgtggcagaagaaattgaaggtaatgccgaaccttctacatattctgaggctattgtttctgatgattgcaatagatggataactgctatgcatgatgagatggagtcacttgaaaagaatcatacttgggaattggtgaagttgccaaaggagaagaaacctatccgttgcaagtggatcttcaaaagaaaggaaggtatgtctccaagtgatgaggcaaggtacaaaacaaggttagttgctaaaggttatagccagattccaggtattgatttcaatgatgtcttttcccctgttgtgaagcatagttcaattcgcactttactcagtattgttgcaatgcatgattatgaactagagcaaatggatgttaagactgcatttttacatggggagttagaagaggacatttatatggagcaacctgaaggttttgttgttcctggaaaagagaacctagtctgtaggttgaagaaatttctttatgggttgaagcagtcacctagacagtggtataagagatttgactctttcatgctttctcagaagtttagaagatccaattatgatagctgtgtttatctcaaagttgttgatggttcagctatatatttgcttctttatgtcgatgatatgttgattgctgcaaaagacaaatcagaaatagcaaagttgaaggcacaattgagtagtgaatttgagatgaaggatttgggtgcagcgaagaaaattctcggtatggaaattactagagaaagacattctggctagttatatcttagtcagaaaggttatattgaaaaaattcttcatcgtttcaatatgtatgatgcaaaaccagtgagtactcctttaactgcacatttcagattatcttcagatttatgtccttagtcagattatgatattgagtacatgtctagagttccttattcaagtgcagttggttcacttatgtatgccatggtatgttcccgtcctgacttatcacatgcattgagtgttgtcagtagatacatggctaatcctggcaaagagcattggaaagctgttcaatggattttcagatacctacgtggtacatctagtgcttgtttgcagtttgggagatctagagatggacttgttggttatgtggattcagattttgctggagatttggataggagaagatcgcttacaggttatgttttcactattagaggatgtgctgttagttggaaggcaagtttgcaagcaactgttgccttatctactactgaagcagagtatatggctatttttgaagcttgtaaagaagctattttgcttagaggtttgtacactgagctttgtggagttacgtcttgcattaatatattttgtgatagtcaaagtgcaatatgccttacaaaggatcagatgttccatgagagaacaaagcacattgatgtgagatatcactttattcgaggtgtgattgctgaaggtgatgtcaaggtatgcaagataagtactcatgataacccagctgatatgatgacaaagccagttcccgctactaagtttgagctttgctcaagcttggttggtgttacagtatagtcctagagactatttggcgcgcggtgattttacctacatgaggtattttttggtgattgatgtttttatgctacaaaaggaaattcgtctcaaggtagagattgttaaatatgtgatccgaattttgggcccacaatatattcggattagtttcctagtaggaatcctattaggtgtctttcttttatcccctatatatactcttgtaagccgtacgggaagaggtgacgttcccattgtgattcccctacgtttgtaatcatctcctctatagtgatcattgccggtcggcgctcgtggttttttcccgcaagggtttttcacgtaaaaatttgtgtctccgttgtgcatctattttcataacagtcgccatggcctttgcggtcttgaaggtcgccgctgttgtcggtgtccatcgggctgctgctcaacaccaagtgtatcatcgagctcgtcatcctcaacattgcaaggaacaaaggggtaatccattagttaattacttaatcgatcgccatgcgatgcatgtcgtgattaattaaggctaggtagctgcttgtgttgtgtagatcatgagtgaccagtcgttcacggtgctcggtgctggtgttcgtgccggctctgaatcgctgatcacggcgatggtgagccctttcctcgccatggtggtgaagccgccgcggcgcctcgtgttctacaagcggcgcacggtggcgtgggctcacccggaaccagaatcggagctccgcatcctggcatgcgtccacgtgccacgtgatgtgcccgcgctactgacgctcctcgacgtggtgacgccgtccagccggtcacccgtcggcgtccacgccctccacctcatcgagttcgtcggccgctcctcctcatcaacgcatccgtgtcgtcgtcgtcctcctatgacctacgacgcctccgtccacgggctcagccacatgaagatgcagttcaagcacatctcccacgccttcgtggcgtacgaggagcaggcggtgggcgtgtcgatgcgcaccatggccgccgtcttgcgcccgtgcagctcctccccccgccgcctgcgcccggctcctccccacgccttccgcgcccgccggcggcagcccgtgcagttgctccccactgccgcccgtggagattggagaagagaggagagaggaagagaggtggagaggggagagaaagaagaggctgacgcgtggggcccacgtgggttccacgctgagtcagctgccacataggataaaaccagagtcaaaaccgccgagggacctaatttacatggttttgtaaattgagggatacgtcgtatctggttttacggtttaaggatgattttgtaactccatgacaagttgagggaccttcggtgtactttttcctatattttacttccctgacccagccggcccatcgtgccgagacagaggcacagatacggcccaaaggtcaggcccagggcccagggcctttcggccgacaagagcactaccaccgatccgacgtgtccgcccctatcaccgaccacgcgcgtacacactacatgatganctncttgcagtcgagcgcgagtcacgaaatccaacgcg

SEQ ID NO: 4446 - DNA, 31390 bp, Oryza sativa
cctcctcctcctccaccacccccaccccctcccccgccgcagccgccgccgcggggcagaatgcgaccaccgccgcgaaggcaacgacgaggacgaggaggagacggaggaggcggaggggccccgcgcggcgacgcggcagcatcgccggagaggaggggagggggagagaggggtttagattgtggaggcgggtgtggcggtgcggtgtgcgtgtgagtgcgcgtgtcgggggggaggaaggagaaggagagggagagggaagaagaaagcgagagagaaaaagcgaaacacacgcgcacgccaacggggagaggcgagacagaagcgtgtgagatgcttacgtgcagttgcagcgggattggatttgcggcaatatgtagggggggtgtgtgtgtctgtattgagatctgttgctaatgggattggcgacctaacaatttcgtttcatttcttcaccaatttttcttttcttttttgtggggagggttttgagggcccattttgttgggtgtcatggtagtacactcccttcgtctgacaaaatatcaacatagcactggatatgacacattctaatataacgaatttggatactaaaatgcgttacattctgtattaggctggtatttttagatggagagagtatgccggtaagatttacaaacgtgatataggggttcatttgttcagtgacaattgttttcagttgaaacaattcaatttttgaagagaacatcagagtaaaacagtgtataaaaaaacataggtattcaccttagggcattctcaatttctcattattgagcaacagttttttagaaataaaacattgaacaacagttagattttttcttttgcaaaactaatcgctccattccaaaatatagctatgaatttagatagtaccatatagtagttactttaactatgaatctagataattgtatatattcatagctacattttgggataagggggtatgcttttagtttgtcataaaaaagttacaacatattcactttgttacaaaattcttcattagcattgaagaaatttattaccattccacttttaacacttgttcagattcatcgttctaggatatgttacatcttatcttaagttgattctttttgatacagggaaactagtttcaatagatagtttcctcttaccaaactaagcaagcgaaatgacttttatccagaattggttcaacccgtaaacaagtttagaatgtggcatgcttgttgcgcttgttgccccaacttaagccataatatattgccttcatttggctgctcaagcttaaaaggcatgtcatagcaacataatacaactcgtcttactggtgctcttgtcatatccattttgagtcatttgttgctttttttttataattggttggttattcgttgatgagcccaacgagattactttcatcaaattatcacaatgtcatgcactcctcattcatcacttccagacgagaagctggaggaaaggagggaggatcatgttgagaatggcaagaagcaatggattcaaattaacattagttgcagcttggagtgtcaactatagtatgagagagatgtggtgacaagaacaacaatgagatgaccaaggggctgagtgagtatttgactttgatcgaaaatgcataggaggagcaagaaccatgcatgaagggtgttatcctaacatagccatagtaaaataacatgtgactagtgcatatcaaggtacgagacggaatagaagataactatagtcaatgaaactaacgagtcgatctttattgggcttgaaaaagaggtgtggtcaaaccgaataatcttgtaaatggctaggctcggaaattagcattacactcaagtcaagacgaatgaaattactcacagagttgagagctgtcatcaatgtattgtgattgtgaaaaacattcacggttagccaaaaaagaaattccactattattcaaagtaaaatcgatatatctcgatggtggtgattttttccttttgtagatcatatcctccgcccattctatgcactgttggaagtttgtacggaaatatcgtttaatttgcttcttacgttaactagctgtatgcaaatgcaatgtacttgaatgcatttttagtactgctggtcattcaacgtaccagctgctataggatcattgtgtgatgcaatgctacaccaccgtacaaaatgacttgtacgacaccatgatggaagactttttctaaatgtatcatctatatactcctttttagagaaggccccacctcctctgccctagtacatttcttttatcagctgctccttaaagtttttcaagattaatactaacacttttatagattgcatttctattggtatctaaaatacgcatagcgtccttgcaaacatccgataaaatacgaattttttatctaaaatacacatagagtctataaagataccaaattttcatgtatatcactagactgtcataacaaaaccaacctagggttctataaccaatgtttctctaccgatgcatgggttttaattaccagcaccacacggtaagacaattaccataataaccatgcaaaaattcaacttcaatttattttttcttaaattagcttcaatttgtttttaaatcaacaatttcaaacccaagaaacgaatactgtcgaggagcgatcctctctagcgggaggtcgtgagacccccctttgtgagtttgaccgggggataaggcgcgatgatcaagagcgtatctccgcttagggtctagctgctagatcactagcgaatctgtgtggaagacgagggattatccagattcgggccgccgggaggcgtaataccctactcctgtgtgtggaattatggtggagtccttacaagagatcttgtgctccttggaaaccctagctgtgcttcctctggagctcaagctatcaagagtcgtccatttttttcggtgggcaaggttctcattttatagtttaagaggatactacatgcaccgttcatacctatccctccatgggggggctcacttggcctgagtcagatcaccatccgtgccttcaactggaagcaaagtggttgtccgccgccaggtgcggcccaacgccgtcctccgcctgacacgggggacatcccttccattccctcttaaatgtatggagactttggtggattcaccatgtacatggggcgcacttggcagtgtgccgatgggacggggcatatctacccccactccacctgacacagggtgggacgtgggggcactatcgcttgtcctatccgcctgcgatctgtcgcagaccggtcaaggtcgattgacatgcgtcaatcgggcggcaccgcacgtctgcccacaccacattaaatgtggtaagagatggttggggcgccgcgcatttaagacgctggatggcaccgcctgctccgtccactcactccgccacgtggtggccggtgagggcctcgaggcagtatgcctcacgggcccgaggggtgtgacgtggcgccccgaggccccctggccacctcataaccacctgacctccccccgagggggtggggaaaaggcaggccgcacggccacgtggctagatgggaaggtcattcccctctaccatgcgtacccccggacccatatcaccgacaaatacaataagaaagtactccctccggttctataattcttgacgttctataattctataagcgaaaacttcttgtgctattttttggtactgtttttttctgtgctatgaatcgaattttcttaaatttttttatcaagtaaacaggcccatatttttttccaaaataactgtatatctttccgtgccccatgtatggtctgcagcgacgttacggcgtgtacctcccaccggctggcctctgggtgcattgccttcacacacaccactatcgatatcccctgcaggagtccacttccactggcaggcagttgcacgagcactctaccaattcaataataatcatcaattcatcatccccatgcataatgactctagtacttcctctttattcgtaaaggaaatcatttaggacaatatttaagttaaatcttaaaaatataaatcatgaataactctcaagttattgagtttgaaaatgtaaaaattatatgaatagatttgtcttgaaaaatactttcataaaattatacatatatcacttttcaataaatatttttatagaaacaagaagttaaagttatgttttagagaccgtgtcgctgttctaaacgacttcctttacaagtatggagggagggagtactagagtatctacgcactataaaatcatcgcaacgatctccgaacccctattattggccgcataggtatatactccacaatctggtcacactagcactagcagtagctcagcttttttttttttaactccggtagctcagtttggtcatgtttgaaggagtttatgtctgactaaaattatttttttaaaaaaaaagtctttagctccttcaaacggtacaggtttttacctagaatataatttaagaatttatagttgcagaattcgaagaataaatttaaaaatcaaaaactgggaaatatttttatattcctattaagtgtctatttatctgcttctctgaattttgagctccgtagatataaccttattcggtccttctccaacggtactagttgggtgggagtggtggagagagggagacgaccaaacacaatccagcttttgggtggagggagatggcttgatgagatttggctgtagatgcagggaaaaggaggtagaccctttttgttggcactgtcggctctaatggaaaccttgaattatttaaggagatcatgtcctcatgtggcccctaactattagccttttcgtaaaaaagcatgcgtgaagagcgttacatagaaatagcagctgacagatgaaatcatacatcaaacccaaattttttatacctcgataaagaggacagattgttcctatttttttatactaagaatggaaaaaaaacacttgttcaagaggaatcagactcgaaaaccttacacctgctgttaaaggagatcaaacagacaaatggacaaatccacgtcaaccaagttagacctagtttcagtcatgcaaaattacacatctaaaaaggaccgtgttacgtaaatgtgtaattctagaggagggcaccagtttggaacacatgaatttcacgtgatatgatttactcctatcactaagcatgtgcttggttcaaggaataggatgtatcggcatagatcaaacacatttttcagtgtcattggtttaaggacacgcatgatgagaacggtccctaaaaagaatattctcataagacccaggtttaattgacgctatcccactaaaatcgacaaactaattaacccaacccacttagggtgtgttcgctactccagtttccccgcatgcacagtaaacacggaaaacggagtagtccattagcacatgattaattaagtatttgctaaaatttttttcaaaaatggattaatttgatttttttaagtaacttttgtatagaaacttttttttataaaaaacgcaccgtttagcagtttgaaaagcgtgcgcgcggaaaacagagggagatgggttgggaaaaaggagttacaaacacacccttggggcatatttggtaaagctccatctccagcttagcatcgttctatctctcatactagacggataaatagaaccgtctcataattaataaacatggataagtccatcctattctaccgcgtgtccaaaataattaaaacacatgcttttacgctttttctgatgtgcgcgatacaagttggccaatagcatcgtgtatatgctcctccagccttggtgggattggatttggagcgaggaggcgatatcagttgtctcgccaccactccagtccagtccagcaggttgtggttcggccgcggtccacttcgctcgcgatcgtggcctggccgtcgtcaaattcaaattcaaacccccaaaaaatataaccatatatcggacgaaaaaggggggattttgttcagacgtggtgtgtttcatctttcaacggatgattgcatcacaagggaaaatggaggactcgcacaaaaaaaaaagcacagatacacgtcctttttgattgggttgtggccaaccttcctctcgctttctctgcctcctgttgccgtgaaaactgaaaagctcactggtcagtttgatctcgcaccgtactagtactactttactttggacgtatagatgctgcttgcttctccctggtgcacggagacaacaagcaaggctgcaggacggatggagtactgtttactcggttgtctcgtccgtcctagccagtgaacgagcggcacgtccaagcgtagggtacaagtatacacgtacggtgacaaactttgcaaaaataattataccggattctcgacatattatagtctaattttcaagtaatacaataattaatataacttaaaatagctagaagtagtaatataatgattaatatgacttaaaatagctagaaatagagataagctattcggtatctgagaactgccgtcactatactcaaagtgctatacaaaagaaatagattttttcttaaacatcgaatctatgttatcaacgattattatgaacacgatttgagtagaaatttagagatatttacctttgtcctatgtttcatatatcatatatgtcttagctagacctatacttatgtggcattcttctctaataaggtgaccgctagaagaatcccctccacgtttgcacaagtcggaacctcggtaaaacccgtgtatctctgtagtggcatacacccaacttcaatcgaagcatgcattgtcccccctccccttcccttccattcaacccaacccaatcgtggaggggaaaaaagggccaaccgatgatgacgacctcgactatggacgctgtcgtagggcactcctgtcacttgagctcgatcagtggcaccaagcttgagccgccactgccaggaggaaaggggatgggaggaagcagagagacgagaggtggcaacgaggagggggcgaaggccggcactcgaggagatggagaagggaggaggcgaaaaggaaaccaatagagaggggaggaggcgacaagagaggcggaaatggagatcgatctgctggggagagaattagaggagagagagggcggtgagggagaaaaaaataaggtagggtgatagtgggtcagcctataattaacggtatgtatgtatttttgatgatgttgttatagcgtctaaattgtaaaagtttcagttaatttgtgttaataaaaaatatgagaagggttggcatacaagaaatcaagagccaaaatgataataataaaagaataatgagtactacattcgtcccaaattagtagtcgctttgacttttttcttgtaacgtttgaccattcgtcttatttaaaaaattagtgtaaatataaaaatggagaaatcatacttaaagcactttgataataaagcaaatcacaaacaaaataaataataatttcatattttttttaataagacgaaaaatcaaatattataaacaaaaactcaaaacgacaaatattttagaatggaggtagtagccatcatcgtaaagctatagcaacctcgtcctacatagtgtgatgtgacacaactatgaatattacactaggaatgcccctattggtgagtgtgtgctggtagggtggatcaagaaaaaaagacaatgttctatggtcaggggtggagcaaaaactctaataacacggtccatgcctccgcccatttctggatccggcccactacggttacatctactaccaataaagcatcatgcgaaatgatttacgagaagggaacagtttagggtcaattgaaagactgttctttcggcccattttcaacttgcaaaagatcatccacattccaaaaggaatgagttcacttcaggtccctcaaatttgtcgtcgaatctaatattcatttctaaaccgcaataccagatataacgcattcctcaactctcaaaaacaatgcaaataaaatcaaagacggtttggatggtggttttaactaacacgatgtttaaaatgagaaaaaaatggtgaaacccatatgttagtgacggtccaattaaaagtaaaaaaaaatacagtgggactcgcgtctccttctccccaatctccccatctccgcggcgagcaattgggggtcgctcgactccaaggcggcgtcctccaacctcaaggtatcacctcccagccgatggcacctccgatagatctgctagcctcgcctgcttcactctcaaatgattcttgtcttttgtgtttttcttagccataggaatgtccagttctagatgattggtaagtactttgggactctgcgctgtagtgatgtgtaattgatcgtgaagttgtgattactcgtttgctattacttgattcatatataaaaggaaattgacattttggttttcggtgttggtggccaccagattctcgatcattgatggcaccgcccccttcgggttgacgatgttatcacgaagtctcttgttggaggagtcgaaaccaccatccgaaaccatccaaaccatattgagatcttatttgcactggttttaggagttaaaagacgtgtcatatttgttattgtggttcaaggatgattttcagactctgcaataaattaagggacctaaagtgaacttattccatccaaaaagagctgtcaccttgccaatggaaaaagtacaccgaaggttcctcaacttgtcatcgagttacaaaatcgtcccccaaccacaaaaccagatatccagcgtcccttaacttattctacgtggtggctgagtcagcatgggacccacgtgtcagcgtgaccacttcaacctcctctctctctcttttccctcttctctcctttcctcgtatttctctcccttctctgactcagcaggcgggaggagaagggcgtcagcggccggcgatgggcgacgcggcggctggccgacgcgagggagctcgtgttgtcgttgctggagaacgcgacgggccgacacgagggagctcgtgctgtcgttgctggagaacgcgacgggcctggcgacgctgttcgacgcagcgaagcagcgcccctacgagacgggtcccgtggggaagttcgtgaaccgggtggaggtgaaggcggccctgggcgcgcgtggcgatatggagtgggaggagtgcagcgacgcggtaggcgcggcgatgcatggggacgtgatgaagagcgtgaagccgaaggtggaggcgctgctgcggggaacgcgcgtgctgctgtaccagggcatccgtgacctcagggacggcgtggtgtccacggaggcgtggatgcgggagctgaagtgggacggcctggccgtcttcctcgacgccgactgcgccgtgtggcgcatcggcgaggagctcgccgggtatgtgcagcgctccggcccgctctcccacgtcgtcgtctacggcgccgggcacctcttgccggcggacaacggccacgcggcgcaggagatggtcaaggattgggtgttgcaggcggggctattcggccgccacggcggcatgaagcgcgcaggctgactccgcactcccccggggggggggggggggcgcaacctgtggcctcatctctcgcggtgtcaaactctaatctgatttgagaatcgagcagagtaaatcgaggaatacaattcccgggaaatacaagcatttgagtttataatggttcttctggtgtggttgaattcatcgtggtaaacttccctggtttcattgggattatttcctccagaaggtagcttatccgggattgtttttgttcagtccaagatcagagggcaataccgaaggatcactttgtaccaaactaccaatgcagtattcagtaacaaggacttaaaagcaattcgcaaatctcagaaacacgaagctcctcatttcgaccagaaaaaggcccattttgctctcttgtactctggagcagggtttacgaaaacgaaaaaaaagccaaattcatcgcgcgggcggacggcggggggaggagcggtgcgcgggctcccccgccggccgccgcccactaggcagaggaacggtggccgggggaaaggagtggcgactggcggagtggagttgggcggcccgtccgtccctgccgccgccgccaacgcggcgctcaccatcacatgatgtcgggcgcccaagacccagcggcgggggccgccgccgccgctgctggagccatgcaggacagcttcttcctcggctcggccgccgccgccatgttctccggtgccgggtcgtcgtcgtcgggcgcgggaacatccgcgggagggggcggcggcggtgtgccccttctacgaccaccccaacccgccggcgccatgcccgtgccctctctgccaagcctggggctccctggctggcctcgatgaccgcctctccccatctggcgccggctgcatcgagaagagaggagaattgaagaaataaaagaaaagagaaaaaagacaagaaataagagaggatgatgatgtggcgttctgacatgcggggtctacatgggttccacgccaactcagctgccacatcagacaaaaccagggtgaaaagcaccaagggacctaaaataaatggttttgtaagttgaaggatgtcatatatctggtactatctggtactatggtactatgattagaggacgattttgtaactggacaacaagttaagggaccttcggtgtactttttccccttgccaagaaggcatcaaaacagctcaggccatctttaacttaggcccatttcctcacaccccaaaaggcccatccagataatggctcagatgctcagttcatctcatctttcctcgtacacacgaaaaatctgcacgcctctttgcaaatttcaacccttcttttcgaatgcaatttcatgttcagatcccacctacaagagctcatttacaaagaacaatcaccggcaacttttattccacgtgcatggctcccaacaaattctgctcttaacatacaaaatgtgtacacgtactactacatacttgtacagccaactgaactcctgcaattacatcatattacaggataatttcgaccaattttttttatgttctctccctcttcttcaccatctcaacttggccgggaaatactgcgagagaattcagagagaaaaagaagatcatttcttcaggttttaggacaaaaagaagtctgtttcaagcttcagtattcgctgcaaaatcgatcataccttttcgatgagtgacatgtagtagggcttcaccttctcaacgtctatcctctcattgctcttgctgtacaggtcgtatttgctgcagaagaaaaccattcatgttcagtacattttcatactatatacattaagatgcagggtgatcaatctggtggcttacttgaacacacgcagccatttgaggttctccttgtcctcatcgttcatcagatgcatgtaggctccatgcttgtgcagggctgaatcatggacaaagatagcaaaatttagctaaaacttacttaaaacttgtaattctgacaaaattgaaaaaaagaagactgtcgcgcgcacttacggtagaatgaatgatatctgatgatgaacaagcctgcagaaggaagagtggtcttgttctccttggcaacctgagatgaacaagaacaagaaacacatcaacatttcagagaaaactacaacctcagtactagaactgaagatttctctgctccatggtatgcaattggtgatgaatcgacacgatgaaccgtgtgttttaccaggtacatgtagtcgtcatggccccaggacatgagaacattgtcaaggccacagccctcggagtaggccccaaacttggtgttgagctttgggttcaggtagtcagggttctccttgaagtactgcacattttcagacaaaatattttcagtttcagtcttagaccactagctcactgcttgatccatctacgcttttgatttgtcttgaacagtttgctagatgattcattggttaccttgaagtggacgttgcattcgtcgaatgcgcagccgacggggaaggtgtcacctgaaaggtcaaagacattcagattcagagatggatggatgttcagctattgttcctagctgaatctgaagaagtttcagtgagatggcaataagctgtttgcttctgttgtttgtttcttaccgacgactgaccactgtgggagctccccaaagctgggatgcagcagcaccttgcccagatctgaaaaagaaaagagaacatgttacacgtcacaagtgtgccccactgtattgccatttcatttctttcttcctttagccgagtaattccaaagaggttgttacgaaccgtcactgatactgtatcactccatcatatctaattattcatctttatttatcgtatggcctacctgctagtgactggatgagtcctagatatatactattattactaccttagagcaagtttaatagtatagcccactactagctccaattcatctatagctaatctaatagccaattcattcaatagttgcttactatactattaatatatggtatcacctgtcatacacacattgcgtcttgaagtccgtgctgcagctggctacagatctgtagcccactactcttctctctcatcgtttatctcattaaaatatatttatagctggctaatagcctgctattgtacctgctcttacaccaacaaatcctacccggtgtatcgtgtgaggcctgcctatcagttcattgcggcgacgcggtggatgtgcaattacagtgacggtttttgtggcggttataaaatagtttaatttaccgtggatgaggccagtgaggtggagccagtcctcgtcggggaaatccttgcggatggcctcggcggtctggaggaggtgctcgatctgcggcatgtcgaggtccgggtcgctgtcgtcgatgaactcgttgagcagctcgatgcactcccagatccccatctccgtcttgtccaccctaccgtactcctcccgcatccgcctcacctgcaatgttacaatgcaccaaaataatggtaaatctcatatattaaagctcccgttcttttttacttgtcgtttaggatattatgagtgtatttttttaaaaaaagattattagatacagaatttgcacttacgaaatcatatgtctggttgatgtggttgacccggtagaactcctccaccgtctccttcctctcagactcggcctcataattcctggagatttaaaacatcaccatattattccggttaattccttttttttaagaaatatcttttactaccaccgttgaaaaagatttcaatttctagattatgaccataaggtttttatttttcgaacacaggtagtgttttatttgtccacgtgttggactttttaaagaaacatcaaattgaagtacagaattcctgaagaagcgaaaatgataacgtgcaaaaaaggaataggcaaaaggccatgttaatgcagccacagatgccacgtgggacattcactgtgcatagacacgcagaaacctttgaaatcgtacaagaaaagataagtctttattttattttatttgaccagtaagtagcttgccactttggtcagcaaaattgagtttacgtttaagtagtcaaattcatcttcttcttgtccagttttatctgaaaaaaaaacaaaacctgggtttggacgtttcaacaaaaactaaaccaaacggctaatcatggaaagacaacttgaagtaatgggacaaacatgtattgtggcttgagagagaggtatgtacgatttgaatgcacaaccacaagtttcaagaatggccacacatctctttcatttcgagttgtgcccatgttctagtttactaatttcgtacgaaaatatcatgtctgtcttgtcagcctgctcgcattgtcctaaaaataagccaatcattctaatataacaaatctaaatataacgttgtactaaaatatatcatatcttaatacgatgttggcttattttagagggagcaagtaataccaacctctgtttttgcaaaggagaaaaaagaagacattccatatgcaaaatatatgattatttgcacatgtccacttgaaaaaaaacttgctgcccactctgttttttgcaaagagaaacaataaccttcaccatatttaaaaaaatactacatgattaattaaattccctaatccactagaaatattttaaatattttttcttctgaggggataatatttttaaccatagttgacactctgttttgctctgtttttgcatgatgctctgtttttttcctatgcaggaatatgtagctgacctgaaggcgttgccgaaggcgttggagtccggcacgacgaagccgccgtcgagcacgagctccgccgcgttgtcgccgccgccgccgccggcgaccttccggtcggcgatagcatctgcaagcgaaccatgtcagaacttagaaccttaattagttccacgatccatccatccatccaggaacattgctgaaccttttcttcctcacggactggaatcaagaaatcaagagagagagagaaaaggatcatgagctcaccaaggtgaggctgctcaatggtgatggtcatctcgatctaatcactctttagacagatcgatggtagccacaggggtgctaattaactccggtcttagttcttaaacacccaccccaagcctctatgtatctcaacgccaagaacagaggtgcatgcaggtcgaggagcacggcaatggcgtattggcgttgctttctgctgctgcctgagctgaggaggaggaagaagaagggcgaggtggatttatagcccggggaagctggaggtggggccggggcgtcagcgagagagagactatgaacgggtttatcctaggcgagcgagcgagtgactcagccatggcgtggagctacggctgtggatgacagcgacacctcacgcccgcagcagtgggtgctccgtccatctgctcctactcttccatcgccgtattataagtcgttttaatctttcatagttataaatctatttaaatttaattaaatttataaaaagtagtaatatctactatgtcaaaccagttacattaaatataacattgaatatattttaataatatgcttttattaaaaatattgctattcttacagacttatccaagtctttaacttaaaaagtcaaaatataatatagaacggataaagcatctaagaatagctgaatgacagaatgatttacgataattatttaagagtagaacgaatgataaataattgaagagtagaacgaatgataaatattgtaaagtcaaaaatgaatttagaatagtttctaagagattcatatatagtttatttttttgaaaaaaagtttcgttttagtttcctttcttcttttaggtttctgttttgggggaggtttggctgtctagatatagaaatgaagttgttggaggataaaaagttgtttcttctctaccttttgcatttgtttaaggtagccactctctcccaaacaccccctaagactatgggtttcctcatttggaccgtcggtgttatcttgtattacctcagctggtgtgtatatacatatatgctctttttcgagatggtatacctaaaaggacaaagtatttgtaatacccctagttatcttataaaataatataaatagaagataatagtattcttttttagaaaatataacagcagtataatattctcagaaaattagagtctaaatccaagtcatatatcgagaaaaaaatagacaaatctaaaacataaatagtaatttagctattcaattttgtaataattttctcactttatatgttgattttagacttcaattttggtgagatgggggatggccaacatgcatactctacattctttttagtatagacaatgtctgaaaataatatatatatatatatatatatatatatatatatatatatatatatatgcacacacacacgaggagatgtccacatctaatttagagtaaagtgtacgggtggtccttaaacttgtagggatatgtcatctaggtccctaaactctcgaaatgaatatccaagtctcatttaaattttaactgataaatgggacccattgaaaatttttcatttttcttttttttcttctcttttttccctttcttctcctttctttgtgaagaatgagaagaaaacgaaagaaaaagaaaagaagaaaaaaaaagtaaaggacacgtctccatgtgttgaatatgacacaattctacaagtttaaggaccgccaatgcactttactctctaatttaatactaaatcattaggacatagataaagggagactaatttcacccgctgtaacagtgtaccacaccattctgatatttctcctcggaaattaatcaagtaatagcattaacatctcaaattggctgtcacaccctgaaaattcaaaatatataaattgttgtttaaatggaatttctagaatttattttaaaagtcttgaaaagaaaatctatgtttaattaataaattccaatataaaaagtggccagataaaatttcattaaatactttgcttaattctataattcctagatttttctgggatttatttgagctaaggaagtatttttaataaatggaattgcatttaagaaataatttaaattgaaaaagttttaaaaagtcttcttttggctttgggccgaaagtcggcccaaaacctctcttctctctctcctcggcccagccggcccagtccgctgccgcgcgcgcgcccgctgccgctgacaggtggggtccacctgtcaggttcgtcttccccgagccgccgccgctgccgaaaccctagttcgcgccgccgccgtttcccttccaaatccggccgcctctttccttctccggccgaattggttgaggggaaacaatctccgggatctcctctacctttttctctttggaatcatcggctaaatcgctttggaaagcgttggaatcaagttcgattcggatcgggttccctctttccaagccgcgagtttccttcgccgttgccgtcgccgtgggccttcgccgccgcctccgagcccctttaaaaggatccccgtgctcttctctttccgccgccaccctcgccttcgcctctcgtcgccggaagagctctagcgccgtgtgccctagctttgccgtcgccgccgccgctccagccgtgcgccgccgccgttccagccgtcgccgtcgctcgggaaggccgccgtcgtcatcgccaagtcgccgccgtcctcgtccgccccttcgcagccgtcggaacccgccggagcttcgtcgccgtcgacaacccgaaggtagccgccgctccttcctcgtcgccgtcgtcgtccgttgcctctccgccgtcgttttggtcgccggtgtgttcgccgtgccgtccgctacccgttggtgccctccgtgtgcgtcctcgcgtcgccgttcgccggcgagcatgcgccgcccgagccgtccccgcccgccgagccgccgccgccgtcggtgacgtcaccgctgacgtcatcaggatcctctcccgtgagccgccgtggacccgatcaatctcggccgtccgatttggatcggatcaatctcggccgtccgttcgtgtgaaccgccgcccgtgcgccggtccacccaaaccctagttgctgacgcaataatccccttttccttttcaaaaataattcattattgcgtcataattcaatttaaaccgatttaagtgttttaatccgatttaatctttaaaaattcataactaattcatcttagctccgatttagttggttcaagtctctaaatttttctaaaattgagatctacacattaaaaatatccacatgtactgttcatgcttgtttatgtgctgttttggtgattttgcttctttttgcttagattccgtcgtttccggagagtccgttttcgcggaagaagagtttgaagagttccaaggccagcaaggcaagtcacacagatcccaaacaaccctttgagcatgttgatcctatttaaagctattgtttctattcaactattgcatctattttcgaatgtcattgggtggaattgacctattctttgttatggcccttttgtacattgattaccttattccttgataccttgggttattacaatttgactagttgagctttatttatattggttcaactagatattaggtataattgcttagccctgcttagaaacattagtacacttatgggataactaatgactcactattatttcatgatggcttattgatagttcacgatggtcaatcgtgattagttaattaattaatgtgccaactaaaacctggtaatggtgggttgtgagcacatggttttgatggtcgtgctcatgacaattaaggaccggttcacgagtttcggttgtgaaacatttatcgtgccaaccacaagccagcatgggcaacggctttatcttttgtatagcatggttcattgcggggcaccagactgagaagtggcggagataagcccacgggggtcgctggggagtccatgccttgtttataagggggtgattatgatccaggaaggtgcgctgcagtgaattgtgttatgcgaggggtattgtcacaactcctttccgagataccgtggtggtattgaggcacatggtgacatgatgtggggttgtgtcttgtgggtacagtggtacacctctgatcagagtaaaactattcgaatagccgtgcccgcggttatgggcgggtctaacaatgtctttcgtgattagtctcacacctctcatcatagtaaaagatgctataactggtaataatttgattagctcctggtttggaatggtacattcctggtttggagatagaactgtgcagccggggtggttgttcagaatggttgggcctatacaacagggtatgttgtatagcgttggattaatattgcttaattattacttaactgttttatcaaattctcaaatgtttgctaaatgctgcttttgcaaatgcaaccctactatgccatcctttgttatcctgtgcacttgcatatttgctgcgtggcttgctgagtatgtcatatactcaccttgcaatcattcatcagaggaagagttctacaatgaggctgatggtgtggaggattaggtgtagccttggtcaagctgcctgtggagtggagccgtctgcgccgtttatttaatttccgctgcttagaactttattggttgagaggaactatctacctctgtaatgacattttattcgcttattaattagagtaatatttgtactctattatcaatttgttattgtgtgcctcggctgattcctggacgagggttcacacacatgtaagcgtttggaattttggatagaaattccgggcgtgacaagttggtatcagagcctctttgaccctaggttatgccaaatggttacccatagaagccctctgaaaaatattggaaaagtagaactgttctcctccctttctcttttaattaaaccaaactaatggcacatgcacttcataatttttttttaatggttctcattaaaaatttattccagtgttattagtactgtacatctattactgtactaatggctcatttaccagcaaaagttttacaatgttgtatttaatcttgctgcaataaaataaatttagtatgtcgattttataattttcttttatttcttttgaaaccagttattcaaaattacaaaatttgtgaccttgtctccaactatttcaaattatctcgcaaagcttggtttactttatttacttcccttctactttgatttctaaactttattcaaattaatccaaaaacttgtgctattaattggataaaggtcttaactctctcctttcacttgtctttagatgccgcgttacaagcctgagtacctgtttggtgttgagggttttgtccaggagttgcgtacgatgtcctttgtcattggatttgggactgcccttttttatgcccagattcgtcatgatcgtcatgaagaaaagtgccgagtcaaagtcaccttgaacagcaatagtgaagaggtcccctcagtgatgtttgaagctggaggaagaaactacatccatgcatgtcaggaagtggcaaggatcgccataggagagctccgtgatcgctacagtgatcggttggccgatactgagtatcgctaccatcctcgtcaaccacagggaagtgaccgtggcagttaccttgagactgaaggaattgagaatgatgctactacaaggcatttggttgagatgctgtgggctatggatgaaagtcgtgcggagactgtgttagcagctcaagatcgtgaagatcggaatcgtggtaagatttgcaagctagaagacaaggtggatcgcttggagaaggaattagccgcattgaagggagaagcaccgccgcagaaggccaggattcgtctcaccgcaaggaagagagctttgtttgtccctcgttatcaattggcgccaaagatccgcgtggtggagaaagaagttgccccagcaaatcctcccgtcatcatcataagtagtgatgaagaagaagaacccaagcgcaacaattccaagtttgagtgggtagctatcaaagatgaggaagatgagccgaacgagccttcaatcgacctcctatgctcggaagaactagagtgacttgttaagtcgttgtcttagatcgttgtgttagtttgcttgttttaagtttgtttgtgtgtgtgggtcttgcatgttatttacatcagtggtgggatgtaagtgcatgcgtttgtttgcttctgagtgttaggaagttggtgagtttagtggtgtgagagtcttcagtttgtaataatgaaactcagttaagatcaataaaagttaaggtaattctctgtcctaagtagtttcccccgttttctcttcttatcctgtcatgccagatggtgaacactcgcagcaatgggaatggtctcaacaacctcaacaacaacaaccctaacaacaacaatggagagaatcccactctggcccaagttcttgctcaacagacacagcttatgaacatgatgatgcagcaatttcagaatcagcaaaaccaagggataatcatgcacctccacagaacaagttagcagaatttcttcgtgtgaggccgcctgttttctctagtaccactaatcctgttgaagctagtgattggctgcatgccatagagaagaagttggatttacttcagtgtactgatcaggagaaggtctcatttgcatcacatcagttgcatggccctgcctctgaatggtgggatcacttccgccttaacaggactactgctgaacctatcacttggcttgaattcaccgctgctttccggaagacgcatataccatcgggagtagtgtctctcaagaagaagaagttcaggtcgcttactcagggatctcgctctgttacggagtatctgcacgagttcaatcgtcttgctcgttatgctccggaagatgtgcgcaatgatgaagagcgccaggagaagtttttgggaggacttaatgatgagctttcttacccactcatggttggagattatcctgatttccagaaattagtggataaggctattcgtcaggaggacaagtacaatcgcatggagcagaagaaacgtcggattgctcaattcaagacacaacagggaaataatcagaagccgcgtcttactttaggaccccagcccatgccacagggaggttcttcgtctgttgttcgtccgcaacgtcagttcttcaacaacaatgctggcaacaacatccgtaatcaagctccacgtcctgttgcagctccagcacagcaacaacctgccaagagggagcaaggcagcaagcccgtggtgtgtttcaactgtggagacccaggacattatgctgacaagtgtccgaagccccgtcgcgtgaaggttgtccctgcccagaataactctgctgtaccagcatccaaggctcgtgtaaatcatgtcgctgctgcagaagctcaagatgctccagatgtgattttgggtacgttccttgttaactcagttcctgcaacagtacttttcgattctggtgctacacattcattcttatctatgagttttgcgggaaatcatgggatggaagtagaagatcttagacgtcctttgatggttagtaccccaagtaatcaagcactttctttgcaacatagcccctcggtcagaatagaaattaagggagtaccatttctggccaatcttatcttgttagaatccaaagaccttgatgtcatcctagggatggactggttagccagacataaaggtgtgatagactgtgccaacagaaaagtaactctcaacagctatgatggtcgagttgtaactgttcatgcattgtcatctgagtctttaaggtcaagactgaaccagataactttggaaaagattcctatagtccgagagtatcctgatgtgttcccagaggatttacctggtatgccgcctaaaagggatatagagttcagaatagatttggtacctggaacaactccgatccataagagaccttatcgaatggcagccaatgagttggcagaagttaagaggcaagtagatgatttgctacagaaaggatacatcagaccgagttcatcaccatggggagctccggttatttttgtggaaaagaaagaccatactcagagaatgtgtgtggactatcgtgcactaaacgatgtgactattaagaataagtatccactacccaggattgatgatttgtttgatcagcttaaaggtgccactgttttctccaagatagatcttcgatcagggtatcatcagttgagaatcaaagaggaggatatacctaagacagcttttaccactaggtatgggttgttcgaatgtactgttatgtcttttggacttaccaatgcccctgctttcttcatgaatttgatgaataaggtgtttatggaatacctagacaagttcgtggtggtctttattgatgatattcttatctactctcgaaccaaagaagagcatgaagaacatcttcgccttgcattggaaaagctacgagaacatcaactgtatgctaagtttagcaagtgtgaattttggttgtccgaagtgaaattccttggtcacgtcatctcagccggaggagttgccgtcgatcctagtaacgtggaatccgtaaccaactggaaacaaccaaagacagtttcagagatccgcagttttctaggcctcgcaggatattatcggaggtttatagagaatttttccaagattgctaagcccatgacacgactgcttcagaaagatgtaaagtacaagtggtcggaagaatgtgagcggagttttcaagagttgaaaagtcgcttaatatcagctcctattttgattttgcctgatccaaagaagggtttccaagtgtattgcgatgcatccaaacttgggttaggttgtgttctgatgcaagatgggaaggtggttgcctatgcctctcgacagttacgtccgcatgagaagaactaccctactcatgatattgagttagctgcagtcgttcatgcattgaagatttggcgtcattatcttttcggtactcgtacagaagtgtacaccgatcacaagagtttaaagtatatctttactcagccggatctgaacatgagacaacggagatggttggaattaattaaggattatgacatgggaattcattatcatccgggaaaggctaatgttgtagcagacgctcttagcagaaaaggctattgcaatgctacagaaggacgacagttgccattggaattatgcaaggaatttgaaagattaaatttgggaattgtcggtagaggtttcgttgcagccttagaagcgaagcccactctaattgatcaagttagagaagcccaaattaatgatcctgatattcaagagatcaagaagaatatgagaagaggaaaagctattggtttcttggaggatgagcacggaactgtatggttgggtgagagaatctgtgtccccgacaacaaagatttaaaggatgcaattctgaaagaagctcatgatactttatactccattcaccctggtagtactaagatgtaccaggatcttaaggaaagattttggtgggcaagtatgaagcgtgaaatcgcagaatacgtagcagtatgtgatgtttgtcagcgagtcaaggcagaacatcagaaacccgccggtttgttgcaacctttgaagattcctgaatggaaatgggaagaaattggtatggattttattactggtttacccagaacgtcatcaggccatgactctatttgggtaatagtcgacagacttaccaaagtggctcattttattccggtaaagacaacctattccggaagtcgcttagcggaattgtatatggcaaggattgtgtgtttgcatggcgtccctaagaagatagtgtctgatcgaggcagtcagtttacttcaaatttttggaagaaacttcaggaagagatgggttctaagctgaactttagtactgcttatcatccgcagacagacggacaaaccgaaagggtgaatcaaattttggaagacatgttgagagcttgtgctttagatttcggtggaagttgggataagaatctaccctatgcagaattttcgtacaacaacagttatcaagctagtctacagatggctccttacgaagcactgtatggtcggaagtgccgcactccgcttttgtgggatcaaacgggagaacgtcaggttttcgggacagatatcctaagggaagcagaagaaaaggtaaagatcattcaggaaagattgcgagtggctcaatctcgtcataagagttatgccgacaatcgccgcagagatttgagttttgaagaaggagattatgtgtatcttcgtgtcacgcctctacgaggagttcatcgttttcagaccaaaggaaaattggcaccgcgttttgtgggaccttataagattgtcagtagaagaggagaggttgcttatcagttagagttacctcaatctttggcaggagtccataatgtgttccatgtgtcgcaattgaagaagtgtttaagggtacctaccgaagaagctaatcttgaatagatagaagtccaagaggatttgacctatgtggagaaaccgatccgtatcttggaaacaagtgagagaaggaccaggaatcgagttatctgattttgcaaagtccagtggagtaatcactcggaagaagaatcaacttgggaacgagaagatgaattgaagtcagctcatccgtatctgtttgtcagttcttccgaatctcgaggacgagattctgtttaaggggggtaggtttgtcacaccctgaaaattcaaaatatataaattgttgtttaaatggaatttctagaatttattttaaaagtcttgaaaagaaaatctatgtttaattaataaattccaatataaaaagtggccagataaaatttcattaaatactttgcttaattctataattcctagatttttctaggatttatttgagctaaggaagtatttttaataaatggaattgcatttaagaaataatttaaattgaaaaagttttaaaaagtcttcttttggctttgggccgaaagtcggcccaaaacctctcttctctctctcctcggcccagccggcccagtccgctgccgcgcgcgcgcccgctgccgctgacaggtggggtccacctgtcaggttcgtcttccccgagccgccgccgctgccgaaaccctagttcgcgccgccgccgtttcccttccaaatccggccgcctctttccttctccggccgaattggttgaggggaaacaatctccgggatctcctctacctttttctctttggaatcatcggctaaatcgctttggaaagcgttggaatcaagttcgattcggatcgggttccctctttccaagccgcgagtttccttcgccgttgccgtcgccgtgggccttcgccgccgcctccgagcccctttaaaaggatccccgtgctcttctctttccgccgccaccctcgccttcgcctctcgtcgccggaagagctctagcgccgtgtgccctagctttgccgtcgccgccgccgctccagccgtgcgccgccgccgttccagccgtcgccgtcgctcgggaaggccgccgtcgtcatcgccaagtcgccgccgtcctcgtccgccccttcgcagccgtcggaacccgccggagcttcgtcgccgtcgacaacccgaaggtagccgccgctccttcctcgtcgccgtcgtcgtccgttgcctctccgccgtcgttttggtcgccggtgtgttcgccgtgccgtccgctacccgttggtgccctccgtgtgcgtcctcgcgtcgccgttcgccggcgagcatgcgccgcccgagccgtccccgcccgccgagccgccgccgccgtcggtgacgtcaccgctgacgtcatcaggatcctctcccgtgagccgccgtggacccgatcaatctcggccgtccgatttggatcggatcaatctcggccgtccgttcgtgtgaaccgccgcccgtgcgccggtccacccaaaccctagttgctgacgcaataatccccttttccttttcaaaaataattcattattgcgtcataattcaatttaaaccgatttaagtgttttaatccgatttaatctttaaaaattcataactaattcatcttagctccgatttagttggttcaagtctctaaatttttctaaaattgagatctacacattaaaaatatccacatgtactgttcatgcttgtttatgtgctgttttggtgattttgcttctttttgcttagattccgtcgtttccggagagtccgttttcgcggaagaagagtttgaagagttccaaggccagcaaggcaagtcacacagatcccaaacaaccctttgagcatgttgatcctatttaaagctattgtttctattcaactattgcatctattttcgaatgtcattgggtggaattgacctattctttgttatggcccttttgtacattgattaccttattccttgataccttgggttattacaatttgactagttgagctttatttatattggttcaactagatattaggtataattgcttagccctgcttagaaacattagtacacttatgggataactaatgactcactattatttcatgatggcttattgatagttcacgatggtcaatcgtgattagttaattaattaatgtgccaactaaaacctggtaatggtgggttgtgagcacatggttttgatggtcgtgctcatgacaattaaggaccggttcacgagtttcggttgtgaaacatttatcgtgccaaccacaagccagcatgggcaacggctttatcttttgtatagcatggttcattgcggggcaccagactgagaagtggcggagataagcccacgggggtcgctggggagtccatgccttgtttataagggggtgattatgatccaggaaggtgcgctgcagtgaattgtgttatgcgaggggtattgtcacaactcctttccgagataccgtggtggtattgaggcacatggtgacatgatgtggggttgtgtcttgtgggtacagtggtacacctctgatcagagtaaaactattcgaatagccgtgcccgcggttatgggcgggtctaacaatgtctttcgtgattagtctcacacctctcatcatagtaaaagatgctataactggtaataatttgattagctcctggtttggaatggtacattcctggtttggagatagaactgtgcagccggggtggttgttcagaatggttgggcctatacaacagggtatgttgtatagcgttggattaatattgcttaattattacttaactgttttatcaaattctcaaatgtttgctaaatgctgcttttgcaaatgcaaccctactatgccatcctttgttatcctgtgcacttgcatatttgctgcgtggcttgctgagtatgtcatatactcaccttgcaatcattcatcagaggaagagttctacaatgaggctgatggtgtggaggattaggtgtagccttggtcaagctgcctgtggagtggagccgtctgcgccgtttatttaatttccgctgcttagaactttattggttgagaggaactatctacctctgtaatgacattttattcgcttattaattagagtaatatttgtactctattatcaatttgttattgtgtgcctcggctgattcctggacgagggttcacacacatgtaagcgtttggaattttggatagaaattccgggcgtgacaagttggtatcagagcctctttgaccctaggttatgccaaatggttacccatagaagccctctgaaaaatattggaaaagtagaactgttctcctccctttctcttttaattaaaccaaactaatggcacatgcacttcataatttttttttaatggttctcattaaaaatttattccagtgttattagtactgtacatctattactgtactaatggctcatttaccagcaaaagttttacaatgttgtatttaatcttgctgcaataaaataaatttagtatgtcgattttataattttcttttatttcttttgaaaccagttattcaaaattacaaaatttgtgaccttgtctccaactatttcaaattatctcgcaaagcttggtttactttatttacttcccttctactttgatttctaaactttattcaaattaatccaaaaacttgtgctattaattggataaaggtcttaactctctcctttcacttgtctttagatgccgcgttacaagcctgagtacctgtttggtgttgagggttttgtccaggagttgcgtacgatgtcctttgtcattggatttgggactgcccttttttatgcccagattcgtcatgatcgtcatgaagaaaagtgccgagtcaaagtcaccttgaacagcaatagtgaagaggtcccctcagtgatgtttgaagctggaggaagaaactacatccatgcatgtcaggaagtggcaaggatcgccataggagagctccgtgatcgctacagtgatcggttggccgatactgagtatcgctaccatcctcgtcaaccacagggaagtgaccgtggcagttaccttgagactgaaggaattgagaatgatgctactacaaggcatttggttgagatgctgtgggctatggatgaaagtcgtgcggagactgtgttagcagctcaagatcgtgaagatcggaatcgtggtaagatttgcaagctagaagacaaggtggatcgcttggagaaggaattagccgcattgaagggagaagcaccgccgcagaaggccaggattcgtctcaccgcaaggaagagagctttgtttgtccctcgttatcaattggcgccaaagatccgcgtggtggagaaagaagttgccccagcaaatcctcccgtcatcatcataagtagtgatgaagaagaagaacccaagcgcaacaattccaagtttgagtgggtagctatcaaagatgaggaagatgagccgaacgagccttcaatcgacctcctatgctcggaagaactagagtgacttgttaagtcgttgtcttagatcgttgtgttagtttgcttgttttaagtttgtttgtgtgtgtgggtcttgcatgttatttacatcagtggtgggatgtaagtgcatgcgtttgtttgcttctgagtgttaggaagttggtgagtttagtggtgtgagagtcttcagtttgtaataatgaaactcagttaagatcaataaaagttaaggtaattctctgtcctaagtagtttcccccgttttctcttcttatcctgtcatgccagatggtgaacactcgcagcaatgggaatggtctcaacaacctcaacaacaacaaccctaacaacaacaatggagagaatcccactctggcccaagttcttgctcaacagacacagcttatgaacatgatgatgcagcaatttcagaatcagcaaaaccaagggataatcatgcacctccacagaacaagttagcagaatttcttcgtgtgaggccgcctgttttctctagtaccactaatcctgttgaagctagtgattggctgcatgccatagagaagaagttggatttacttcagtgtactgatcaggagaaggtctcatttgcatcacatcagttgcatggccctgcctctgaatggtgggatcacttccgccttaacaggactactgctgaacctatcacttggcttgaattcaccgctgctttccggaagacgcatataccatcgggagtagtgtctctcaagaagaagaagttcaggtcgcttactcagggatctcgctctgttacggagtatctgcacgagttcaatcgtcttgctcgttatgctccggaagatgtgcgcaatgatgaagagcgccaggagaagtttttgggaggacttaatgatgagctttcttacccactcatggttggagattatcctgatttccagaaattagtggataaggctattcgtcaggaggacaagtacaatcgcatggagcagaagaaacgtcggattgctcaattcaagacacaacagggaaataatcagaagccgcgtcttactttaggaccccagcccatgccacagggaggttcttcgtctgttgttcgtccgcaacgtcagttcttcaacaacaatgctggcaacaacatccgtaatcaagctccacgtcctgttgcagctccagcacagcaacaacctgccaagagggagcaaggcagcaagcccgtggtgtgtttcaactgtggagacccaggacattatgctgacaagtgtccgaagccccgtcgcgtgaaggttgtccctgcccagaataactctgctgtaccagcatccaaggctcgtgtaaatcatgtcgctgctgcagaagctcaagatgctccagatgtgattttgggtacgttccttgttaactcagttcctgcaacagtacttttgatt

SEQ ID NO: 4447 - DNA, 9872 bp, Oryza sativa
tggtttggaatggtacattcctgtttggagatagaactgtgcagccggggtggttgttcagaatggttgggcctatacaccagggtatgttgtatagcgttggattaatattgcttaattattacttaactgttttatcaaattctcaaatgtttgctaaatgctgcttttgcaaatgcaaccctactatgccatcctttgttatcctgtgcacttgcatatttgctgcgtggcttgctgagtatgtcatatactcaccttgcaatcattcatcagaggaagagttctacaatgaggctgatggtgtggaggattaggtgtagccttggtcaagctgcctgtggagtggagccgtctgcgccgtttatttaatttccgctgcttagaactttattggttgagaggaactatctacctctgtaatgacattttattcacttattaattagagtaatatttgtactctattatcaatttgttattgtgtgcctcggctgattcctggacgagggttcacacacatgtaagcgtttggaattttggatagaaattccgggcgtgacattggcctccatctacaataaatatctttgaaatatagtaattgatagtttcttctgtcggtttagtttccttctttttttaaataaaaagaagaacttttaagcatcgataaatctccaaaactgctgccatgcctgctaacggcgacaattggcaacgccaggccgtgcagctgcagctacgccttctgcccaggggcgggcccagctataattcaagggtattcagatgtatacccaagaattttggacaaaaaataggtatatatactctatagttcatatatgtatgcaaaaagataaagaaaaagagttaaactacttatttgggccttgttttaccatttctgctgtattgggcctaaattctccactcccctctccctttgaactcggccagcccatttccaaacaaaattcccctcctcccaattcccaaaatccccaatttcaccctaaccctaattttgagacagccggtgcgcctggagggcttgcagcacgggcggcggcgcgcgttccggcgcgggcggcgggcgcggcgtgcggcggcgggcgcggcgtgcggcggcgggcgcggcgtgcagcagagtgcgcggcgtgcggtggcggcgtcgcagcgagccggagaccgcagtaccgcagggcaggcgccaggcgggcagcacgccatcagcaaggaagcaagccaggcagccagaggggcaggggcgggccgcgggcggacggccggcttggcgcaccggcggagggcggaggcgcgtagccgcggccgcgcggcggcgcaacgccggcagcggctgagcggcgcgtcggcgtgaggcgtcgccgggcgccgactccaaagtccagcgccgcgtgctgtgggcggttagttcgtggctgggtgccgaccgccgagccgccttcccctattccccagttcccttcccgccttcccccgccgacgaccgaggctgcgactgcgaagacgccgacgggcgacggccacgctgccaccacattgccagtatgccccagtgagtcagtgagtatgaagcacaaattttgaataattgcaatgaagattttaggattgggtaccgcaattgattgatttagtatacttgcttgggtgcttagttgcaattcattgctcaaatgctcaatttcagaatttaaacatgaagaagaggaagggtcctgctgttgatttgaagtcctttttggagaaatctgctgcaaagaaggcaaatcgaagccaaactcctggtgagggcaatttgaatccgattgatagtaatttaaatccttcttgcaatgagagtcagatgcaattagtcatttatcaaggtcatcatcatgagaatgagagtggtagtccagcaagtagtagcacaataccaattgatccagcgattagtgatatgccaggatcaaatgatgaatctcaatctagtgatgaagacaacgatggtggcttgtatgacatagagcatgatcctggactgaggactcctatctcaaggtatgatgtcaatgaccaagattcagttagaagggcatacattgcattggggccatgccgaccaaagatgaagaaagatgatttcccgcaacatagttgtggaggtatgcgccgcttcttaccaaaatggtttgatgagttcaagtggcttgagtatagtgtgaatcgggatgccgcatattgctttgtttgctatttgttcaaagaaagcaatcatggtggagatgcttttgtcaatggagggtttagaaattggaacatgaaaggtagattccataagcattgtggcgccgttaatagtgctcattgtgaagctgaagagaaatacattttgttcatgaaacctaaatcatcaattcatgagtcctttgcatcaaatagtgcgcaagttaaggccgagtatgaagctcgcttgttatggtcgcttaagtgcataagatatatattgcggcaggggttggcttttcgtggtcatgatgagtcaaggaattcagagaataaaggaaatttcagggaacttttgcaatggttggcagggaactttgaagaggttaataaggtggttctaggaaatgctcctatcaattgtcaaatgatagatcacgagattcagaaacaactcattcgctcatgtgctcatgaaacaactaaatttatcatagaggaacttggtgatgagtgttttgcaattcttgctgatgaatctagtgatgcctaccaacaagagcaattggctctttgcttgcggtttgttaataaagcaggacaaccggttgagcggtttcttggccttgtccatgttgaagataccacttccttgactcttaaagaggcaatcaagtccttgcttatgcaataccaattgccattgtccaaggtacgtggacaaggatatgatggtgctagtaacatgaagggtcatgttaatgggttgaagaaactaattatggaagattctccttctgcttattatgttcactgctttgcccatcagcttcaactaacccttgtagcggttgctaaggagaacactgattgtgcatggttttttgggcaacttgcatatttgttgaatgtctttggaatgtcatgtaaaaagattcgcatgcttcgcatagctcaagctgagtatatgattgaggcatttaaattgggtgaaattgaaactggccagggtttgaatcaagagatgggcttagcaaggccaggtgaggatcatgtttcatttaacatgttatatttggtactcaatcatgttatattttgtactcactactactttaaaatatggtggcaggtgatacacgttgggggtctcactacaaaactgtaatgcatgtgatgtctctatatccatcaatcaagaaagttctcttcagaattggcaaagagtgtacaggggttgaggctataggagctcaaactatgctagaagtatttcaatctttcgagtttgttttcttgctccacttgatgaatgacatatttggatacaccgctgacttttgccaagctttgcaaaagagggagcaagatgtagtgaatgcgatggatcttcttgcgttcacaaaggtagaactagatgttttgagagaagatgatggatggcgagaattccatgggaaggtcacttctttttgtgtgaagcacaaagttaaagttgttgacatggatgggaagtataagcctatacaaagatcaaggaagttctttaaagatgccattaattaccatcggtttcatgctgatatgtttttgggtgtcattgatagacaacttcaagagttgaataacaggtttgatgaggtaaacacagaactccttagatgtatggcatcattcaatccatccaaaggattttcagcttttaatgttgagagcttagttaagcttgctgagttttatcctcatgattttgatttcgaagaaatgaaccagctttcttttcaactcaaccgctatattagtgatgtgaccaaagatgagaaattcactaatttgaaaggtctagcagaactatccatgatgcttgtcaaaacagagagggttcgtcggtatgaacttgtttatagacttctcaaattggttctagttctccctgttgcaactgctggtgttgagagggtcttttcttcaatgaactacatcaaaaacaagttgagaaccaagatgggacagaaatacttgaatgattgtttggttacattcattgaaagggaattctttttgcaagctaaggacaaggacatcatcgattattttcaaaatatcaagcgtcgaaaagttaatctctaaattgtaagatttcttcccaatttatcattttctatcatttttatattccatatgttggcactttgatatgtttatcaattagtatttctatatgttaaacaatttcacgtgatgatcaattctatcaatgtgtgcacttatgctcaattttatgttatatacactatatattatataattattagtgtgtgatactatacaagccaattattaggtttttaggtgtatgaacaaaatttttttctttccccatttcgaatacacaagttcaaaatcctgggcccgccactgcttctgcccttatctgcttgatgaatactagttgaattgatcacaccaccatttaattccagcatgcgtggagacgctagctagctgctgatttcgcttctgctggatgtttttgatggttttgttgacgtgtggtgtggagttgtgcggtggacgaatcgctggggggatttcgtggtcaggtgttgcgatgcacctggcgcagcgtcagtctcatcatgcatgggatgttgatttggatgatgtctaaaaataccataattaagagtaggtaaattgtggcgagaaacataagtaagacttgaaaatagtttggtcataagtatgacatatggtgatgtttaaaactcatgtagatgaggatgaagataaagatcaagtgttttacgcaaaacgaggtggtactaacatattgtatgattaattgagtattagttattatgaacttgaaaaatatttttatctgacattttagagcaacttccatatagaaagttttcgcacgaaatgtatcatttagcagtttgaaaaacgtgccacgaatatctaaaattttcatacaactttagttggaaagaaaataacagggctctgctctaagattgagagtatgatatgtaggatctaaaactaagaaaatgtgacatgacacaaccgtgacaacgaaacaaacacacggctaaagcatgacgtggcaaaatgaggaaataaaccaaacaccccctcaatatgtcggttgcaatcagccgctttggctcaccggaaaaaacatactcaattagcttatcattacttaaatattaactattattacaaattacaaattatatttattaatgaactatattataatttaatattgccgcgccaagtaaaaattcatagcatggtaaggtttttgctgcgccagtccaattggtgccaaatgttgtgtgttattctgctatctcactggaatggtcaaaaaactttagaattggaaattataagttttaggtgtttatttttcatattaaaaagtaatccggttaaaaataataataaatccttatattgttcccctgctaggcacactcatcatttgagacatggacgggtatcccatttgcatccgtgaacttatctttcagcccatgtcattagcataagataccacaagtttgtaatgagatgataataccatgcatatatacagacacaatacggctgcaagttgggggtacttgagagctgttgtcaacctaattgttgatgaggaattatatctttaatttcttgccgactacatgagtgcatatatgatttgtgtatttttaccacatgaatgcgtgtttagttagtgtaaagttggcaaagtacaatatatataactagacaaaagctttgactgattgttgtgttatgcattgtacacatactaacgaattttgctgcgcaatatcggagctagattttaaaagaatttaatttgattataactcttggatacaacggtatttcgtatcacccgtcgatgacaggacttctgtggtgacttcgtaaatctaaaaatatattgatctaatttttgaaggtacttataaaagtaggatatgtgtgtaagttaatcagggtatatgtgcacattttatatgagcgtctgcctatataccgcgtttcggagaaaaaaaactacagtaggatttgatatgcacagatctttagctcctgtatttcatctatgcaattgtgatagtaaagccaacagacaagaatacaaaaggatgatgatattagaaatccaaatcttatgaatccaagttggcaactagctatacatattgggggccggggtacagctaataaaacagctgcgtttgctgatcacttcagcaagcctgtatttctttcagggatggatgcgcgtaggctttgtcgtgtgctaacagggtcagaattggattgtttatatatacatcgccttgagaaatatatggcgtgtgcagtgtgtattgactcaaggaaaaacaatcaaatatatgtggttcgttgtttgagatgataagtgttgatctttcgaatgaaaaatgtaagtcgctttattagtagctagtttagtttcgtttcagaaatggatactttgtattgaaagtatcaataatgcagaagatctacaggaatgtttattaacaggcaaatattcaccatctgattaggaaataactacctagatcaatcattgggttttactagtagcagagatcaagaataagggtgtgtttagttcacatcaaaattagaagtttgattgaaattggaacgatatgacagaaaagttagaagtttgtgtgtgtagaaaagttttgatgtgatgaaaaagttaaaagtttgaagaaaaaatatggaactagactcggcctaaagcagaaagaatatgacacacctaattaataaggggtgactgaagaataggatgattcctagctaaatatagttatattttgaaacaaatgaaataataggtggctggtgagaaagtagtactctagagggctcaagtgtgaaacccataatcaaaattactggaaattatatacatgctgtgatcccgggaacataagtgtatgtacgtcactaagaagttttatattttagataaatttttaatcccagatatattttagagggaggggagtaattttgaccacaaatataaacagctcagatgtatcaaaataatcaagtttatcttttaaaaagtattatgataagagtaaatttttgcgagatcctcgtccaaaagggaaggaaccaagatccatgattgtagccaatagacacatatatacccaagattcatatatatgttaatgccctcagagaatatacatttgttagacaattgttactatcacaattacaattattcacaactccaaatatctagctagctgctccactggaggcaggcatgcgctcaggacaattagccaaagtacaagcaaacaagcgatggtagtacaaaataagtgacaagttgaggatcagccagcaccagcagggtcccgcgagatggattcttcccaacaactccggtgaatgactggaccgtgacaaagatgagtgcaggacacgaacactgcacgtgttttattgtgatatgctgtcaggatctggggatctcagtttttttctagtagtaatgcactgatgcatgatgtggtagatcaccattatactgtactcgctccgttttatattataaattatttaacttttttctctagtcaaactttattatgtttgatcaagtttataaaaaaattaatttcattaaatttgacattggatattgaatatattttaataatatgtttgttttgtgtactatatttttttttataaatttgatcaatttttttttaaaaaattaactagaaaaaaagtcaaacgacttataatataaaacagatagtagtaacatgaatccgtttatctactactatctctatcctaaaatattcagatataagttaaaagttgttaaagatggaaggagtactagctggagtagcaaacttggtcaacaaagatgtttatgtgatgttgattattcttttgctccctctgattttctgcaacctgaacatcgtacatgtaatgtggtgtatgcatgtgctaggtgaggagtcaaggtgacaatatttttttgtttgtctggagcaagtaatttgtttgacaatgtagatgcatggatttcaagagagctatcatagttaatgctatcatcaactgagttcaggaaagggactagcaagtaaaaaaatgggatggagactaagtagttctttgatcgctctaaaactgctgttcagtccctttccttaacttgtgtgttaatatggagaattttagtcctttggttcgtggagagatattatgcgaaaatgagccagttgttaaaagtaaaaaaaaaaaaggaaacttataaaactcggagctataactgggatcacatatttccgtcaaatctatgtatgctgcgatcatgaactgtaatgtttaaataaaaagagaattctgggggacttgaacattccactaaagatcaaggtctttacgtggtttcttcacaagaaagtaattctaacgaaagataacctggctaaaagaatattggggggataaacattgttctttctactatgcgcaagagacaatccaacatcttttttttagtgtcatgtcgctcagtttgtttggagatgtgtgtttttttgcttttaatatccctccaccccgtaacgccaaaaacattttcggtaattagcttagaggggtatctaggtccattaagaagatgattataattggagctagtgttgtatgttagtcaatttggcgttgtcgtaatgataaagtttttaatgataaacaattatctaaccccatgcagattatcttcatgtctccacttctggtctatgatgctaccataggaggagcaggatactatgcacaatgatgctacactcttggaatcggtagccaaggatctcttattccactatgggtggcgtagtttcattagaaatgctagctatttttttttgtgtagtttaaagctagtcaataataaaggaggagttggggatttgtcccatcaccttatttctcattttgatttacttttatcttacctttttattattattaaacttatggctatgtgtcttatgacagaagccggagatgtaatccattttcattattaataaaaaagctagggtcatgttgaaaaactctactgagaaatcaatcccatcgcgacatgacaaaaggcaatttttaggtgcaacagtaaatgaagaaaaaaaaaagaaattttcacacaattatccatctatatctataactaatataaatattcgtatttttccggtcgtcacatctaattttcgtctgtttttcgtccatacacaatccgattcggttagcaatagctaaggaaaaaaattgcaaaaaaagaaaaagaatcggcggccgccgacgccaccgccgccgccggagggagaagagaggcggcggcggagggagcgccgatgccggacccgcccgcggtggccaccaccgccaacggatccaccctcggacgaagccgacgccgtcgtcgcggccgttgagaaggcgccgtcgccgtcgaggccaacggggagagggagtggggtccatccgcg

SEQ ID NO: 4448 - DNA, 704 bp, Oryza sativa
atttgccacgcctgcttggtgttatcgaggaaagaaaccctgggagctcttacgaagtgaagaaattcccctcaattgaacatcctggcaagagtgtgctgcaaagggcgttcttagctctacatgcatgcaaggtggcattcatgaactgtcgtcctgttctctgcattgatgggacattcttgacaggaaagtattggggccagatactaacagcaataggggtagatgggaacaatcaggtattgcccttggcatttgcttttgttgagagtgagaataccgacagctggtactgattcctgaaattagttaaaacaaaagttgttggtatgaggccaaatgtgtgcctgatacatgataggcacgctagcattctacgagcgatagaagagttgcagtttgggagtatggaacgaggataccctggtgtttgggaagatgtacagagtaggtggtgcatgcgtcatatgggagctaatttgttcaagcaattcaagaacaaggagcccatgaacatgttcaagaggctatgcaatcagaaccaggagaaaaaattcaatgagctttggaagagattagatgagttgacagccaaatgtagtgatcagcgtgcaacggctccatcgaccgccgttgctgaccctcctgaagctcttggacctctcccaatgaatagtcccacatcggttagaagaactgga

SEQ ID NO: 4449 - DNA, 2442 bp, Oryza sativa
cgccctctggccgggcggcaggcctgccgcccagccccgagccctcattcctccccctcaaatccaatgaaaaaaaaagaagaaaggggaggagaagagaagaaggggcgaagccctgccggattcagacgccgatttcaggtaatattcatagatcgtatatgtgactattgagttaaatagtgtgtattttttaaaactttgtttgaataaatgcattatatttttagggttttagttgtactaatctagaagtgcgtattgtagatatcggtaactacgtagatctactagtttggaatcaatacattaccgttgcattggcatacacaagaagatattacgttttagattgcttcagcatgaaagagtaatatgatctagttattttgttgacagatatgtcgaacaaacaaatattccaagtttaccatggaccaggaaacgtccgttacgggccaactggggtagatctgtcagattttattgtattagaaaggggaattgatagaccggctgagagaagtgtaccttctataaaaggatggttaatgaggggcttgaaagttgatccacagacaagtgacatatcaatcaatattatagtaagtcgggcaactgagggtttttattgggaactaatgccagttcaaaactctcgagtgtgaaaatggtatgtggaaaatgcattgcaacgcgggtggcctttagctatggttccgtttgttcacccgaaggatccaggtgtgcagatgaacatggatgatggcgagggaccaagtgctgaagtaaatgagacttctgtggaggaggtcaacgcacgagaggatgggggcgtagtagctccagtaggcattcaaccaggtggagtggccgacgagggggagactgtcggtgccattgtggatgaaatagacagggaggattctgacaacgagcgtgtagagaaaggtgattcgtcagatgatgagacggatattaatccagcagaatgggctagtgaggatttttctgagatggtcgtctctgaagaggatagtgtgagatgggagtacaaagaaaatgaggttattcagggagcgatttatagtagagcagaagatatgaaggaggcggtaaaacattttgcagtgtcaattcatagagagttttgggttgccaagtccaaccggtcgcaatatgaagttcggtgtgttaaggaaaaagatggttgtccctggagagtgcacgcgtataaggggaaatggaaggattattggacagtgtcagtcgttaccaagcatacatgttttctacctggtgtttagaaataccacaggaacattacatgtgcatttgttgcaactgagatgtatgcgcatgtcatcgataatctcacatatgaaccaaggtcaataatccgacacatcgaagagacatacaagtatactattagctatgccaaggcctggagggccaaacagaaaataatagagatgagatttggaacttacgaagcctcgtatgacaatttgccacgcctgcttggtgttatcgaggaaagaaaccctgggagctcttacgaagtgaagaaattcccctcaattgaacatcctggcaagagtgtgctgcaaagggcgttcttagctctacatgcatgcaaggtggcattcatgaactgtcgtcctgttctctgcattgatgggacattcttgacaggaaagtattggggccagatactaacagcaataggggtagatgggaacaatcaggtattgcccttggcatttgcttttgttgagagtgagaataccgacagctggtactgattcctgaaattagttaaaacaaaagttgttggtatgaggccaaatgtgtgcctgatacatgataggcacgctagcattctacgagcgatagaagagttgcagtttgggagtatggaacgaggataccctggtgtttgggaagatgtacagagtaggtggtgcatgcgtcatatgggagctaatttgttcaagcaattcaagaacaaggagcccatgaacatgttcaagaggctatgcaatcagaaccaggagaaaaaattcaatgagctttggaagagattagatgagttgacagccaaatgtagtgatcagcgtgcaacggctccatcgaccgccgttgctgaccctcctgaagctcttggacctctcccaatgaatagtccaacattggttagaagaactggattggagattcggaaattttctcagtggattcttgtaacgccccgattttcgttcgggattaaaaatcatttaatgatgcatttcctagaaattgaataaaaagttaagcaatttaatcaagtgaaataatgggagaattaaaattttcccttaaaaatcattggccgggaatattttgtaatattctttgtgccctaatgtactctccggaattttccgtgaattttcg

SEQ ID NO: 4450 - DNA, 5982 bp, Oryza sativa
agacttgttaacattgagtgaaacgcgtgaccataattaattgagatgtatagtgatcgataaattcgatggtaactgtacaacaaatttatttagttagaggatcaacatggtttttcagttgtgctttactcagattaattgtttaggtgcattaaacatcaaaaggtaaaataaacaatttcttttttatttgctctaagtagctcgggttcatggaaattgttggttcatatcatgctggcagcaacagctcggtaacaagaatactgatgccagctacctttggtagttgtagctagctctacctccagttgcacatctctgttttaattaactaaaagttggccttagctgtttcttgatagaatgacagtagaatatatgtgtatgcatgagcggtactctgcttggtcattgcatagtagttggaaaaactcgcatgttttgctgctctagaattagaggtggaatgttgaatgctcggaaaactacttttataggcagttacaatataattggtacccccatttttggaagtgtttagccaaccaaatgttacatagggcctatagaaatcgacagttttgtgctagtggattgcacaactgcatgttaacaaatctatttttttgtattttaagttcgactttcaagtctttaattattgtaggcgcaaaaagtatttcatattttaattgtcacaagttcgcaattttttcacacaaaatatgcatctagtatgtaggattcaaatccgggatctctcccttcacgtgtatcttacttattaccatcttacatatgaagcactttgttaattactatgaaatagacgttgatcttctaatttaaactctcttaaacttgtaacacatattaaaaccttaaagatttatgtagtgttcatttgaagtgcgattgaggtgaactaaagttatatatgatcccaacaattttttcattaaatttgtaaggtccatattttggtaatatcattgttcacttatgtcaagttcccactgtatgttttgatgtgttatgcaacttgacatttgtgaatgttcataataaaggaaatataaaaaaaaattgactaggccatatttgaggaaatattgtaaggatctcatagaactttggattaactcaattggacttaaggtgtattttctatgaattttaaaactttagacttcataaagatctgtttgtaaaatcatccttttttaaaaagtagattccgaatttgaaacgaatatttcggcacctaagtgttcttaaatgaaataactttgactagaaagttacaaaccttgtcgagcgctatattgttttatagaaattgtacccgtcaacgtatgtaacaaaaaattctaatgtagaccttaaagcttcttataatgaacttttgatcccattaactacctaaaatagaaaaacattaactacaacatctcaacaagaactacaattgtcacataacatttgtcattaggcgacatcataggaaagagttacaagtggtttcctaatagaactgcccttaaaaatcaattttattgattttttcttatgagatccgtatataaaaatgaccccacctttcaaattacgcgacccatttgtgttaatagacctattttcacatgcaatttttcataaggagctatctgtaaaaatagttttcttttgttatatgaccctgggcggcattagtcatcttcatagggacacggaaatggtttgtagtggttacgatgaaaaatgtgcatgtgcctattattgaaataaaaagactgccagcttttggccatctagacaatgcgtcagagacaaccatcccaatctatcccctccccatcccatctagaagtaaaagtataggtagggtcttccaaaaatacacaaaatattgaatctgcatgggaggggcagagggtagctaatgaaggggtgggagaggtgcagaggatcgatgggcacgcgtgtgacacattgcttagttaaacaacatgctacgtgttaggcaatagcacgttctctctctctctctctttctatctatctctgtatatttttccatagaaattactttaagtatatgaggttatatcacacggtcatgcatagcgtttagaagtttcaattgattcagatttacaggtataggggtagaatagttaaattttgatttatttttgggcttctgatttgatcatctgtacctttcaattttgaaaagcctgatctttaacatattataatattctgtgaaactttagaacttttaaatataatttgttgtgcggttttcttgatttctcttacaattggtggctcgagatgaaggatattaatttctgttgtttttgacctattaattaatcgtacctttgtatggcttcattcagcttcctgcattcctcgatggtggcatgatcatcatatgtgtcatccataaggacaatgaatacaattatcttggcaaggatcatccgtgtgagtgttaagttttcttcatagaatagcgcataggaccaaagatatgactccactgcacgatctctaacatgacttagctcgacatatccataaagatctttccaccacctgaaaattaaaatgatcgattgttttaggtgcttgttttgaagtatatttaagatatatatattagatcattagaagcaatgagtattaattgatttatgatagtaataatatgtacatagcatatcaggcataccgaaaacactaacaacatgaagagccatattgctagttatttcagtatatgtcactagttattggatgtttaaagccgcataaaagcctctagtgtattgctgctgcaaatgctgagacaaagattgataaaatattcggatattccttgaaggctagctgtccttcttttttatctgagagtggacaaattatatagtagtataaaccttaattttctattgttcaatacttgaaactacagataaagcgatacctaaactcggatacactaactacctcattaacatgacatatattgactacttctggacaaaacataaagttgtacatgtattttgtgattaattaacattaaattggttgcacaaacaaagcgtcaatttgtctaaaacgaggtacacattttatgtatttaccattcagtacatcgaaggaacacaacgtctctccagaattttgcacttatctatatctgtctatcctatatagtcagagctaaaatatccacatgtattgattaagttcatctgaaatacaacagcctttggattcctcctttactttgatcatagctacccacatgtcatgtgtattcagaattaaccacttagtataattgctttagagctcaagatgtattgagcaacatctcacctagaaagtaaaagccatcgaatccctctcatacttgtcataactattcatgaggtgaaattacacatcaacttctacgtagctcaaattatagtccttttaggtatgacgagtaaataatttccaataggtttttatcaagctttcctagaaaacaaatacttctaaattctccactgtaatgcacggcccattcactaataactaaatgttctctaaattatctttactaactgtagagcgaagatcgaaaaacatattttggtagttgtatcgtgcacatacacagatttgagattattacagtggtttgtttctgtcctaaagggcacaatcaattactttcatggtatatatttacttattatatatataaatatcaaataaatactctttttttagataaaggaaatgaataaacctggtatctacatccacaagacatgtacaaagacaaagcaaagaaagactcttactgagaaaaagctttgagctccttcaagtggacatgctgcagaaggttaaattccagctttgcaagatctaaaagaacaacaatacattcttcctcctgtccgtactccagcatgtaatgcaacatttcaactctcttgtaggttctcggtaatggtaagtgtagggcacggttgatttgattatctagaggggccttgagcctacttccatccctcattgattcgaggtggtgccttgcaaaagacatagcttcttcaagttctggctcatcatggacaaggaggtgagctgcattgtacaaacttaataatgcccttggttcatcagctattgtattgatgaacctcccatcctctcctttgaatttttcgaatacatctgcaaggcagctaaattaaatgtggatttttccttccaaaagatactagattcccttttcatacaattttttaatacatcggatattcttgactaatttttatgtatatatatactctaatttggatttatattgaaaaattgtttgacacaaaaaataattacgaaaatgaatgaatacctacaatacaatgacttaaaattttgtgatccaaagaaaaatacaaaaatttgtatatgcaagtcatcaccaatataagaaatactcgcactattgaaaattgggcctatctgtcatgcacacagtggataaattgttactccctccgtttcatattataagtcatttgacttttttcctagtcaaacttctttaagattgaccaaatttattgaaatgaagggtgtattttgtaataaacttgtttggcattattgtagtttgtaaaatacatagtaatggttgcagtgagatatttctgaccaagttgcaattttgtgaaaattactctgcaagttatctcctatagtatttattagtacctggagatacccaaatgccatgctccctaagtaagcgaaagtggagagcaacctcgtggaggctagagctagtgaattcactttctttgatgtcacttattacattgtttatctcatcttggaaaaggtgatctattccaagacgttgaactgcatctactaagtgcattttcttggctgtatcattgtgggtctcaaacagtatacggacgtcctgttttagtttatcagccttttccatcatccaatcctccgatctctgtttatttgcatgcaaaaatttgatttgttagaatcaaatgaaagaaatacaggaacaaatagttaggtgaaataaaatattccttttagataacttgttggtctgttgtggatttgaccaatttttttcttgccaaaatcagcattaaatcaaatgtaataaaaaaaatatgataaaactccattgatccgctaggaaaatgtgaactatgtcgcccctttatccttttaagttccaaatatgtgccgttctacaatgagtgcttgcaaactttttaaagaaaaaaaatttgctaatatacttattttttttaataacttacatttatatatctacatcagacgatttgcaaaaatatcgggacggaaacgcgggcctgtgatggtcccgcagctctaaaacgcgtgaccgctccaaaacgcattaccggctatactacaaaacgggtgcgcgggacctcgaaggtgccgggggctcaaaattagcgagcgaggcagccaatgatttttaacgatgtctaccactatcgacactgtgtagacctgtttgacacaattttgtaaggcagtaccgccagttcaatgtgcggaactggccataaacatgtctacacagtgatgtaaagtggcagacacgccccgaaacattgttaaacagtgccgactcagctaatgaatcgttggccagttcgctcccgcgttttgggaccatcgcggtcccgcgcgaccgttccgtgggacatcggtcctgtgttttagaactgcgggaccatcgcggtcccacgtttccgttcctcgaagcgggtatatttttgcaaatctcgtgcaggtatataaacgtaaattattgaaaaaatatgtatatttgtgtttttttcactttttcaaagtacataattagatatagaagtattaatt

SEQ ID NO: 4451 - DNA, 4635 bp, Oryza sativa
cggccaaaagatttttctatgttatgttaataataaataaagaagtatttattggtaaaacttgttaatattgttataaaaatgtattgaagttggttgtttccaatttcatatgttaagtgaggtattattttgtaccttattcgacgtatcagtactcggataattaatataggcctatcgcagtctcggtcgtagaaacattatatggacttaaacaaggagaattatgtaacatgaagaaatagtagtacaatttgaacatgatacaactatttccattgcggttacatagatgatattagattcgaactaggagggaggtagtgcaatagttgaacacaacgacgatgcagtaatgggacaaggaagcatgacagtagaaatttcaatatgccaagttgtccgataatagctaacccctacgtgaggatccctctcctctctcaaaccgcgctttagtaaccctgtattgctctggtagttcccctgcacaacatggctaggtggagttagaacccttctagtgtctatccattctctatattgacatctccttggtggttcctgagaggaaagaatagatgtcaagcgagcaaagttagtaaatgttgtgagaaaataaagattcatgtaatcaaaatattcttaccatgaaatcatcgtcaagaatatttagacaaacaaagaaccttcgacccaatgttgtaggctttatagaacgaagaacctgacaacgatcaccacacctgcatcttggacgggcttcccatggagggagtgctgtagttagcacccgccagtcgctctgttgttcacgacattgtcgttcataagccgcttttctctgtaagtattgctcagtactttcggatgcgaaataccagcgaccttcttgtaaacaagtggttaggtcgagaacgggattttctgtatcgacccactcgatgtatgcgcaagccgtagtgcgggtctgtcgaatagagtagtgttacgaagaataaagcgattgcccatacggaatgaataagcatatgcagataataaaatacctcacggtcatagttagggcacctaaaaaagtgccttcctcgaatatcaggattcctcgaagccattagttggcatcgatcaccgcataggcaaagaggacgctggcaccaaggtggtagtaggtatacacaaggatcgctacgccagttcggatcctcaacaccccggcgtctagccattgacgaaagccggtaggatttgtacccgtgcccgtgaccgccacagaacatcacccagccaaaaagccagagcaagtacgcctccaaacagcggctgtaggagtactcgtcagcctccgcctgtagctgctcgacctgcaagcgttcgataaaatgttaggcaccttaactgtggactaaatatgtagtacggttgtcatttcggtacaaaaacactcacggtgaactgaagcagccacctcttcgtaggtccggtgttgcggtggtgtgccaacggctcgagcgggagatgcggtgcgcgctgtactagtgcgaaacgtgccgtaagatcgtcctgccagtccacacccgtggtcactggcctaacagcgtctcccgcgagcggtagccccaacaagtacgatatgtcctgtagggtaggggctacctcaccgcacggcaagtgaaaagtgtgcgtctctggcctccatcggtcgaccaaagctgctaggagggaccggtccacagtccatcgtctggccgggtccacgtcgccggcggcagcctccaccagccgacacatcggtaggaggccggcctcacgcaacctgcaataacaaattaacatgtcattataataattattacagcgcaactaatttatagtaatacactgtttgtacctctcgacaaaggagtcgtgaaccgtaagtagctcaccgcacgtcggtgcccggaacgtcccaattctgagccccctgtaccgcagtaaggtaagaccgggtgtcggtgatctatcgccgggtccaacaactgaggtgtatcctgacgtgccatctctgaaaaatatagtgtttcgtgttagaacaattcaaaaagtagtaatgtaaaacaaaagataagttgtaaaattatgaaatagtaataaaatcatgagaataattatgtacaacaagagtacaggctatttaaatatagcaaacgttactaagggtacataacgatgacgtgcaatttaacatatatgtagagttcgataatataacataacataacatagcattacgtatcgaagtccgacattacatcagcatacctaaacacactaggtgccttagtctgacgttacatcacgagacctaaagacatgacatgccgaagtctgacattacatgacgaaacataaacacatcaataagttcgaaacaaattacaagcaaagccacatgccaacatagaacataagaactacaccacgtagccagatgtggcacgacgacgcctaggacgtggtcgagtgtaggtagtgtcttcacccgtagggcgagctccatctactgctgatcctgatagtcctgcctccgccgcatttggtttctccttgtctttaggacaatgcttgtaggtgtgcccacgttcatcgcatttgctgcaatgcttcaccctaccagcatccgactcatccatatcgttgcggatgcgacgagtcctcctccttctagccttgcctcggagcttcgatgggtcaggaatattgagtacttcatcgttagtctctgtgaactccccagctatgccgaacccataaatctcgctgctccatgtatgatatattgcttgcttactgaagtactgtgacacatatactgcatctggtatgccacactccgctgcggcagcaatgacatgggtgcatggcctgtggagcagcttcggctttgcacaagagcaatgacatgtgccgttggctttgagaacacactcctgcttcactctcttgcggtagatacccctgcctgccttatcttgacaaagtatctcaaacctttgttgttgagtaccttgcactagagctcgatgtttcatggcctttttacgcaactcctctagctttttctgcatgaaagttccaaacaaaatgctgttgttcggcatagagggaagaattgcctggaaccgatccctaaaatatctgcatgtcccatgtaaaatgaactccactatgccaactagtggcagtccacgaacaccgtgcatcacccagttgtaaacttctgccaaatttgttgtcattattccatatgatgcaccacctgtgtcatacgccttggcccatttctcttttggttcatgcagaattgtcacgcccagaaatttagcccaaatttccagactattttgtgtattaaatccctgtccaggaccagccagggtacacaaaacgacaagtaatatacagttccaaacgtaaataaagcgtaaaatacttacaaaagaggcacttagtcctcgcaccgaaacgaaaacagcagcagcggaaaaaggcgatcctagcggggcttcagctccactccacaggcaaaactcaactggggcctgagccttggtcctctaacttcgtcttcagctcagaagcactacacttctgaaaagggggaataatagcaagactgagtacaaccaccgtactcagcaagccacaccaacgatgcagacgtgcaaggggaacacaaggacggtttgtggctatttgcataaaggcggttgtaaaacattttattgagcaaaacagtaaaactgttgagtaattaaagtaacattaaatctccactgatcaacgctacaccacgttgaacaggcccaaccaacccacctaaactacagtgtattaggtcgatttattaagtgtgagactaatcacggtgaatctggtcgaccgcccataaccgtgggcacggctattcgaatagttttactctgatcagaggtgtacaactgtacccacaagacacagccccacgacacgttcccgtgcgccgacatgccaccacgacataccggaaagaggccgtgacaggacccttcgcataaccccctctaaccgatcgcaccacaccttagggttcgcccccgtccccagcagacaacgggcagcccccctttcgtgccgcggtgaatccggaagccgatcaaccggacaccccggccgacccaactccatcacgcccaccctcgcctgggtacgtcggctagagaaaagctacactacaagcccagccgttgcccacgctggcttgtgataagtacgataaattcttccagggcatcccgcgaaccggtccttaactgccatgggtgcgaccagcaaaaccatgcacccacagcccaccattcagtcgcattttagttggataattacgaccatgaagcatggccaggtgtctcgagcacgcagctcactctgatactaaaaaggtctaatactgcagttatcccatcaactgagctagtgggtaataagcatggctaagcatatagttctagctaggtcacataagtaacatgagctagtcgaatcattacccaagggtgacaaagaacagatatcaagtaaacatggcacaagcgagcagataggtaaacc

SEQ ID NO: 4452 - DNA, 4115 bp, Oryza sativa
tatctcttccgagtgtgggcccccccgggagaagaaatatctcctccggctcggcttgggaaggtaggtgacggcttcgagtatatatagtggggacaactaacctcaaacggtttagggtttgaacccgtttgaggttagtaaacctcacctctgacggccatccgattgcaactcgtcacaggtaactagtcacctgtgacgggccagaagtacaaaccgtcagaggtgaggattaactcacctttgacgggttccgttttcgacccatcacaggtgactagttacctgtgacgggtcgcagctgaatagctcaccgatgacggaatcttttaggacccgtcaaaggtgaccatcatcactgactaccacttatgcccgtcatagatatgtcgtcacaagtgtgaggatctggtgtcgtgtttgtggttgctaattatagcagaggaattggtgttgattatatttgttggatgtttgaactaatcatgttgcatgtatttgtactgtcaatttgtggcttgggagcaatgttgtccacactagtccaatatgcaaacatatgcaaatttttgtgctgctaagtgaaaaaggatggccaagtcctagtctaatgtaaaactatggtgaaaaaatctagtccattgtgcaatttactctatttttaatgataacgatatagaccatgtccagatttatatacaaaactgaacttattttaggacggagatagaattacataagcattatgtcagcacatagattgctgcattgttgatagctcagttctagatggggacaggattcacaaacagatccccaacaatctcctgaatatacctggaaaatgtatatgcatctttcttcttatcgtaaaagaatggcactgatacggccaagttcaaaagtcgttgcaccacagggaactgctggtgatgatcacaacgaacctgattcaaggttctccattcactttcaatcattgattcgatcttgtctaaggcaacttcgcttgtaaccttgttctcattcatatagcactctacagtgtttgcggcatctcctttgttctttcttccagactgcatgagtgtgaaaaaaaagtatgttacttcctctaatttacaatatatatttagcttttcttctcaaattttgtttcaatattatatgctgcaggaattagctagttatatacaaataacatttcaactctccactaagaatttagtaatgtaaagtgataaagtagctgaaccgcattcagcatccaattcctgcgtgcatatttaggttgtgttccataaactaggttggggacttctccaagtgtatgtaaaacaagggacttattaacacacaattaattaacgattagctattaaaaacttgaaaaaaataatttttaaagcaacttttatataggtttttttttagaaaagcaccactcaacaattcacgaaacatgagcatggaaaataagagagtataagttgggatctctagttccgaacacagccttacatatctaaacacaattaatcggggaagtacatggaattaatgctcttaattttttttttcaaaacagtacaattgaagtctataccttgaatgcagcaatgtcgttcatgaaacgcataatctttgcacaagctataacggcacttgatcgtactgttgtcaattcaaatgattccttcgttactgcatcaccctggccaactgcagcagtcacacagagtagtggaacagtactggacagggttgacaaagcaacccgctccttaaatgctggcttgtaattttgatgcaaccattcaaattcttgcaggtaatacgtggatagattttggaactgcacccatgcaaatcaaattagccaaaaaaaactagttagctacatcattataattattttaccgcactactaccatactcatcaaacaaagacatactccacccggttccaataattatcattttaggcaagttatacatagttaaaggttaacttcgtcgagttatttatgggtgagtggacagtgtctcccccctcctccacttgactatccttgtgcgctgccgtttgctttcgaggtcaaccaactgtaaggagagcatgtgccggccacccccttcccctcatcctcggcagtcaccacccaccggctacccgatcgagctagccagctagccatctttggaggtgagcgttgtttcaatgtatccacgctaatgtcaggttgatgcatctattttactttaaactaaccagtttgcttgtagccaaagccagtctattgtgaaatgcttagatgggatccttgtctgtaattttctttcgaatgctttttgtctactgtattaagtaaggtgcttgaatgctgagaggttgtgacttcatagtttcctattgtagaaaaaagccatggccttcccttggtttcttctaatattgttatgattaaaaaacaacatatttagatcgatgtatacacttaaagtctctagctagttcattattttgcgtgtatcttcagtccctgtccatcttgttaaggatatgtagttcgtgtgtcagtgaaggatatatattttgtgcaaagcccgctggaatacgattagattaagtataagctatgggttaattgtgcttcctgctagctagattgatatggcagataattccatttaagctattgggctaaataatatatgaatttcataaatagtatagaacattaaagcatgataatagcagccatatgattaatcagttatttatatccttggaattgttagactgacagttacttacatgtattcaatattatgctgtttgtagtatcctcatgaaccacaactttttaagcatatagcaggatcttattgatcagcttacaatattgtgtgtctcctataccttgatatatttttaccataatctgtagtattctcaaggcaagtaaagaggagaaaatagatagagataaaaatgcattgaaaagggataagatatctgcattcattgtctcatctagcttggaatattgctgccggaggacatgtagtaccataacttgtaacttatagtggtgaataaaagattcttgttgatgtgaattggcatgtacgtgtattggttatataacttacaggattgaagtttgcttaaaatttgatgctgaattgttgtgcatgcctatctgtagctttatcacttatgtatcagtaaaaaaaaaagagttcatttgcatattttgttgaaaaagttatgttcaataatccatatggatatgtggattgaattgttgggggggggggcgggaggttgtcttggagccattttattttatggtgccacatgatcttttttcctgacggcagcacgtcacaatttaggcgacaaaacccgatgccaatggaatttttctgtgttaaacacatagggaaacccataggaaaatctaatttctccgttgtgatttttctatcggcaattcttgtcggttccctcaaaaatacaatttctatggataaaccctatttttctgacaatttttgatccgtagggttggcacaagtctcgtagtgcatagaagtctacgtgtgtacagtatgaaatgagaagtttagtcctaccatgctaattttgggagggttacacaagtttacgtatctagttgtccaagttctagcaacacttactaaacattttacataaagtgaggatgaaaaagcacgtgtgttatcgtttaggcatggtttaacaaattcatgttgagcatacagctataagtattggtacctggattattacgattttctatcagtaatagatgttcaatatggtttcaaaattttaggtttggtggtgaaaagttagccctagattctatcccaaaattttctcattagtgatttaaacaaaagatttcagggatagaattttgggaactgttggtgatgctcttatattgaatatataataaatgtggatagtttattccaatagatgacaaatttcattggtgcacacgatcttttcttggtatatatcgataacatacagtaagaagaatccattaacgatcaatgcataatatgaagat

SEQ ID NO: 4453 - DNA, 1668 bp, Oryza sativa
tatagcacggtacatacatgtatcccataatgcttaaaaaatatatttgtcatatcagatcgatttctataaaatgtgcaacacattctctccatagtgcgattattttctatatctttccgactattctggagctacctatgatctatcgatgatatacatatttgaatccattggcagttgtaacaatttataataaaagattgtcatttgtattgattttattgcatatttctttgagttttgtacagctagccatgaactgtcattacctatccttagatattatccttatacaaaataacaaagttattatgcatattagtacctagaaatttccttaagctctttcaagtgaacatgttgcaggaggttgaaatccaactttgctagttcaagaagaaccggattgtgcccattgtcttggtcatactcaaacatataatgtaacatttccactctcttgagagtccttggcagtggcaagcgaatcgcatgcttcacttgatcagctaaagggcccttcaaaacactatcccaaatcattgattcgagatggttccttgcaaaagaaatagtttcctcgaattctgctcaccatgtatgaagagatgggctgcgttgtataacgagattagaccccttgggtcatcagctaattcatttaagaaattaccatcatctcccttgaatttctggaatacatctgcatgtgagatttgatataaaagtgtttgtgaagttccaacatttagcttggcatgttatgctcaatctctttaatttgaacatttttatatatatggtccttgtgattgtaatcaacagttccaaaacaactatactcaatccattaactaagtagagaaatacctggagatacccaaaaaccacgctccctgagcaaacgaaaccgaagagcaacctcgtggaggttagagctagcgaattcgctttcatggatgtcttttagtgcagtttcaatctctttttcaaagaggtgatcgattcccagatgcactatttcatccactaagtacatcctccttaacatgtccttagtgggtgtaaatagtgtgcatacatcctctttcaatttgtcggccctatccctcatccattctgtcgattgctgcatgaatgtactgatttgttagtttggattgcaggaaaaaaaaagatagacttgaagagattcgtcaaaagcagtagcaatagtttagaagctatatatgacaaagagaaacataacaatttgagtaaattataccctcagtacaagaatatagtaggcagtggtcatctagtacaacaacttgaaaaataagcatgccggtacatggacatggcaatcacccgcgtttgtcaaagatagtgttactgatgattcattctgttttctttttctgcattctaaacatatcagctagattgttttgtattttgcagtgttcattattggagatagaagatatgtttgaggagtcgaattggttggaaattatgttagtttgcatgttctcagtcttaaaacaataagttgtgaatcacgagacttaggcaaggactggagatatgaatcatgacaaaactgcattgtcgagagacgataacatttaatatattgttatggagtgtaacactgtggtttctttccttgcacatgct

SEQ ID NO: 4454 - DNA, 8218 bp, Oryza sativa
aaagaacagcatgtttcgatttcccttcgatgaagtatgaggtcagcgagcaaggcggagtcacggcggctggggtgcaatggggtggacgtcactacgtcgtggttgcgagagataacacatgtagttgtcagttccctcagctccatcacttgccatgctcccacatgataaccgtttgtaagttgcgaggtttggatgtggaggtggccccccgaatgtgttatgaagcttccaatagggctgtgcaggacacgtactcccctaggtttgaaccttacctagatccatcgcagtggccaagttatgatggagagttcttcgtttcggacttgtcattgaagaacaacacacgaggaagaagaaggacaagaaggttcaagaacgacatggacaaagtgtacaaaggctcagccaaccgacggtcacaaaagccgaacaatacaaattcagagccggtcatgcaaaatagatgctcgctatgccacgaactaggccataagaaaactaggtgcccgaagcgagacaagtctaaggatcgaccgaaaaagcgccgtaggacggggggaggtggtgagggtagcacacaggtgggattggatgacattcatattttttaatgttttaaatttagtttgcattacatttgttaagttcatattgttgcttcaatgtttactttctgttgtcctcctttccgttctcattgtgatttttccatttattttttttttttttgcaattactgatgattccattttcatttgcaggatggagcactttccggggttggaggatttctacgaggagaagcacagggctccccagattgtgagcggagaggttagcatcaacaatattccattttttttatggttgaatttattttttcttctttgatttgattctgtatagatagatcaaccatcatagagatatctcaaatcaaacacacacaaaaaagaaaaaaccccattttttttgttctgtttttttcacactgtacatagagagagatcatgattcatgagcctcaaagcagagcatgtaaacacacacaaacaacaaaaactgatctgaatttgtttgattcattttgaaatctcagcttctctttgtccccgttccagaacgcccaaatctgagcaggaaatagttcgatttccgtatgaagcaggtcccaaatgggccttaaacttgatgagttcagttaagctgcctgaagtgtgacacaacaaatttgatgatattttgtacgtcactgtatatctgttttgcttgggaacacaccagttggacgatctggcagcctggcacaattcatcaaattttatcattttgtttatttatttatttataacgtatgcaaggatgccatagatcttcttttcagttttctttttcctagaaaaatggcgtccatgcaacaaagcatcttaatcagataagctaattttcatatggctaagataatcttgccactgaattaagatgtgctttttccatgactttttttagtacttgggaacatgcttaccagtatggtaagtattagtgctggtttttaaaaatagtatttgagatgccaattctactggtcatacagaactagtacttagctcaagattgctcataatgagtagtagttgcttgtattacttgatcataatcacagagattcctgctgacccaatcccaaaattaaagttcccagttgcttgatatattttccacaacccttgtatatgatatattgtcgctaactatatgttgttatgtttgtctattgatgcagcgcttgaagaccctttgagttagaggtcacacggcgcacatactgttcgacgaccggtacgtcccgtacctacagcgggcgaagctcttggcgttcgtgaccatggcccagcgaccgatgcctctatacaacgccgctgctctgacggccctcgtggaccggtggcgtccagagacacacaccttccacctaccgtgcggggagctgacggtcactctggaggacgtcgccatgatcctgggtctacctatccggggtcaggcggtcacaagtgacacagcgtcagggaactggagggagagggtcgaggagtaccttggtgtggagcctccagtggcacctgatggtcagaggcagacgaagacatcaggggttcctttgagttggttgcgagccaacttcggtcagtgtcccgccgaggcagacaaggccacggtacagcgatactgcagggcgtacgtcttgtacatcttcggcagtattctgttccctgactctggtggagacatggcctcttggatgtggctgccgttgctcgcggactgggacgaggcgggtaccttcagctgggggtctgctgccctagcctggtttaccggcaactctgtgatgcttgccgaaggcaaggcggggacgcgaacctagcaggctgtgtttggttgctacaggttagttcacgcatattatgtttcgtaacatttcaatttcttgctaaaaagttggaagctaacgtatgtgacgcaggtttggatgtggatgaggcttcctgttggttggcccatgtggaggacccatcaggtttggccgcaccaggatgccgaccgacgtcccactgtagctcacctatgggaatcggtcccatctccagtagtaggccgcaggaatttggcctactaccactacacaaacgagatggactatctacagccagaacatgtaagcaattcaccattctatcacacatgaagatggtttcttactatatagtactaaatgtgcttcaatgtgttttatttttgttgctgcaggtggtgtggatgccatatgaggcacaggaagtgctcgagctagaactaaatcccatgtgccatatagaggatgcgttgaagaccctacggtgcccactgatctgcttctatgcagtggagttccagatgtgccaccgcgtgatgtggcagttcgggaggcttcaaacaatcccgcaccgtttctccacaagtgtcgacctacacaagttagtaatttcacttaaaaatttattttgcttgctcagttattttcacatcaacatttattaaatactcgagttggatattttgcatatgtgcagggtggaccgtcggaagaacaagaaggtgactgattgggcttactaccatcaggatcatatcacgcaatgggagaagttcgaggagaatggagtaccagaccagggtcagcacaacaggacagagttcgacgtgtacttggcgtggctccacaggacctaccgtcttgtcctacgtccggcctggacgctagccgacatagcggatgaccccgaggatgttgagaagcagagcgagtacgatactcgtacccgtcaaggtaccacggtcgagacgggacctgttcgcgacagagtggttagttctagcattaatgttgtgacttacttcatttcaacgccataaatgttgtgacttacttcatttcaatcctgcaggctcgagagctcttgcggaccgtcaacgatgcgggagtggcgctaggcacggctcctggctccgaaggagagggcggcaccctccgcaacgccctacaggtaatcgttggaataagagatgaaactacgttgttttcttccaaaatcgataacttaacagggattatttttgatacagagactacggcagcggtgtcagaagttggcaacaaggctcggctgcaggtcgaccgatgtggtcgaacatgctcatgcccaccaagagagggatgaagaaggggaggtgggtgacgaggagggcgagcaagacaaggaggcggaggaagaaggagatgaggaggaagaaggggatgaggaggaagaatgggatgaggaggaagaagaggaggcggatgagctcggtccctcgcagctggaggacgcaccagagtcatcacagctagatctctcgcaactcggcccgtctcgaccacgacgccggcaggctccttcgcaggactggaggtacacccccgatgtgcctcatcctcgcactagaggtaggaggaggtgagtgcatggttcaatggatggatggatggatggatggacttgatgcatggttcgatggatgtatggactagaacttttgcttgttgtgcatgaatggatggatggatggatggatgggatgtttttatttgttatatgtatggagttaatgtatggatgtattgatggattctatggatgtatggaatgatgttggaattgatggatggatgtatggttctctggatatattactgcctgtgaatatattattgcctgtgatgtgtgttgtgtgcaaagtctgactggacagagagcagtcttgctaagttttagcaggactgcaaactcagcgccagggaaaatggcgctgagattttcaccctcagtgccaggtgcactggcgctgaggtcccagcccagccatccagaaggcttgctgggccgggccatggccgattcggccaagtcccatccctaggtccagcgccattatggctagcgttgagttcccagcccgcaagccatccagaaggcttgccgggctgggccatggccgattcggccaagtcccacctcagcgccgggtgggctggcgctgaggtccctaggtccagcgccattatgcctggcgctgagttccaagcccgcaagccatccagaaggcttgccgggctgggccatggccgattcggccaagtcccacctcagcgccagcccacctggcgctgaggtccctaggtccagtgccaatgcagttggcgctgagattggccatcttagcgccgatgcagctggcactgaggtagctgccacgtcagctgggggatcggcccggccgccacggtggcacgatatcagcgccagccccattgacgctgacacgaccaacctcagcgccaatgcgcttggcgctgagtcgacggcctatttttggttgaagtttttgacaggggttagtttcgaaataagtttttgaaaagggtcaatttgtcaaaaaaaacggggaggagtacttgtgtaagaactaagaatattgtattgcttcagtttaatacaataaatcgattttgattcgttttcttataattttaaagttaaattaagtctacagataaatgtagtaatatttcttaacacaaaacaaatatattatcagaatatattaaatgttacttcccctccatatttttatgtattatgacgttgttgacattttaaccaaaatttaactattcattttatttaaaaaaatttatgtgattattatttattttattttgacttgatttatcatcaaatgttctttaagcattacatgaatatttttatatttacataaaaatttgaataaaatgaatgatcaaatgttgataaaaagtcaacagcgtcatatattaaaatatggagggagtagtatttaggaaactaatttacaagtagtatgaaggggagtagttacaattatttctgtaatgatgcccacacgtaataccatatatgtcatgacagagaagctaattaagctgatcatttttatctctgctacatttgtgtagaaaaaaccgactaggggaatgacgcattggcgacgacaaaggtgcagcaaacaatgctctctctttccttccccttcattgccaagtcagatcgatgagcgccagaccacccactgccagatctaagggacgtgtcaggttcttgatgttggtggagcttcggaatagatgacgtcacgacccgcaccctctttatatttttcaaactagctaaagaaagatctgggtgcccaataaatacctatatacaaaaaaatcatttatagggtgggcctcttaacagatccacctacgaaaataaatctattttcgcagggcagcccgtcctccccctactcttttctctcctctcttaaaaaaaatctaagccctcactactctcccatcctccaccgggtagcgacgacaagagcagccgcgatgatgggaggggtggcgatggcagctacaacatgagcttgagctggcgctggtggccccgtgcctagctgattcggtattgtagtgggtggatctgtggggggcgggctcatggtgtgattctggcagtagctcatggggggggttttaggcagctgactctgggaggggccaatcgggaaatggtggccagcgcttcgaggggtggaggcggtgggctactgccaatgggggcaaagcttgggcgaccacacttcatttggtgagctctgggcttttgtgggcctcaggagttccaggaacagcgacgatgggggagtggtggatccaccaccacggagcttgagttcaaaagtaggatttcatgattttggaacttttatttatgttattttgtgttttattttgtgaaagcagtcaatataacttaatcgtctgtgaaaatcactttttgcatacaattgtgcagccggcttgaaaaatgctgatttctacatatacctgggttcaggcagttgctctacccatttgcaaaaatgacttttgaccatgtataaacatcaattttcctcatatacctcttcccacgcatcaagcagtcaatactaagggtgtaagtgactaatccacgaaatctacttatggaccaaaataaatcatgaacccacttatttagacttacaagtaggttcgaggtttatccacttgcacgatgagccaccgcatcctcgttggtcaccacaaccgcatctaagttctccttaggcctggtttagttcccaaattttttttctaaaaatattacatcgaatctttggacacatgcacggagcattaaatatggattaaaaaaactaattgcacagttagggagaaaatcacggacaaatctgtttagcctaattagtccatgcatgattagccataagtattacagtaacccacatttactaatgacggattaattgtgctcagaagattcatctcgtggttaatggatagtgtcggtaggagtggtaataaacctaactttttaggttataaaattttgagagttgggtctaaaataaggtgggctcaatttctataatgtttctttgtctaaaaatatctgaggtacctagagttgtgaaaaaacaaaagggtcttgacccattaacatctctaagtgtccagtgtataagttgatggctggatgaaatttagaccagttcaaaaagtttaaggatgtaaaaataaacttccttccatatataaactgcttatttgttactttgtatgctagtggtagtcattagctcacgacaacagttttcagtttaatttcaccaccccactgaatagtcttcccaccaatcacggttcacaaggtaaaggtaacataggattagacatgatagtggttaatttgaacaaacatgttaataacacaaattaaaactggtgatggcaacactttatttaatattaccacacattctgcgtgcaatgcacaagcttatgaaacggcgcttcactcaagtaagttttacgcgcaaattaaacatcacgaaagcatatgacacaacacgctacgcatagatcgacaggtcagctcattccaaatacacgcgatgtagaagaacaggagcaagcaacgcgtctgatgaaacacttctgatgaaatcttgtgcaacgctcttccattttgaaccagctattttgaaccaggaactgtatttgaacagacgaaaatgatttactcggatttccaagacgacaagggaggggtctcagagtcctgccaagtagtgttagccatcatcagaggataccggtcgccatggacattgctagcataagactcgagttcagccatttctgcaggggtgagtttcacagatagtgctgcaacattttggttgaaattctcgatttttgttgtcccgggtatggggcacacatcacgcccctgatgatggatccaggccaatgcgagttgtgacggtgtgcatccttttctggctgccatttcgttaacacgctcaaatatttcagcattcttctcgatattacctggttgaaatctagggataagctgcaaaaggcaccaatacaagttgttagttaattgaatgagaattcattatagttctacttcatttttcaaagactaaatagacgagacgtgaatatgcagcacaaagattagcttaattggaaaaggct

SEQ ID NO: 4455 - DNA, 20986 bp, Oryza sativa
tttgtcgtttgattaataattggattagctagaacattatatggttttagctaaaagtgcataggatgcttagccatgcttagagacattagctcatataaatgggataacttatgattcactatatttaatgatggcttaatgatagctcacgatggttaatcgtgattggttaattaactaatttgccaactaaaacttgataatggtgggttgtgagcgcatgattttgatggtcgtgctcatgacaattaaggaccggttcacgattttcagttgtgaaacattaaccgtgccaaccacaagccagcgtgggcaacggctttactttttgtatagtatggttcattctggagcaccagattgtgaagtggcggagataagcacacgggggtttctggggagtctatgccttgtttataagggagtgattatgatccaggaacggtgcactactttgaattgtgttatgcaaagggtattgtcacaatctctattcgggtacttgttaagtatcgcgacgcatggttgacatgatgttgaggttgtgtcttgtgagtacagtggtacacctctggccagagtaaaactattcgaatagccgtgcccgcagttatgggtgggtctaacaatgtctttcgtgattagtttcatgcctcttaccatattaaatgacgatgataataatttgtttagctcctggtttagaatggtatattcctggtttggaggtagaactgtgcagccgggtttggttgttcagaatggttgggcctatgcaacgggtatgttgtatagcgttggattaatattgtttaattaaatactttgcaattttattaaattctggagtatttattaaatgccatttatgcaaatgagactatattatgccattctttgttattccctgcatttgcatatttgctgcgtggcttgttgggtatgtcatatactcaccttttaattattcatcaaaggaagagttctacagtgatgctgaaggtgtgaaggattaggcgtagccctggtcaagctgcttgtgggatagagtcgtctgcgccgttcatcttatttttccactgcttggatttttattgtttgagaggaactatctacctctgtaatgactttatattcgcttattaattagagtaatgattgcactctattatcaatttgttattgtgtgcctcggctgattcctggacgagggtttacacacatgtaagcgtttggaattttggatagaaattccgggcgtgacaagttggtatcagagcctccttgaccctaggttatgccaaacggttacctatagaagccctctaaaaatattgaaaaagtagaactgttctcctctctttctcttttaattaaaccaagctaatggcatatgcagtttatagtccctttatttgttctcattcaaaatttactcattattttgtgttgttagtactgtacatctattactgtactaatggcccattttttatctttcttttcagcagaaattttacaacctttctttttatcatgttgcaacataatttagcatgttgattttataactctctcttttattttatttttgaaacctgttattcagaagtgcaaaaaaaaatttgtgatcccgttttatactgtttcaacttatcttgcaaagattggtttactttatttatttaccttttactttgattttctaactttattcaaattaatccaaaaacttgtgctattaattggataaatgtcttaactccctcctttcacttgtctttagatgccgcgcttcaagcctgagtacttgttcggtactgagggatttgtccaggaattgcgtacgatgtccttcgccataggatttgggactgcccctttgtatgcccagattcctcacgatcgtgatgaagagaagtgccgtgtcatggtcaccttgaacagtaatcgtgaagacatcccatcggtgatgttcgaggctggagagggaaactatcctcatgcttgtcaggagatggcaaggatcgctacagtgatcagttggccgacactgagtatcgctaccatcctcgccaaccccaaggaagtgaccgtggcagctatcttgaacctgcagggattgagaatgatgctaccacaaggcatttggttgagatgctgtgggccatggatgagtcccgcgctgaggtcgtattagctgctcaagatcgtgaagactggaatcgtggtaagatctgtaagttggaggacaaggtggatcgtttggagaaggaactagccgcattgaagagagaagcaccaccacaaaaggccagggttcgtcttaccacaaggaagagagctctatttgtccctcgctaccagttggtgcctaaggttcatgtggtggaagaagaagaagaagctgccccagtcccagcggatcctcccgtcgttaacgtgagtgatgatgatggagaagattcgaagcacacccattcaaaggtcgagtggggtgctacccaagaggatgaggacgagccttcaatcaactccgatgcccggaagacctagacgtcttgttgagtcgttgccttagttcattgtgttagttatcttgtttaagtttggttgtgtgtgtgggtttcacttgtgatttacatcattggtgggatgtaaatgcatgcgtttgtttgctttcaagtgttaggaagttggtgagttagtaccaagatgtaccaagatctcaaggaaaaattttggtgggcaagtatgaagcgtgagatagcagagtatgtagctgtgtgtgatgtttgtcagcgagtcaaggcagaacatcagaaacccgcaggtttgctgcagcctttaaagataccagaatggaagtgggagaaaatagggatggatttcatcactggtctacccagaatgtcatcgggtcatacctctatttgggtgatagtcgacagacttaccaaagtggctcattacatcccggtgaggaccacatattctggaagccgtttggcggaattgtatatggcaaggattgtgtgtttgcatggtgttcctaagaaaatagtatccgatcgaggtagccagtttacttcaaagtgttggaagaagctttaggaagagatgggttctaagttgaatttcagtaccgcttatcatccgcagacagacggacaaactgaaagggtaaatcagattttggaagacatgttgagagcttgtgctttagacttcggtggaagttgggataagaatctgccttacgcggaattctcgtacaacaacagttaccaagctagtcttcaaatggctccttatgaagcactatatggtcggaagtgccgcactccgctgtcgtgggatcagacgggagaacgtcaggtttttgggaccgatattctgagggaagcagaagagaaggtaaagatcattcaagaaagattgtgtatagcccagtctcgtcataagaattatgctgacaatcgccgcagggatttaagttttgaggaaggagatcatgtgtaccttcgtgtcacgcctcttcggggagttcatcgttttcacaccaaaggaaaattggcaccgcattttgtgggacctaataagattgtcagtagaagaggagaggtcgcctatcagttggagttacctcaatccttggcagatgttcataatgtgtttcatatgtcacagttgaaaaggtgtttaagggtacccactgaagaagccaatcttgagtagatagaaatccaagaggatctgacatatgttgagaaaccaatccgtatcctggagacagatgagagaagaaccaggaatcgagttatccgtttttgcaaggtccaatggagtaatcactcagaagaagaagctacttggaaacgagaagatgaattaaagtcagctcataagcatcttttcgccagctcttccgaatctcgagaacgagattctgtttaaggggggtaggtttgtcacactctaaaaatcctgaatttataaattgttgtttaaatggaattattagaaatgatttaaaaagcctagaagaaaagatctaattttaaataataaattccaatataaaagtgggctagataaaattttattaaatacttctatagttcctagatttttctggaatttatttgggccaaggaaatatttttaataaatggaattgcatttcatgaataatttaaaaaagaaaaaggttttaaaaatcttcttttggctttgggccgaaagtcggcccaattctctccctctctctcctcggcctgcttgcgcccggcccaaccagccagtcgagccgagccgccgctcgcgctcctctctcccgctgacaggtggggcccacctgtcagggccatcgtcttcctcgcgccgcccagccgcgccctagccgcgcaagccgccgccgcccccttccaaaattcgcccgcgtctttatatctcggatcaaatcaatagaggggaaatgatcctcgggatcccctcttccttttctcttttggaatcttcggctaatttcgtttggaaatcgttgaattcgagcttgattcgaattcgttttttcctcctaaccctagatcttccatcgccgttgccggcggccgtgggcctccatcgctgctcctagcccctatataaggacccccgggacctcctcttttcgtcgctacgctcgcctcagctcgccgccgcttgtagcaccgccttcgcgacaacccgtgcgccgctgtcgccgctgcgagtccagccatgcgccgccgccgctccggtcgtcgtcgtcgctcaggaaggctgccgtcaggttcgccaagtcgtcgccgtcctcatcccatcctccgtttccaccgaggaccgccggagcactgccgtcgtcgtcgacccgaacgcctccgccgcttcgacctcgtcgccgtcgccgtccgttgccgtccgccgttgtccaagctctcggtgacttcaacgcgtcgccctctacgcgtaggcgccctccgtttgcgccgccgcgccgtcgttcgccggtgagcgtgagttgccgagccgccgccggtgatgacgtcatcgccgtgtcatctgtagacccgtggtggattagatcgatctcggccgttcgttttgtctagattagatctcggccgttcgttccgtagaccgtccccgtgcacctggtccaccatgaacccgagcccgctgacgcaataaatcatttttccttttcaaaaataattctttattccgtcataattcaattaaaatctaaataattgatttaatccgatttaatctttaaaaactcataactaattcatcttagctcggatttagttggttcaagtctctaaatttttctaaaattgagatctacaggttaaaagtatccacatgtactgttcatgattgtttatgtgctgttttggtgattttgctcttttatgcttcgattccgacgttcctggagagtccgattttgcaggagaagactttgaagagttccaaggccaacaaggcaagtcacacatatcccaaacaatcctttgagcatgttgatcccgtttaaagctattgtttctattcaactactgcatttattttcgaatgtcattgggtgggaataacctattgcctttgttatactttgtcgtttgattaataattggattagctagaacattatatagttttagctaaaagtgcataggatgcttagccatgcttagagacattagctcatataaatgggataacttatgattcactattatttaatgatggcttaatgatagctcacgatggttaatcgtgattggttaattaattaatttgccaactaaaacttgataatggtgggttgtgagcgcatggttttgatggtcgtgctcatgacaattaaggaccggttcacgattttcggttgtgaaacattaaccgtgccaaccacaagccagcgtgggcaacggctttactttttatatagtatggttcattctggagcaccagactgtgaagtggcggagataagcacacgggggtttctggggagtctatgccttgtttataagggggtgattatgatccaggaatagtaaactgctttgaattgtgttatgcagagggtattgtcacaatctctattcgggtacttgttaagtatcgcgacgcatggttgacatgatgttgaggttgtgtcttgtgggtacagtggtacacctctgacctgtcacgtcctgataaattcatcccaaaataaaaatcattttataaaaggaataatagaattaattacaattcgaaaagaaattggcaaacactaaaatacgtataagaaaaattcgaatgtggcccagaaaatttttgttaaattctccttggtctaaaaggagctctcaaattttacttgaattttcagagcaccggaattatatattaagcaacaacaacaattaactaaaaagaaaaactaaaaataatcctcctccctcctttgggccgagtccagcccaaagtccttcaatcctccctctgttttccctgtttttcccgggccgccccttcctccttccctcccttaggcccagctccctcctcttctcctcctgggccgcctcggctttgcccggcccaagccgagccgcgcctcccacccgtgccgcgcatgtgcgcgcgcgtgcgcgccgttgccgcgcgttgactgcgcgcctctcgcatgggtcccgcctgccaggcgcgtccccgacctccagccgccggcctccttcctctctctctctcccgtgaaccctagcgttgttcctcctccaaatccaccccattcaagccggctttttccaaattaaatagggggaattaatctccattgattcctctttgatttcccccattttcccccttgaacggcgtcccaatcaccgggaacggacgcgccaacaccgaccgccttccattgccgccggccacaaattccgccgttcccacctctcccgtggccggctccctctcctctcctataaaatggaaccccctcgctccattctcttattttagccccctcccatgctctcccgtgtcctcaccacctctccccgccttctccttctctctctccggcgccggtcgacctccagccgcacctcccgccacgaccgtgcgccttccggctacgccgtcaccaccctcggccacgtagcctcctcctcacccccgggctgtcctccgtttagcgtggggagcaccagaggcgctttcccgccggcgtccagtggtgttgccgccactgcaccgtctccggccggctgctgttcgtcgccggtgcgccgatcgacgtcgccatctcctccgtcggcgtcgcagcgttgtcctctcctccggctgctcctctgtttcaccagaatgccgtcacccgtgccggcctatccatcctcctcattgtcgacgtcgcctccggcagcccctcccgccgtgcccgtgcattggccgacgtcgccgtctcctcctccagcgtcgcagcggcaaggtcgcccctggcctcgcctccccatcggcggaacaccgccggtgtccgtcgtcgtcttcaccgttcatcctcgccggctcatcgtctcgctgcgccgccaccgtcgtcggcatcgcagcggcgtgttccatgccgtccttgtctccgtgcagctgctgccggctgccctcgtcgcctcctcgccggttccggtcgtcgtcctcccgtcgttctcggtcgtcgttgcgtttgtccctccgtcaagccgtgctgatcgtcgcccgcgtttcgtcaaggttgctgcagccccatcgtcgttttcgtcctcggctccacgtcgtcaggcctcatgccggccgcgtctcgccttcgtccaaggatcactgccgaagtcgtcccctcgccattcgtctccgtcgttcccgtctgtctccgccgcgcccgttcttcgtcgtcgttcccatgccttgttgcgtggtagtaaggatctctcctctcgctgccctcgttctcatcctatcggtgtcgcccgtgcccgttgtgcggttgtcgaccccggtacccgtgtaccggtgtcggtagtcgttcgcttgtgcgtgtggtgaccgtgttagtgtgcccgcttggtagccgcgtggtttccacgtgtgcagcccgtctggtatctagtggagtccgtttgtcggccactcgcctcggttgacacacgggatctgcttctatcgacccgtggaccgtctctgtgtacccggtccaccgtggtcccttaggtggtccgcatgtcaacggcgcagctttcctgtcttttccaggctagcgcttacacatgttttatagttgtaaaacctaattataataatccacaaatctccatataacagcattaaacttcgaatgaccatgccttggtcatacgaactctgaatcgacccgttcaagtctcctaatgtttgttataacctaaagaaccatgtacttcctttttatgtattgttattgcttctttatagccttgtagctttgcttttgtgcttcgtgtagcttctatcgttccggaggttcccgaagcgtggtttgcgatcgtcgccgaaggttcggaaggccgttctctttgagcaaggcaagtcacatcatcattgagcatattgaatcctagtttataaaattattttgatttaaattaatgcattatcgctttatttcaattcccgcgttatcactgtattatttagccatgcctatttacctttgttatgaccttattattattgctattgttattattaccttgttcaccctaggataaacaaaaccccaactagtgggtactctattcatggttccactagtatgaatttaggtagattcttcgctgattaattatgcaacattaggtggttttataactttagactttgggaattctcatatcatttggacactatggaatggttggattatgatggaattggacatacacctctctttctctttcaaaacccctaaaacctattttccggtggggtttgggtgcatgccagttgtgggaagtagcacccggccaatataaggattaagctcaggcctctattgcaaagcactaccgtacttccacatgtctagtgggtaaggcttagtttgtggctcagtctggttataaacaaaggtacacggatggagatggacgaagtcggggcccgatggacatctctaggacaaatgaaggctacatgagctgcggcccggtagtcgagatgtcatggcacagggccggtgtcctgctgctaggggctcaaccttggttgcccgtctcgggaatcccggccgtagccagggttaggtcggtactcttgtttatggctaggatgggttgggaactatgtcacgtctttcgtccgtatgccgtggtggtatgtggcgcgttgttagacgtgaggaagacgtgtcttgtggataaagatttacacctctgatcagagtataatctattcgaatagccgcgccctcggttatgggcaagcctagcaatgtacccaagttagtggtttacttcttaaaatttgcttaacaactataatgtggaatggttggcctgggttggcttgggacaagctgggacctaggtcgggttgtcagttcggtctgaatcatcgtaggccttgggttaaggcaggttcgtgagggttcacggccttgattaataacagtgtagctctaggatcgtctttataaaatggctttgggcaactaagtgacttttaaatgctgtttactgcaaaacttaacccctatattattaccccttgtacccccttgcattaatcatgcatctcccggtgtggcttgctgagtactgtggttgtactcattcttgctctatcttccctccccttcagtacgagaagctttggagaagaagtcctaagtggactcctagcttataccccagttgagcgcctgtgaagatggagccgtaggcccgctagtccgctgctgtttatttttgattgtcaggccttaagtgtctttgtaataatgtaaatattatcgatataataaagatgtgccttttgtatcatgtttgagtggtgtacctcggcttttcctgggacggggattaatacactagcgtttgggaaaaggtaatttttccgggcgcgacatggccagagtaaaactattcgaatagtcgtgcccgcggttatgggcgggtctaataatgtttagtttcatacctctcaccatattaaatgatgatgataataatttgtttagctcctggtttggaatggtatattcctggtttggaggtagaactgtgtagccgggattggttgttcagaatggttgggcctatgcaacgggtatgttgtatagcgttggattaatactgtttaattaaatactttactattttattaaattctggagtatttattaaatgccatttatgcaaatgagactatattatgccattctttgttattccctgcacttgcatatttgctgcgtgacttgttgagtatgtcatatactcaccttgcaatcattcatcagacgaagagttctacagtgatgctgaaggtgtggaggattaggtgtagccctggtcaagctgcttgtgggatggagtcgtctgcgccgttcatcttatttttccgctgcatggatttttattgtttgagaggaactatctacctctgtaataactttatattcgcttattaattagagtaatgattgcactctattatcaatttgttattgtgtgccttggctgattcttgtacgagggtttacacacatgtaagcgtttggaattttggatagaaattccgcgcgtgacagtggcgaaaggttttagacaaatttaaggtgttgattatgatgaaaccttctcaccagtcgccatgctaaaatctattcggattgttttagcgattgctgcctatttcgatttttgatatggcaaatggatgtcaaaacaactttcattaatggaaatcttgatgaggatgtgtacatgacacaacccaagggatttgttgatccacaataagctaaaaaatatgcaagttgcagaaatccatttatgggttgaagcaagcatctcggagttggaatatttgttttaatgaagtagccaaggtgttgggctttgtcaaaaatgaagaagagccttgtgtatacaagaagattagtgggagcgcacaggtgtttctaatcctatatgtagatgacatattgttgattgggaatgatattcctatgcttggatccgttaagacatcgttggaaaatagtttttcaatgaaggactttggagaagtagcatatattctgggcataaggatctatagagatagatcaaggaggctaattggattaagccagagtacatacattgacaatgtgttgaagaggttcaacatgcaagattctaagaaaggtttcttaccgatgtcacatggcattaatcttggcaagaatcagtgtcctcaaacgactgattagcaaaacaagatgagtgtgaatccatatgcctcggcaattggatccatcatgtatgcctgttatctacacgtccagatgtttcatatgcaattagtgcaacaagccgataccaatcagatccaggtaagagtcactggattgctataaagaatatcctaaagtacttgagaagaactaaggatatgttcctagtctatggaggacaggaactgctcgttgtaaatggttacaccaacacaagcatccaaatcgataaagatgattttagaccgcagtctgaatttgtgttctgcctaaatggaggcgctgtgagctggaagagttccaagcaagatatagtcgctgactctacaacagaagttgaatacattaccgcttctgaagcagcaaaggaggctatttggataaagaaatttgtttctcaattgggtgtgatggccagtgctcccagccctgtgaacctctattgcaataatagtgatgccattgcgcaagcaaaggagcctagatcgcatcaaaattccaaatacattttacggcggtatcacctcattcgcgagatagtgggtagaggagatgtgaagatatgcaaaatacatatggatttaatgttgcagatccattgacaaagccactctctcagcctaagcatgaggcacacactagggcaatgggaatagagacatgcgtgattgactctagtgcaagtgggagactgttggtgatatgccctagaggcaatcatagagatgattgaatcacatactatgtttacatatttatccgacattattccttgaaatagataactcattattggttaatgaatatgtgattctttcatgagactctttatgttgtatgttactatttctaaaggatcccttatcaaatatcatatgtggaacaaatatgtttaaatgatcagtacatgtattaattgatgatcatgtctcatggatcatggtatggagataccaaattaataatgtggacacatattggggaacatgttgttggatagtcccaacatgagacagtgcaagagccatatgttgttggatatggcggtcggagggtattaccgacctttccaactgccataaccgtcattacctgcctatttaaggagctcactctcttcatttcttcacacacttcaagcatgagctttctcatttctctcacgtttagtttagtagtatgaagctagtggagtaggaatagaatagaaatcggagtctggaagtcttcggaagagttcgggtatgactctagtagctctcctttcctcttttgtaagatttgtactttgtttagaatattcgtctttatacattttttttgcattgaaatactttctgagtatacgaatgccaactttgctttatgttcatgttatactgattatactgctagcttatctgggagttgcataggtacgggtataatgtttgctattgcaattattctctgtcatgacgatgatattagagtagtatctggtagtttaggcgtagtgtctagattattgggtatcattatttggggttatatgctgcggatgagaggtgggtcgctgatggtgatagctcactacgggtattcctccgcgcgtgtatatagtcctaagttaatttcatgggaagggtactcctccgtatttagccccggttgtatggttacgacgggctgtcgtaaggaactcgacagttaggggtggcttctcgaagtactagaaaggcatcagaaagagggtattagctagttaatcgtataattagaatgtatgtataatttgtatacaagaagtataggaatagattcttttctattttctttccacttagcttagataatttagtatgagaatgagtagtgctatgcttgtgtgtcaacctatcctttggattatattaacccctgcttagactatgattattacaagtaacatataaattattagtacggttctttctactatgatcttcccacgagattaaacaaatacgatacccttggaatactcttgggtgaaatgctacaatggtatatacgtgtgcttgcggataaactctgtaaccataatatttctgcagtaatgtagtaagaaataccaacacacggcaataaagtaaaatttaagaaattgtgcaactctaaatttaccatcaccacaagtatatcactagcatacactgtatttgtttttgaccctatcggcattctcattttttttcaataatttctcttcaattgagctgaaagtgtcctccagtaaattactagttattcaagtatcttttagccatgacacgttttaacagtatctaatttcaaattacacaatgtttgagtgtcctgtagtaaattttgccatgacagaatcaacacatagcgaagagaacgaatattttttttttattccttgctagtatattgtactactattttgtgacatttcttgcttagtacagaccttttagtatttattattggaaaaagtatgaattaccccctccctccgaaccacaaaaccagacatattaaacctcaaactattgaaaccggacaaattaccatcctattagattcggagcggtttcaatcctacaaggcgttgacgtggaaatccaatcagcaaaaaaaaaaaacagggctcacaagtcatattaattcccatttaccggcactgttgggcgagcggcggcactacaagaggaacctccctttagcaatacatatatgtattgcaaaaagtgaaaataagcattgctagggtctgtatcaacgcatttaatatgcgttacctatgctgctgttgctagcaccaataacaacacatacacaatcgttggtaacatgtaagaataaacattgctagttagcaacaaagtaaatagttttcagccatacttgtatgcgttggcagtttcggtgatgaacaattatatataatccttgcaatggctataatcaagttgcaccaacacttataagtattgcaatataggcaactattcattccagcatgcctttgcacaattatcttgttgggttagaggcccataaactcaaatgatgtacacatgagaaaaactaagtcattcataaaactaatagtaattaaagagaattttttgtattacatggaaaatcatcctcataagtcatgacattaaattttgttcagaacatcatgcacaaatgtaatctaaactatagaaaaaaaaacatgcatctgaagttgccactatcattgccaccatcttccacattacagtcatcatcatattcacaagggatctttagatgacagttgtccaccttgtagtaaccatattgccccagatcatgatccatttatcttgtcaacctgtaacagaaaaaaaaacaaccattgatacagtattggaagaaagaagatcacatctaaagaatttgagaaatagcaccgtacaaaaattgctggccacgcaatatcaagtcgtacgacattgccaataattttgtagcctttgtatggcctgatcaattcttcatattttgccaatggaaaatgaacatgcaccatcaagtattcagttcctagctcaatacctgcaactttgcgtgttggatcacagcttacaattgaagcaacaaccacattcttatttcgatttttccagcttttcaagaatacattagttccaatctggtgcataaatatatgtccatcagcattatctctatataaagagcaattaagtatggaaaagaacatcatattaaaagttttacctccaatgaattggcatccataatgtccactatgttgcactgttgtttctgtacaaagttatttggatcaagattcaataatttaactataaagtacaaacatattataccaaatagaattctatagcttatctttatattaggtggctccagaagtgaaaatttaccttataagcattagaattattcttcccttgttgcatgtgatcattctggttcatgtttcctttattctgcacggaatatcaaaatattggcacaaactacaataatctagttatttttataatcaaacactgtcagttccaatcaataaaaaagtgaagactagccttcacacaaataatcttcctctgtttctcaaggtgattttggccataagtttgattgctgtgtaataagataagacataagattgtaatgaacagctacaataaacgttgacagttgcaaacaatattgagatcatataatgctatgtagtgagttcgacataacaaataggaagagaatgaccttatctacagtagattgcttggttggtagttgcaaaaccttgtcctgaacatggatatttgtttaagaatgtcctttttaacttttaattcattttttttctctctctctttcctattagaaatctccagtctgtgtagcttaagctacacaaagtaccattcctagctaccattccaagaaatttagacaaaattccagcttcatctcctactgcctgattgagatcattgcactgaaccacaatcctaagacctttcggaaggttccaaatatctttcagttttgtcttcccacgtgtttcaattgttccattttcatctgttcaatgttaaattgcaaagataaaagtgatgctcaacagtccaggataagaagaataatttcattatttcttaccatcaagatttagtatttacctcgaacattaattttaacatcatcatcagattcttcattgccttctccagcattcatactagcatcgtcatcagtatcttcattgacttctccaacatcgtcatcagtatcttcattaccctcttgaacatcactgcatattgtttctcttcagatggtgtggcaagctgtttaggggcattttcttctgcaatgtgttcctctgacaaatattcctcatggctttgaacaatgcaccgccttctactccttgccatatctgctgcaccaaaacaaaaatagcataaacctatgtattgcagtctgagtaccacttttctctactgctctagaagaataatttcagaattggctaaaactttaggcattttactctactgttgtccaaaaaagtaccactatggtttgtattgatgagaaaggtgctagcctacaggttattagatacctctgttagctaatgaacaattttcaaatagaggtgtcaacacattaaaaattgaacaataaatttactaattccaatttggatttatttgccagtcactaattcctttgtccattttaattggccaacaatttgaaacaagtaattgatagaaagaacaaaatttaatttgacgcaaggagataaaatgcatagatggacagtgaacgatcaaaagcaaaagtggtttattcggctagattgcaacatccaggacagaggaatataaaaagatcacacattggattgcttattggtctgttctagcctaataggctctgtcacctaggattgatcactgcatctgatccaaaacctgcatacagagaacatatatatcaaattagtaatgtagtatagtgctgaaatggaattaggcccgagtgtgatttggcaacacagctgagcagtgaaacgtgtaggaactaggaagggaggcggagatgcaggagcatggcggcagggccgtgggctgcgcgcgcggtgtagacgtaggcgctggggaggcaaaaccgcactagcggtgcagcgcacagccaccgggcatgaggcgtcgccgcgtggccctcagcggccgtgggggagctcgcctactcagggttgttggtcggcggggaggcgtaggtgcagaggatggcagccaacacagattgggagaggtgtggacacgcggagcggctggccagcaaatcaccatggtgccttaccttcagattggtgcctggcttaagcctgaggggaggagcagtgcacagagaagaagagaggggatagagtttcgttggagaagaaaacccacccacgagctctttgttggagaatggagagagaggagatagagtttttcacgggcagttagattttcttggagggataaaatggagggaataaatggcgcgacaacgaaagacgtgagaaaaaaaatattgagaccgaaaatactggagggagagcaaaataatttaagctcatttttttcgaaggaaagatttggaaaataacgtgagactgaaaaaaaaaaagagggaaagaacggagcgagagcaaacgttctgtcggagataaaaataatgttaaattctgactgagtagatttaagctcaatttttcggagggaatgatttggaataagactgaaaaaagagggaaagaatggagggagagcaaaataatttgcgcaaatacacaaaatgttaaattcacatcaagtaaatttaagctcgatttttttagggcagatttaacctccagttatctaatctagttcagctaatttatttttgtgcggatcaataagaactagttataaaacttcataaatgcactagtaaaaattattttctactaatacaaaccgcgtcgttgccgactcggtcctgagagaccggataaaatccaaaagtaacatattgttttcttaaaatagtagttagttaatttatcttagcacgaccgaaaaatcacgtgttttttcattgtagacccggtctagaaagactggatgaaatccagacgtaacatattgctgtcttaataaaaaagtagttagttaatttatcctagtacgaaaaaaaaccactttattttacattgttgactcggcccagaacatatttttgtcttaaaatagtagttattcaatttatcttagcacgaccgaaaaaacgtttttttttgtcaatctggtccggacagaccggatgaaatcaagacgtaacaattttttgtcctaaaataatcattatttaatttatcttagcacgaccgaaaaagcatgcgttttttcgtcatcgacctggtccggacatacctcatgaaaaacagacgtaatatacttttggtcttaaaaatatagttatttaaattatgttagcacgaccaaacaatcacctattttttcattgtcgacccggtccggacagaccggataaattccggatgtaacataattttttgtcttaaaattatagttatttaaattatgttagcactaccaaacaatcacctgttttttcattgtcaatccggtccggacattccgaataaattccggacgtaatatatttttttgtcttaaaattatagttatttaaattatgttagcgctaccgaaaaaacacttgtggtccagacaccgcggattaaatctagacgtaacatattttttgtcttaaaataatagttatttaaattatgttagcaccacaaaaaagccacgtgttatttcgttgtcgacccgattaggatagaccgcgtgaaatttggacgtaacatattttttttcttaatagttatttaaattatgttaggacgagcgaaaaaccacatattctaaaaatatatttttgaatggtttattttaaaatttagaaataaaaaagttcaagaaatttaaaaaaatctgagcagacagaatttaaaaagttttaggaatcgccactagagaagaaatgaaaaaaaatatgcatttgctagtatttgaactggagtcctcaattcagtagaaacagccaagtaccactaggctatgtccacttcacattggagaagtctgttttatttatttattcacgttaggtgccattgacaatgtaaatagttttctcgaggaatttgtataagatggaaatagaataacacaacacagatagatgcaaaaaatatagtcggccattccattttctcatcatataaacaatatgatatcttatatattgaaaaataagatctaaccaccaattctgtatataactaatgtacaacattattacacaaagcatatatgcaaataaaaaaaatgcatccatctggctcaatcacttggacaatccaatgaaatctacgaacgacacagtaaagctattgtggtgaagaagcctcgatcccagtaaatctccatccaaaattactgccataaaaataaagagctcgccaagtgaggatatcaacgatataaggaaatcagtgataatggacagatagacagagaacaaccttcataacctcacctttaattagttaccatgttatcgacagttgttccttctatatctcttcggacccatgtctgaccatcatgtgcattgtcaaatagctccccaagattattgacatgatatggttcacattccacatcattccattcttcgcccagttcaaatacatctctgggtttcatcttccttacaatagaccaccctggatttaaatggtcttcaatgtaaaacacttggtcgacttgatttgcaaatacaaagggctcatgctcaatcttttcaccggtatgaattttatttgagaaattcacaagtatgcagccaaacttatctgttttcactctttttcctttagttacatcgacccattcacatttaaacaacacaactgagaaatttccatagtagtctaactcaattatatcaagtatctttccgtaatacatgatatcaccaaggacagggttggtatcactcgcagacgtgtagctcgatgtttttgcagtcacaacaactccactattttgagtcaccctgtcataacgctttgatctgaacctgtacccacgggtattgaatgctctatgtcgttttgctacctcaattggtccacgtgccaaccatctaatatcctcatcaatgctatcaatacctctttgattctccaactgcaaagatctacaccacaccaaaagatacattagttttactcatatttgaaaagaaaaatctaaattttgatacttacatgatctctgaaccaattaggaaattgttcattttgcatgttgtcggtgatatgggaccgggagtatcatgaccagaggcttgaggcagacgcaatcgcccacgtggcctggcaccttcggggacgtcgggcccgagggtgaggtgtccgccctcctcctgatttcccccgagggggggtcgggttgcgcttgccccggccccgagggccgaggcaccccgaccccttaagaaagtctgcgccacatatatgggataagtgagcacagctgtgctcacctaacagcatttattgcagtctggtcaaagcgtgtcacgctgcatgcaacgcagtacagcgcgttcctttatccggtctgtgaccagtcacagaccggtcagatcacgggttaggtggcgactggcggtctgacgcacgccttgccccatcccgtcaagacgaaagcctctaggcactcgtctcaagccggagctagcgtgttatctcttagagatggcacgttaggggatcctctagagtcg

SEQ ID NO: 4456 - DNA, 16473 bp, Oryza sativa
gccccaaatcctctctgctctacgcctgcatgagggtgggatgcatcgatcatgcatgacaattcatggtgcacgttgtcgtgacctcgccctcgtgggtcgtacgggggagaaagcaaacgttgatcaaatgggagattgtccggaacatgttgaaggatgatccaccttagatgacttgtgacaagttcttttttctttttacaaccaacatcggatggagcgatgattcattgaatagagtataaaaaaattacaagactagcattttgacaagtagtaattataaaacaaaaagaaaaaaacaccaccaacgaagaaccccagagaaggctagcactataaaccggccgctactaaggtgacatgctcccgctaggccaacaaaaaagctatagctcaaccgcccgaaaccaaacccaacagcctaacaccacactcaactctatctacgcctttggaattggaggagacagggttagagcaaaggatcaaagtgctcttccccgtaagtcaacatgactatcttacattagctaggataccgccgcaagaggacaatcatatctagagagagcacgtacaagctgtctgagagaagcttaatttgacaagggagcttcctagacgatgagcaccgccaacgccatttgtcgaggtctcaaggagaaccaagacaggtttttcacctgataaccccacgagagggagagagacggctccacagcgccccaagaggtaaaatggcactaaagctccatcgttgtgggcttggcaatgacaagctaagttttgaaccgaccgcatcccccgagtcgatccttagcttagctattgctccattgcccaccaccgaacaaccccgctagcgtgaggacatcacttacctgacaccccctgccggttagccacaacatgcctctgtggaacacccgccatgtcgagctccctaccgttgcccgcactgacctccagagtcagcctcccgctgctgccggccgcacgtctcgcatcgtgccggcctaccaccgctggcggtcgcgccggcctacagccgccaccgacatgcaccaggctagctctactagccgtagcctccctaccgattcacgacacgtcgttccacatatatgtttgaccattcatttcattaagaaattaattaattattatttatatatttatagtggcttgattcatcatcaaatattatttataaaaaaaattaaataagagaatgattaaatgtttgttaaaattaatgtcaatggcatcctatattaaaaaaaaagagaggtagtttatatatatgatagacacatagtatatattctgtttgtaacttgccttacttaccacgctgtcgctacctacccagcatgaaaatgtcctacgtctctctattggaaatttggaatctttctactacttggaggcaaacaagtcttaatatgctgacttttaactggtcaagaacaaatgaatcagaatctaacaaggttgccacacagtaatgaaagaagagggtacacatccatgtacgaaactgtctgctttttcatcacagtcacgactcattctaacatacaaaaaccaagaattcaaaccacgtgaattgaaaaccaaagcaacgtgtacttgactaacctgcactctagctaatcctacttgtcatttctgtgctgaccttcagctcgatcgatcgcccaatccatttccaacgtagaatctttcaaaccttaataaacaaaaaaatattcagtcatatattctacgtctcaatcatgaaatccagtctatatatcgatcaataccgcagaagaaatgtacatatatatttctgccaaatttgaacattatatatatatataccaccttacctagtctatatatatagactgggtgtgtgtatatgtacgtacatcctcttctcatttctaagctagccaaagctatagatggatcacagccttgctagtgctttcggcataaatgccggcaaaatgatcatttcgcagaagccacctactaccacatgttgttttcctatacatatggtttggcacaaaccagctgttgctgctggaaatacgtgcgacatcctaagatcagcaagcaggcacaagagtttacaatccgtgtcttgtcattcacatgccccagctcctgttccagctgccgtggaagcggcggcaagttttgagccctcggtgtggggcgagttttttatccaccatgaaccacaaccactgcaggcaagtgtaaaagctatataaaatctagcagtaatcgattataattcttcgaaatgatgtccccctttgattactttttttcttaaaatcaaatgtaattggtcgtacagaattataaaaattttgataatttagggtatatagtgatatctggttgaccacttgaccaccatggcgtgtcatacgtgttgtacattccatttttgcaaatctacggaagtatattggtaatttcaatttacggaagattgaattccagtcttaataaaaagcaaagtcatagaataaactcagtataggatagttgaaaacgtaggacatgctaattagttggtcaattgaagccatgatcttcttcaaaatggacgattttacagagcgattcaaccctggatgtctcgcatcagaaggctcctatatactcccccattttatattataagatgtgttaaccttctgtagtcaatttttttaatcttgactagattaatttataggaaaacatgtgaacattttcaacacaagacatacagacagaccatcaaatatatatatgattgttaggtttaacaaaactaatctgacgttatagatgttgataattattttgaaacataaccaatatattttagtaggaaaaaagtcaaaacattttatagtataaacgaaaaagtattaatcaaccaaccgacttaattgcacgttgcggttaaaccagctaacaggccagtccaaccgttccacaatgaaccaacagcttggatatattgttcactctcccctaatccagcctttttttttccatacatttaggtttctttcttttgcatcgttctttggttacagtaatatcatcgaaaattttattacttcttttctttacaatccttattactgaccaaccaatgcatgtaagcaagcagatatcagaggaatggatgagagagagagccaacaaattgaaagaagatgtctgcggactgtttattatggcctcaaatggcatcttggagaggatgaacttagtggatacaattcaacatctaggaatagatcacctctttcaagaggagattgactctgcactaaaagacatccatgaaaatgatttagctagctctaagctgcatgaggttgctcttcggtttcgcttgcttagagagcatggattttgggtgtctccaggtatttttgtacctatttaataaattgttaagtttcttagtataattgatcaacacggtgaggccataaaagggcttaaaaacatgcacagttatataaccttggcatgctataaaaatatgtagtgtaaactgtgtatatagtgaaaacctagaaacaatcatggaataaaaaaatgaacgtgtaagatttttccatgtcattatgagtaaaacttttattctactatatattttcccaacatgtcacaataatcgcatatattaattgttctcaaatctaatgtgcagatgtatttaacaaattcaaaggtgatcatggcactttcaataacgaattatcattagccgatgacccaagaggcctactatctttatataatgcagcccatctgttcatacatggtgaaccagaactcgtggaagccatttcttttgcaaggcaccatctcgaatcattcaatcggcgtaatgttctgaaggcccctttagctgatcaagtcaagcgtgcccttcacttgccattgccaaggacacacaggagagtggagatggtatcatacatgtttgagtatggccgagaggatgggcacaatcccgttattcttgaactagcaaagctggatttcaacctactgcagcgtgttcacttgaaagaactcaaggaaatatctaggtactaatatcaatttgttacgagtatatcaacggctgggtaatgagaattcatgtggccacaaaaaaaagagagcaaaatataccctaaattcaatataaaatgatattctatctcttgcattatattataatatgttttaaatgcattatcttattaacttttggagacggcgtttaattaatatcatttgtcttattgaaaaattatgtaagtatgatttattttgttgcgaattcttttatcaagtacatggagcatgtcatataattttcataattacactaaattttcgaataaggagaaatgtcaaatattatatgtccaaaatttaatattgtcatgctattaaaaacagacgaagtatatctaagaatgtggaactgatcaatgtaccatcataaatacgcatagactgtttcaattatgatcgttggtttcacacataatttcctaaatatatacctgacgttgcgctatgttgacggtctcaatgtatgtacaaaattgatatgatattttctttcaggtggtggaaagatgtttctggatatatgggtataaaccatattcgagaccgtgtgattgagtgctacacctggtcctacgcagtgtaccatgaggaagaaatgtcgtttgcacggatgctctttgctaagatagttgtgataattgccctattagatgacacatacgatgtccatggatatacctccatccaggaatgccggatgctaaacgcagccattcaagggtacattggatatgtttatatatgcatcaaattatgtcttaattattattagcacgctgacaattagtggttagatgaatgctgactttgattttaatatcgtgcagatgggatgacagtgctgtcttgcttgtacccgagtacctgagaaagttttatgaatttatcttgcgctgctttagggagtttgaggatcaagtgccaagcaatcagaagtacctgattgccttcagcaagacagaggtacatctagctctattaattatatatgttccagaatccaaaaacatgcatgcctacatagataattaataatataatttttacacaattaattcgttttgtccttaaatttcgtcccacaattaatttttttatgacctcctttgccccaattatatatatatatatattcatacagttacaaaggttgtcaagttattatctggaaggagccgaatggtcccaccggaagcacatgcccagcttcagcgagcaggtggctctggcgacaatgaccacaggaacacggccgctggctgctggtttaatggttggcatgagtgagtccatgacaacgaaacaagcgtacgagtgggctgtgaatagcactgacgccatcatctcatgcgggaaaactggccgtttcatgaacgacattgccggatttaaggtatatatataccgattaactaattaattaattaatttgacatgtataaattcatttgcagcacgtacatatatcgatcaatgattattttttctgttggggcaatattactattaataacccatgttttgtattaattcttattgtgaaacaaagaattataatattttaaccctaattttagaaaatgtactttgtttcttactgatctagaaaaaactatgaactatttatataaacataaacatatatctacattaatttaaaataaaaaataagtcaaacaagaagttacaattaatttgtactgaaattaaagttttttgttttatgcaaggtttcggtttcaggcatgcatattagccgtcatatgtaaatttcggtgaccaatatataacaaaaaccagacaactaacagataggaaaaatagttttaacgaaggataatgtctggattatcccatgaattatcgtggtcgtttgaattgcccttaaattcaagtgctagacattttgcactcccaactattctaacctgttaaataatgccattgactcaacccagagtggttttcgttcctacgtgacacatacgcgcgcatgcagcctagttagcaaagttttcttttaaaaaaaaatgttgggccctcctatcagattttctcctcccattatctctttcccctcttcccatgatcgtgagtggcatcgacacccaccccccatcttcctctattgcacggtcgagacctccgcaggtgatgatgacgctggtctagagaggcacagtggtgacctcaccaggcgatggtgatgccattggcggctacccttggtctaggtcgggcagtggagcttcgtgagtaggagagcctcgagttcgcatacatctgccatcgccctgaagtccatgctagtcagcttcaagtctgagctctgagtttcgctgtcggacccaccgccaccgccaccaccacctccctaaagtttgttgttctagccgatgccctccacaggcgagctcggctccatcgccagctgccttaacttctagcatctctccctcactggccgctgcctccagcctccccaaggtgagctcgaactctgctgcagcaccatacccaagcgacctccctcttcgttgttggtcgtggctaccctcttcttcgccaccggcagccacctcaaacatccctgagaagagatcaatcaccgtttaggcgcactccccaagcgaggttccattgcgctgttgttccgctgagaacgacctccaacactctcaccgagcgagctcgatgccaatgactccctccagcgctcctgagcaagagagatagggaggtagagaaggatgagattgttgatacgtggggcccataattattttaaattttttgtgctgactggatagccacatgtgcttgtttctctttgaatccgtccaaaatagtgcagcggttagttcatccgatttaaatagtggagggtgtaaaatgtatggtatttgtattcaagaaatagttaggacaaccgcgatagttcatatggtactttggatgtttttataataactaatactcctactcctttcattccaaaataaatatacttatgcgtgtttctcaaaatgtataaaattcctatatatattctgtaagggaggtagtacctaatcttatactccctccatcctaaaatgtttgacgccgatgacttttttaaatatgcttgatccttcgtcttattcaaaaagtttaggtaattattaattcttttcctatcttttgattcattgttaaatatactttaatgtatatatagagttttacatatttcacaaaagtttttgaataagacgaacagtcaaatatgtttaaaaaagtcaccggcgtcaaacgtttagggaaggagggagtatgtagtataaagtatattgacattgagtatgtgtgctacatggaatgcagctcgggtcgcagaacaaagctgacatgccatgttcggttgagagttacatcaacgagcacaaggtcacagccgatgtcgccatcgccaagattaatgaattggtagaagatgagtggaaaacaactaaccaggctcgcattgaccaccgtgatgtgctccctgtggtgcagcgccttatcaatataaccatggccattccattgtattacagcgatggaattgatggattcacgttcggcgagggcattcaggaggttcttgagaaactctacgtcaagcccattcccttatagacacaaattaatttgttgatggagcaatccatctctgcccatattgtgccatataatttatattcctttttttgtgtgtgattctatactttgtattaactctcaaggttggcaccgatgaaatctcttcatcagtgcaaggacttgagatattatctatatggacaaataatttttgttttatgcttcacaatgaactcgatcttgtgttgttagtattactggatgatgtacggtatgatcgatatgatgtttgacctcaagaagatagtcatattgtcttcttaattttgtgctttctagctatccctccatggtgatgtttataattaatcttattgttaacccatcatacatatatgtaactaatctcctcatgctccgtctggtattttgcatctattgaggcaagattgtaatatgatgccctaatcaataaagctctctattcgcgcaaaaaaaattaatctcctcatgatcgtccactccacctcctctacctccacttcctctccatcactcctcttcctcatctcaactccgttgatggtgggcgcgggagcgggagcggcggggagctctgctgcggtggaccctcctcctcctcctcctccacccctcctctcctttcctctcctctttgtcggggatgggcaggagtgacctgcgccggagggatctggtggtgggcgggagcaggagcggcagcggtggggaactcggtggcggtggctgatccggcggtggggacagcggcggcaacggatacggctctctgccacccaagcggaaaccgacggcgctcaacgcgtggcaccggcgtgcggatcctagtggtgattgctagggtttcaaattttgtttggaattaatttttttggcgggccgatttttcattttgcagttggacaggttgagcacccgcagcggttgctctacacgcaggcaaaaatacagatttttgcatacacctgggtgcagcgggtcacccacccgtccgtgaaaatcgattttgatcgtaagcaaaattcgtttatgtgtgtggtagcgaaagtagaccttggagcctttggcacttgaagtcttcatatactgttcatgagctcctacattaatagatggccaaaatgggccgctcggcttggcccggcccgtccctggcgtgacccaggcacggcccgaggccagtcgggccggcatggcccaaccaactcgccgtacagggccatgccatacaccaacggcctaggcacgactcaatgaggctctcgggccatgccatgccaacccgaagacacgattagcccaccgtgctcgtccttgaataagtatattttgcctccctcatctctttggaatgggacttatatggatagaataagtctatcttacctccctcaactctttgggctgtggctgatactgctgaaaataagtctatttggcctcccttatctttttgggcctactgatcgttttgccgttccgtgcatccctagcgccactgctgcgccccatggcaaaaacactccatacaaaccactgctgcgccacatggcaaaaacattatcggtttgcgacctactttgcgatgacagcggtgatggctaggtgacgacagtattggcgatgacaatggtaatagtttggcgagcaactcagattttcttttttttttccgaaactggcatcactaccggttgacaaccctctagtgatattgccggtggcagtgatgctgtgatgggcatttctgtagtgatgagactttagcgaataaagtgagagtaattgtaaatagtacgactgttttattaactgtaatttttgtgacatcttacataaagaattaaatttattggcaattagttattttgtaattagttacatcacaaataagaatgaacttttcaggtgtttgtctcatccaattgaaatgtttgtcacactcaagctatagtcaaactttggctgttcaggacatttgtttattcatgagccatattatggcaagcgaaacttctatattcctatgcttaatagatatcatatacccaacttacaaaagatactatatatcatccaaatcatacaaaccactgctgcgccacatggcaaaaacactggaacattatcaatccatacaaacttttatttgcataataaacatgtgattgatacaccaagctatctatatttgtgacaataaaactccatcaaactcccagcagatgacaatctctctgactaattaattgcctgatctccacgatgacagcggaggagtttcagagttcttccaggtgttcagaaaagtaccatgatacctgtcaccttgcacaacgtcagctgaagcatacgactcaagttcagacatctcgtcaggtgtgagcttcactgacagtgctcccacattctggtcgaagttgtggatctttgtggttcctggtatgggacagacatcgctcccttggtgatgaacccaggccagtgcgagctgcgacgatgtgcatccctttctcgctgccatggcattaaccttctcgaatatcgccgcgttcttctcgaggttctctggctggaatctaggtaggctctgaagagaagagtggaaaatgcatattatatttgtgaaaaacaggcacggatcaatgtcgatctatgtattgattggacaaacaaagaatcgatatttaagattttatttagatcgtaattaattgttgatggctgtcgtggttgatctcatgggcagtataatcaccttgcggaaatcgtcgtcaggaagttcatcgaccagtttagctccactggagaagaaccctctccctagcgggctgtacgccacaattccaatgccaagttctctgaaattttcggaacaagaagaaataatgcagtttagaaacacatccatagacatgttctgcttcaatacaagcaggtattatatggtgtggggtgctctctgaaattgtgggaatttccgaactttttggcacgaaattatttgaaaaaatttaacaaattttgattgaatttgaataatttttaactaaataaaaaaaagaaaaatgccaagaatttcgggctagatatttgcgtgctagagaggggcaaaatttccaaaatttcagatcgaaattgcaatccctgcagaccgaaatattcccggttttctagaaaataataatagtagtagtagtactgctccatgattcttacatatataatatatttacctgcaagttggaacaatgtcttcttcgacatcccttgaccacagtgaccactcgatctgaactgcggtgatcggatgaaccacgtgagccctccttatcgtcgacgcagaggcctcagataatccaatgtatttgatcttgccttcttcaaccagcttcttcagctcacccatctgcatgtatataaaagtcagaaatgtaggcttggtgagtgctgaattaatacttatcttcgaagttggaattggtatggaaagtacggtttatttttgttgaatttttcccatcgggtcagctcttcagttgagtcaaaaagataaagagtgtgtgacttctcaacaccaacaggagtacaatctttctatccatatctattaataaacggttttgctaaaaatacttactggccgttttttcagtaatgaactttcaattctatggccaagcaaacgtttgggggggggggtgttggatgggactaaaagtttgtaagtccccgtcacatggacactaattagaagtattaaacatagactattgacaaaattaacctattccataatcttggactgattcgaaacacatccatagactgcagtttagaaacacatccatggacatgtcatccattctccttcaatacaagcaggtattatatagtctcgggtgctctctgaaattgtgggaatttccgaaaatagtaatagggtatgattctcttagtagtttaaaatccaaggtaaaaaaagtataaaacgataaataaaaaggagcagacggtttaaaactaaggttttaaaattttattttatttgcggcctataatatctatattttatttattaacttcggtcaaaattaatatctttccatttctccatgagctatttagtcagcaactatcatgatatgatttatttattattaaaaacacagcgttctaccatcaccttggcgtacgtacgtctccgcatcatatgactatctatataaattcaaagcaataacagtaaattaaaatgcgtgtgctacgtgccaacgtaatcagaagatctctccgcattctggtcagttcttcatcaattaatttactcaaaaagataaagagtgtgtgacttttcaagacaaacatgagtaagatctatatatttatctatttttaaaatattaacttaatttggtcagtaataatccagtatatatcatgatataatttattttttaattaaaagaagcgttattccatcatttccatgtgtccacatcacatgatgactgtataattgaaaactgtatcctgactagaatttctgtatgacaaaaggaaatagttaaaattgtgttgctaagtgcctatatttttttcagaatattcactggattattatatgaaaagttatttgttctattctttgagaaaagtacattttcgcaaaaagctttcaataacattgcttagatcacttgtttttattaatttgttaagtttatttttagtaagacatgtaacttattatgcatataattaatcaaataaataatccacaccaacaatccgcttaggcccggtttagatggcaaatttcttttttgttttcgggtgtcacatcggatatacggaaacacatttaaagtattaaacatcgtctaataacaaaacaaattaccgattccgttagaaaactgcgagacaaattttttaagcctaattaattcgtcattagcaaatgtttactgtagcaccacattatcaaatcatggcataattaggcttaaaagttttgtcccgcaatttacacacaaactgtatatttggtttttttatccacatttaatactttatgcatgtgtccaaacattcgatgtgatgggtaaaaagtttttgttttagaaactaaacatgaccttacaccgttctaatttcaaccaaatttccaatttaagcgtaaactaaacacaaccttagtaaagtatatgtttaaatcctaccctctacaatacaatacataggatctaggatctcgtgatcagctgctctcaccgtgatctcaacgggcaccgtggagtcgattcgatgctggtagtagaggtcgatgcagccgacgccgagccgccggaggctgccctcgcacgccgcccgcacgtacgccgggtcgccgcgcacctcccacgccggcgtgatgccgaacttggtggccacctgcacctgcacctcctcctccgtcgccgccgccgccgccaccgccttgccgacgagcacctcgttggtgtgcggcccgtagacgtcggaggtgtcgaggaaggtgacgcccgcggcgacggcgtggcggacgagcgccaccatgtcggcctccggcttccgctccccgtacaccgccgacatgcccatgcagcccagcccctgcgccgacacctccatcccctgcgaccccagcttcattcgccgcaccaccgctgccgccggagctgtcgctgctgctgccgccatggccggccgatcgattcttgggagaggattgagcggctggtgaagtgagacagctttgctcttccattttcgcgccgttatttatagcgagttttatgggtgctccgtggcgtcagcgagtatgtcacctggtgcctctggattactactcaagaaactaatgagacagtgggcagtggcttggtgtgatagtataaaattatgatagaatatatattggcttggtgtggattactactcaagaaacgtttactaattttagctggtctgaaaatatttttgtttgcttttttatttgaattactactaggactttgcctaacagcgtgattttcattaaaagaaaaaagtattttacaaaaaataattacaaggagagcactgaaaagattacaaaggttataatcaataaaaaactattttctttagaggatctttcattttgcacatatgctgcagaagaactttcttgaacaaaattctccagccttcaaaggaaggtcgctcattccgaaaaatctttccatttctttgcttcaaaatatgctagacagcaataataaaacttccaagaaacctttttgtctgaaacgcaaatgcgctaacaccactatttaaaataaattgagattagaatctcaaagaatgctgagatgccgccaacatccctggctgaaaggatagaagaagaaatgaaattattgttgttgttatcaaggaattctattatcccttgataagcttacattaagaaggtattttcaatatcagaatatattgttgtggaaccagctcgctcacccggatataattcttagatttaaaacgtacgggtgctcgcatttaagtctattttattcttttagtggggtagggtgttcatggtgtgcacacgttatcagcacctccgtctgtaccgtgtttgtcaaaaagaaaatatatatatagcactaaaaaaatagtacattttctgtacattttcgagcctgcaaggtcactgtttctaatatttcttgtgtgcttccgcatcaatcatatatataagaatacctcccttgacaatgagatatattaatttttaataattattaccagtaattaagcggagatagattcactactacaaaacatcaaataggtgtcaccactataggtaccggtagtgctaaaaccagcacctatagggccttttaccacctccacgggtagaaatcgcaaaaaaggcacctttaagtaattataggtgttagtgctaaataaaaaccgacacctcttatattttgtgtcggtttttttaaaaaaaccgacacctataatagcaccccaaaaatcgagccgagccggaaccaagccggcgggccccaccatgacgagcgacatgtggagataaggtctcgctctcttcttcgcctcttcttctcgctctcttctctcccttctctgtctcgctctcttctctcctctctctccctcccttctctgtgccggcagctggccggcggaggccgcaccggcgactgtgccctcccctccgctagatctggcgggaggggaggcggcgacggcaggagggatggcgtcagcgcgggcggggtcgacggcgggcgggcggtgtccggatccggcattggcggccggcggggtgcctcgaggagcggaggtgtccggcggagggctcgaggaggagaggcggcggcaggcaaagggctcgtggaggtggcggcaggcggagggctcgccggcggggaggagcccttctccccgccagatctggccggtggggaggcggcgacaggggcggcgggctcgcggaggagacgtgtcggcgggcgacggggcgatggctagaagacgaccgaccgacggcgcgacgacgacttcatcaggcagagtggggttgcggcggcatgacgatattcttcaacaaggcaagccaccaagccaagcaaaccctctttgaatgttgtgggatttttttattgcataaatttgtgttgcaggctgaatccatctttgaacgttgtgggatgaatgttgtggatccaaatttgctctgtgtgggaggagttcttgcagatgtgggaggatggactgctcggcttgatgcgtcagcttgatcgagccgacacatttcggcatcgagccggcttttttgcatcgtcgaacgtaaaaggggatgagtctgcgggtcgggcggccgatcggtttggagaaaaatcgggcgctgacgtcagcgcccgagttacgtgcaaaactattgtaaactgatttttctcttaaattacttatccaaatcataatccgattgcacctttaaattcgttgcaattaaatcttcgaaacaagactatattccgacaaaaatttttttgcttattattgaattatttttaaatgttgcacgatgttccaccaggtatatcagaattgtttcactaaatagatcgaaaatgtttcactcgtttaaatcgggtgttgtttcaccttatgtaaaattaatgttttagttcaccgcaacatttgatccatacatagtgaaacattataagtacactaggtgaaacatatttcggtggaacaaaaaataaaccgaattcccttaatagggggtttacaaaatatgtgggttttttttgttgcaatggagtatttcaattcactacaacattaggtctatacatagtgaaacattgtgagtacactaggtgaaacatttttggtggaacaaaaaacaaaccaaattcccttaatagagggtttccaaaatatatgggtgatttgttgcaaaagaatattttaattcactgcaacattaaatctatacatagtgaaacattataagtacactaggtgaaacatttattgtggaacaaggggagggacaagtgggtgggtccagtggggtgcacgcgtggggggagggggagcgcacgt

SEQ ID NO: 4457 - DNA, 25000 bp, Oryza sativa
caagaaggttcaagaacgacatggacaaagtgtacaaaggctcagccaaccgacggtcacaaaagccgaacaatacaaattcagagccggtcatgcaaaatagatgctcgctatgccacgaactaggccataagaaaactaggtgcccgaagcgagacaagtttaaggatcgaccgaaaaagcgccgtaggacggggggaggtggtgagggtagcacacaggtgggattggatgacattcatattttttaatgttttaaatttagtttgcattacatttgttaagttcatattgttgcttcaatgtttactttctgttgtcctcctttccgttctcattgtgatttttccatttattttttttttttttgcaattactgatgattccattttcatttgcaggatggagcactttccggggttggaggatttctacgaggagaagcacagggctccccagattgtgagcggagaggttagcatcaacaatattccattttttttatggttgaatttattttttcttctttgatttgattctgtatagatagatcaaccatcatagagatatctcaaatcaaacacacacaaaaaagaaaaaaccccattttttttgttctgtttttttcacactgtacatagagagagatcatgattcatgagcctcaaagcagagcatgtaaacacacacaaacaacaaaaactgatctgaatttgtttgattcattttgaaatctcagcttctctttgtccccgttccagaacgcccaaatctgagcaggaaatagttcgatttccgtatgaagcaggtcccaaatgggccttaaacttgatgagttcagttaagctgcctgaagtgtgacacaacaaatttgatgatattttgtacgtcactgtatatctgttttgcttgggaacacaccagttggacgatctggcagcctggcacaattcatcaaattttatcattttgtttatttatttatttataacgtatgcaaggatgccatagatcttcttttcagttttctttttcctagaaaaatggcgtccatgcaacaaagcatcttaatcagataagctaattttcatatggctaagataatcttgccactgaattaagatgtgctttttccatgactttttttagtacttgggaacatgcttaccagtatggtaagtattagtgctggtttttaaaaatagtatttgagatgccaattctactggtcatacagaactagtacttagctcaagattgctcataatgagtagtagttgcttgtattacttgatcataatcacagagattcctgctgacccaatcccaaaattaaagttcccagttgcttgatatattttccacaacccttgtatatgatatattgtcgctaactatatgttgttatgtttgtctattgatgcagcgcttgaagaccctttgagttagaggtcacacggcgcacatactgttcgacgaccggtacgtcccgtacctacagcgggcgaagctcttggcgttcgtgaccatggcccagcgaccgatgcctctatacaacgccgctgctctgacggccctcgtggaccggtggcgtccagagacacacaccttccacctaccgtgcggggagctgacggtcactctggaggacgtcgccatgatcctgggtctacctatccggggtcaggcggtcacaagtgacacagcgtcagggaactggagggagagggtcgaggagtaccttggtgtggagcctccagtggcacctgatggtcagaggcagacgaagacatcaggggttcctttgagttggttgcgagccaacttcggtcagtgtcccgccgaggcagacaaggccacggtacagcgatactgcagggcgtacgtcttgtacatcttcggcagtattctgttccctgactctggtggagacatggcctcttggatgtggctgccgttgctcgcggactgggacgaggcgggtaccttcagctgggggtctgctgccctagcctggtttaccggcaactctgtgatgcttgccgaaggcaaggcggggacgcgaacctagcaggctgtgtttggttgctacaggttagttcacgcatattatgtttcgtaacatttcaatttcttgctaaaaagttggaagctaacgtatgtgacgcaggtttggatgtggatgaggcttcctgttggttggcccatgtggaggacccatcaggtttggccgcaccaggatgccgaccgacgtcccactgtagctcacctatgggaatcggtcccatctccagtagtaggccgcaggaatttggcctactaccactacacaaacgagatggactatctacagccagaacatgtaagcaattcaccattctatcacacatgaagatggtttcttactatatagtactaaatgtgcttcaatgtgttttatttttgttgctgcaggtggtgtggatgccatatgaggcacaggaagtgctcgagctagaactaaatcccatgtgccatatagaggatgcgttgaagaccctacggtgcccactgatctgcttctatgcagtggagttccagatgtgccaccgcgtgatgtggcagttcgggaggcttcaaacaatcccgcaccgtttctccacaagtgtcgacctacacaagttagtaatttcacttaaaaatttattttgcttgctcagttattttcacatcaacatttattaaatactcgagttggatattttgcatatgtgcagggtggaccgtcggaagaacaagaaggtgactgattgggcttactaccatcaggatcatatcacgcaatgggagaagttcgaggagaatggagtaccagaccagggtcagcacaacaggacagagttcgacgtgtacttggcgtggctccacaggacctaccgtcttgtcctacgtccggcctggacgctagccgacatagcggatgaccccgaggatgttgagaagcagagcgagtacgatactcgtacccgtcaaggtaccacggtcgagacgggacctgttcgcgacagagtggttagttctagcattaatgttgtgacttacttcatttcaacgccataaatgttgtgacttacttcatttcaatcctgcaggctcgagagctcttgcggaccgtcaacgatgcgggagtggcgctaggcacggctcctggctccgaaggagagggcggcaccctccgcaacgccctacaggtaatcgttggaataagagatgaaactacgttgttttcttccaaaatcgataacttaacagggattatttttgatacagagactacggcagcggtgtcagaagttggcaacaaggctcggctgcaggtcgaccgatgtggtcgaacatgctcatgcccaccaagagagggatgaagaaggggaggtgggtgacgaggagggcgagcaagacaaggaggcggaggaagaaggagatgaggaggaagaaggggatgaggaggaagaatgggatgaggaggaagaagaggaggcggatgagctcggtccctcgcagctggaggacgcaccagagtcatcacagctagatctctcgcaactcggcccgtctcgaccacgacgccggcaggctccttcgcaggactggaggtacacccccgatgtgcctcatcctcgcactagaggtaggaggaggtgagtgcatggttcaatggatggatggatggatggatggacttgatgcatggttcgatggatgtatggactagaacttttgcttgttgtgcatgaatggatggatggatggatggatgggatgtttttatttgttatatgtatggagttaatgtatggatgtattgatggattctatggatgtatggaatgatgttggaattgatggatggatgtatggttctctggatatattactgcctgtgaatatattattgcctgtgatgtgtgttgtgtgcaaagtctgactggacagagagcagtcttgctaagttttagcaggactgcaaactcagcgccagggaaaatggcgctgagattttcaccctcagtgccaggtgcactggcgctgaggtcccagcccagccatccagaaggcttgctgggccgggccatggccgattcggccaagtcccatccctaggtccagcgccattatggctagcgttgagttcctagcccgcaagccatccagaaggcttgccgggctgggccatggccgattcggccaagtcccacctcagcgccagcccacctggcgctgaggtccctaggtccagtgccaatgcagttggcgctgagattggccatcttagcgccgatgcagctggcactgaggtagctgccacgtcagctgggggatcggcccggccgccacggtggcacgatatcagcgccagccccattgacgctgacacgaccaacctcagcgccaatgcgcttggcgctgagtcgacggcctatttttggttgaagtttttgacaggggttagtttcgaaataagtttttgaaaagggtcaatttgtcaaaaaaaacggggaggagtacttgtgtaagaactaagaatattgtattgcttcagtttaatacaataaatcgattttgattcgttttcttataattttaaagttaaattaagtctacagataaatgtagtaatatttcttaacacaaaacaaatatattatcagaatatattaaatgttacttcccctccatatttttatgtattatgacgttgttgacattttaaccaaaatttaactattcattttatttaaaaaaatttatgtgattattatttattttattttgacttgatttatcatcaaatgttctttaagcattacataaatatttttatatttacataaaaatttgaataaaatgaatgatcaaatgttgataaaaagtcaacagcgtcatatattaaaatatggagggagtagtatttaggaaactaatttacaagtagtatgaaggggagtagttacaattatttctgtaatgatgcccacacgtaataccatatatgtcatgacagagaagctaattaagctgatcatttttatctctgctacatttgtgtagaaaaaaccgactaggggaatgacgcattggcgacgacaaaggtgcagcaaacaatgctctctctttccttccccttcattgccaagtcagatcgatgagcgccagaccacccactgccagatctaagggacgtgtcaggttcttgatgttggtggagcttcggaatagatgacgtcacgacccgcaccctctttatatttttcaaactagctaaagaaagatctgggtgcccaataaatacctatatacaaaaaaatcatttatagggtgggcctcttaacagatccacctacgaaaataaatctattttcgcagggcagcccgtcctccccctactcttttctctcctctcttaaaaaaaatctaagccctcactactctcccatcctccaccggttagcgacgacaagagcagccgcgatgatgggaggggtggcgatggcagctacaacatgagcttgagctggcgctggtggccccgtgcctagctgattcggtattgtagtgggtggatctgttggtggcggcctcatggtgtgattctggcagtagctcatgtggcgggttctaggcagctgactctgggaggggccaatccggaaatggtggccagcgcttcgaggggtggaggcggtgggctactggcaatggcggcaaagcctgggcgacgacacttcatttggtgagctctgggcttcttgtgggcctcaggagttccaggaacaacgacgatgggggagtggtggatccaccaccacggagcttgagttcaaaagtaggatttcatgattttggaacttttatttatgttattttgtgttttattttgtgaaagcagtcaatataacttaatcgtctgtgaaaatcactttttgcatacaattgtgcagccggcttgaaaaatgctgatttctacatatacctgggttcaggcagttgctctacccatttgcaaaaatgacttttgaccatgtataaacatcaattttcctcatatacctcttcccacgcatcaagcagtcaatactaagggtgtaagtgactaatccacgaaatctacttatggaccaaaataaatcatgaacccacttatttagacttacaagtaggttcgaggtttatccacttgcacgatgagccaccgcatcctcgttggtcaccacaaccgcatctaagttctccttaggcctggtttagttcccaaattttttttctaaaaatattacatcgaatctttggacacatgcacggagcattaaatatggattaaaaaaactaattgcacagttagggagaaaatcacggacaaatctgtttagcctaattagtccatgcatgattagccataagtattacagtaacccacatttactaatgacggattaattgtgctcagaagattcatctcgtggttaatggatagtgtcggtaggagtggtaataaacctaactttttaggttataaaattttgagagttgggtctaaaataaggtgggctcaatttctataatgtttctttgtctaaaaatatctgaggtacctagagttgtgaaaaaacaaaagggtcttgacccattaacatctctaagtgtccagtgtataagttgatggctggatgaaatttagaccagttcaaaaagtttaaggatgtaaaaataaacttccttccatatataaactgcttatttgttactttgtatgctagtggtagtcattagctcacgacaacagttttcagtttaatttcaccaccccactgaatagtcttcccaccaatcacggttcacaaggtaaaggtaacataggattagacatgatagtggttaatttgaacaaacatgttaataacacaaattaaaactggtgatggcaacactttatttaatattaccacacattctgcgtgcaatgcacaagcttatgaaacggcgcttcactcaagtaagttttacgcgcaaattaaacatcacgaaagcatatgacacaacacgctacgcatagatcgacaggtcagctcattccaaatacacgcgatgtagaagaacaggagcaagcaacgcgtctgatgaaacacttctgatgaaatcttgtgcaacgctcttccattttgaaccagctattttgaaccaggaactgtatttgaacagacgaaaatgatttactcggatttccaagacgacaagggaggggtctcagagtcctgccaagtagtgttagccatcatcagaggataccggtcgccatggacattgctagcataagactcgagttcagccatttctgcaggggtgagtttcacagatagtgctgcaacattttggttgaaattctcgatttttgttgtcccgggtatggggcacacatcacgcccctgatgatggatccaggccaatgcgagttgtgacggtgtgcatccttttctggctgccatttcgttaacacgctcaaatatttcagcattcttctcgatattacctggttgaaatctagggataagctgcaaaaggcaccaatacaagttgttagttaattgaatgagaattcattatagttctacttcatttttcaaagactaaatagacgagacgtgaatatgcagcacaaagattagcttaattggaaaaggcttatgtccgatcaatacaaagtaaaaatttctaatgaacataaatgtaatttgctctactgaacatataagtgtaatttgtactaccgaatataagtgtaatttgtactaccgatgcagaagtacagaaaatgagaatacagaagaaggtacatatataataattactcccatcatccaaacaacaaggcatataattatgttacaaggtttcaaaatataaggtctgaatgcctatttaatgatctttcttctcgtttttcctacattaatcattcatttctactccatgtatgagtaaactcataaacaagatttgtttcaagaaaggaaacaaattaatttctgttcttcttattctaaaagacattaacacgacaggtatcacagcattttccctaacccgttctgctattttaatgacctccttcaaagccattcttagggaaaactgagtgattagtaatcatggaaatataccttgcgaaaatcatggtctggtagagaatccactagtttagctccactagaaaaaaaccctttaccaagtggactgtaagctactattccaattccaagttctctgaaatgaaaattagaaaaatagttaaaatgcagcatgtgatttttttttctcaacagacaaactaatttgttttttcaatgcctgcaagttggaacaatatcttcttcgacgtctctagaccataatgaccactcaagctgaactgcagtgataggatgtacagcatgagcccttctgattgttgatgccgatgcttcacataagccaatatatcttatctttccttcttcaactagtttcttgagttcaccaatctaacaatgtgaaagggaaatcaactggataatcttgagaagaaaggtcattacttaaaaggagtgcatggttctcaggacaaaaataaaagatagttcagtttatagacaataattacatgcaacgattatatttgtaaagaaaggcaaaacaactagataatcttgagaagaaagattattacttaaaaaaagtgcatggttctcaggacaaaaataaaagatagttcagtttatacacaataattacatgcaacgattcgaaaatatcaggagtaatagcagttcaggtgctacctcttatgcgctatcaaaaagatatagcacaccaaaatgatgaaaatgcatgtgttggtggatatgttctaataactattgctagtttgtagttaaatattctgaaagaaaagaagtcttcttcactgaagatatattttggttcatgtatttcttcattggtttttcgattgttaaactttgaaatgttgggttggttggtggtggttaagatcccagctattacaacaaccacaatgtgtgttgtaacttcccagtgatatgtcagtgaatttactttatgttctttacccttcaaaatcccacagctaatgtctaaaaattgaaaccctgccctatatctaaaaaaatgcaatacataaagggaaagaaaacattgttaaattatagaaaccatctgtcacatagggagtactgtaactgcccagtgacatgacagttacaatggaagatattcataagatatttttcacgcatttgtgctaaacagagagatcttaaggcaaataatattgtacttcatacctttataaatgtatgattcaaacacttgttatgaaaaaacaaaaagaaatatatgcttcattttgtattacaatgaaaaataatagcttattacaatgaaaatttaatacatgaggttaaaaaaataacgacaaaaggacaggtgccagaaaatggagcttgatttggccttccagaattcaggccaagttgctgccggaacaaaaagtcattgtacaattaaccaaacagacgtaggattttaagggtgcatcgagccgggttaaattttcctcccttcaaaattgacgtctcctacattttgttttattttaacgaccaataccacaaagtgcgatgattcattaaatagaataggaaaaaaaaaggctagcaccctggaaagcagtagctaggaaaaaaaacaacaccaccacgcaccgatgatgcctatataggatccaagaaaaggctagcgtcgtcggactggccgccgctagactaataaagaagctaccaccaaaccgcccaaaaccaaaacctaaaaagtgaacaacacactcaactctatacgtatcaaaaggattggaggggagagggaaccactctccccctcaaggcccaccaacatggtcagcttgcattggctaggtgctgccgcaagcccgcaagaggataaacatctagagagagcacgcgcaagctatcagagagaggtttcagcaggggggcctcctagacgacgtctccaaggagaaaagcgacagaacccaagagggaaaacgatgtccgaaacgccatcacagccggctggcaagaccaggctaggttttacacctgccacgcactccctatcgatccgcggatatcactccattgctccaccaccagccatcctccatcggcatgtggccaatactacaccgaccccccttccacccctggtcagtcagcctcggcatgccttgtggcacacaccaccatcaccggcctcattgttgtcaccgtgtagacctcccgtgccgtcggctgggctagcctccctgcagttgcgcacgccaacctcctaacgccttttgcgccgacccgcccacattgacctctcccaccattgccccgtcaccgccaggcgtgcctcctagcgccgctgcgtcggcctaccaccgccaccagctgctcccaaccagcaccacgcttcctcctatccctaccattgtttccagtacctttctcccgccgacggcacttcacgagcgtgccctctgtcgacggcacgtcgtcgtgcccttactgcctcgccccgccacctccacgcagccgtaccccttcgccttgtcatcgttgctggctcaggagttagcttcccaaggcgaggaggcaaaatccggatgggatgggaccagatttggcagctgcacccctgcggcctccacgttcacgcctccgcatccacgtagccgtgccccgctgtcttgctaccgcatccggcttggggaccgacctactgcaccggggagcccggatccatccaggacggggctggatataggagtcgatgccagatccagtggcgccgccttgccgtcgtcaccccggtccacctaggcatcgacgctaccactctcctctttaacgccggcagctccatcctagcaccattatggctgtcgtcacccggagctagtcggggtcgtgggctccgaccccgctaccacggaaaaggaaggcctcgctgctgccgttcttgtggccgcacggtttatggcagcccgctcgaccctgccctagagagcgacacggagccgttactaataatgagtcttatagtttgttttcagcaacatcataatcctccctccaattagtttttccaatgatttttttgtgtgtttggcgggtgttgagggtgggggcagggggcatcaataaaagatgtctcttgacaacaacctaccaccacctacattccctttcagatacagatggatgtttcacttacatataacaaaataaaagaaagggaacacaaacatagaggggaaggggcaccgaccgtgacctcgatgggcaccttcttgtcgacgcggtgctggtagtaaaggtcgatgcaatcgacgccgagccgccggaggctgccctcgcacgccgcgcgcacgtacgccgggtcgccgcggatccccggcttgccgccggcgaagaacttgccgaacttggtggccagctcaaccctgtcgcgcacgccgccgccctgcagcgcctgacatttcgtcgagcaccttcagcgcgcgctcgcgcatgcacaaattaagcccaacccctacccgagcaatggcggggacacagtggagaggtaggtacgtaccttgccgaggaggacctcgttggtgtgggggccgtagaggtcggaggtgtcgaagaacgtgacgccggcggcgatggcgtggcggatgagcgccaccatgtcggcctccggcttgggcggctcgaaggccgggcacatgcccatgcagccgagcccctgcgccgagacctccatcccctgagagcccagcttcacccgcggcaccgccaccgtcgccattgcagcagctgccattgccacggccgctgtacttcttggctgatgcctatatatatatttttctgctgtgtgtcactcacttatataatgctgcacactgggagatggaaaaatggctatattcaagatgattgaacatttcaattgctgctgctgcaggcaggaccaaacatgtcagcatcgaccaacaactggctcactctggcctgcttctgaattttttgttgacgaataccaccctctctgacagtctgactgactacctgaagaagataagctgatatcctgtgaagcagatagatctttaaatttgcttgtgaatttttgttcactgtaggttcttattttgatggagtgcacatatagttttgacagtggtgcagtagctcatagcttacacatagctgaagctgagtacacttttctttggtttgaatcatatatatatactgcaagatgtggattttaatgcttcggtttcaggggaaagtgaaatcatcccgatatcctctcgtttcgtgcatatcacctaaatagtcatcaaaaaatatgaaaaaaaaattggcaacatagactaatatgaaatatatcaaagtttaaattcaacttctacaagttgtaaaaaaaataataaatatagttgcgaatgtgagataactattttcagtttaatttattatttttgttgcaacttatagaagttgaatttggtcttgtatgtttgtggagtgatatatttcgtattaatctatgttgtcaatttttttcaaattttttaacaactatttagatgacatgcaaacaacgaggggatgtcccctagggataaaaatccacatcccggtttcagatatgtttcagagatatgcaactttcttaattagctggttcttgtttgtagagattaagaaatatagaaattcagacatgtttcatgccaaatgcaggtactccatgtccgagccagcttcctgatataaccacactggattctgatgctacatccgaggcggcaacttctagtcgatggggctccggcactttaaagttacaaatagtttccatttttttggcagaaatttgccatgtgagtatgacgaatttgaattccatcagtattatggaatagtgccagtagagtgatctgagcatgacaaatttgtactttgtcagtatgatatatagtaattgtttccgtgatgccgattggaataatggtggctgctcgcggatggaatctaaatgtcagtttgtttaattgcatgtttcttcgttctgaatgacaatctgaatgtctgaacaagtgccaactgccattgcattagtctgaagctactcacaacctagaactacatgagtgaaattgaagctactgattgcatgagcaatctgaatatactgaagctatattcagatatctgatgcttcatgagcatcatgtgattttttttaatatactgaagctaaactgaaaatgttctgtcttttggactcctttcacacatcaatcaaggtttcacaataattagtactccaactaaatctaattactcaatacttcaattcagaaaaagtacattcagagagaatataatactagtacttcagttttgaaaaaaaaaatatttcttgtgtcagttatttcattgtgtatgtaaaactgattctaatcaaaacactgctgttcaatccaattcaattactccaattcaacaaaatctacaaacttcgctgctcgtatttgaaacgagcaatccagatcatctggcacatatcatgtgggactggtacatgtcagtgagcagtactgcggagtaccctcactcttgaaacgagtgatagagacggtcgagaagagggaggaagaggcagcagctagtggaagtggttggcgagcccttgaggtgttcattctcaacgcaaaactttccggattcccaattaagcttcttgggccgtcgtcgttggagatcatcacgccatcctgcagcgacaactgtttgctgttgggtttcccggccatcaccggcgatctgcggcggcggccaccgcggcatcgacggaaactctgccactgattgcaaaaacatcaacacaccaacaaacctcgatgttagttaaaacatcactagctctcccatatctatgctcccgcctttgttggagtggcgaaaaagtttgttttttttttaatcaagatgacatacgcccatgcattaagattttagaacgtgtctatctacttccaacgaatatttggaacagagaattactcagaaaaagagaattattttttttctaatccaccatgtcggcctccggcattggacgggccgtagaaagcggacatgcccatgcagcccaggcccactgcgttgagatatccggcccctgcgagcccagcttcacgtgacgtgaggcaccgccactgccgccgtccccgagaagccggctgccgctgccatgcatggctggccggatcagtcgatttcttactttgtagtgatgctacctgggctctgcatggccactcacatatataaggttaatgctataacaatgtaactgtagtatgtaagggtattgtttagaagagattaagattctaaaaagctgctggttggtaatcagtttttagaatatagaaaagtcggggttcccagcttccgactttattcttttttggattcaacagctatagctttttaggatctaaacgaaaatgtcaactgtttagagagcttatgattataagagaagttgcacctgccaaaaactttctcaaacagatcctaagcgtcactgcatgggtgggagcaggagcatgtgtaagagcttatgcgtgcgacgtgactcgttttgaattgctaactatcacccgtagggctatcaaaaaaagctcgaggctcgtgagtcacctcagactcgattcgagctcggctcgaactcttaacaagccgaaccaaagcctagctgcaagctcacgagttttgtcaagccaagctcgagattcttatgagtctaactatgtgtgtaaattttttatcttttatatgataagttagtagctcaaggacaaattagtatatattcatgtgaaaaattagtgtattttggcatcatatataactttatcttcaatattattgattaaattttttttactaaatcttatcaacaaaatatacattatcctataatcgatcgagctcgcgagcctaaacgagctcgagccgagcctgcttaaaagctcaaaagagaattaagctcggctcgagctttgtcgagcttgagcccagacgagcaagctcggctcgctgatagccctaaccattgacttagcatattaattgctcctatagttttgggttatacgacaaaaagtaggtaaacctctctttcttactgtcaacgtaaaccagaggcggatctaggaacaaaaaattaagggactcaattatacagtttcttcaacctccagccatttaggaagctttagtttatcattcatggtgaaaaaattagagggggcgctctgcgggtatatatccatgggtcttgtgggtgtaggggaacctaagtccccctgcaccacgttggatccacccctgaacataacagctggaaggaacatttcaatttgcaaagtggccatcctgccttgaattttccatcttagacacttccctttctaaacgatattgcatataatcagttaactagttactccgtgtgtcctgtgtagtctttggactaaagatttgtccctagagtttagttttatagacctcttcaatagtaattttatcgttttcttctcgttatcaaccattgagacactttaaactctgtaaagagacttcttagaataaaaatatatactaaatgactaaatataagtaactgaagacaaatacatataagtgatgacttgggattgagttggttagtgccttgaagataagtatgatttgtgcaattgatcatgagttcaaggattgcaaaaacaagagaaaatattttattttattttattttttcattaatttcatattattgtggtacaatttaatgtatctagaaaatgcctctaccatcttatagacattttataaaatgcctcttcgtttgtacagataattcaccgtaaggcaattattagatatttttttaatatatctctatagtattgtaaaggcattttaaaagtgtctctatagtattagaaaaatgtctctacaaagcgtttttcctgtaataatgttcggctggaaattccacacccatttcctaattaaaaagcaacggattcaatatacctatgttgcagcttcatttgtactattaaaaatttatcccacaaagactatttatagcgttatagcctatcaagttagagcaggtacaatagggttcagatagctggaagaaaaaactccacgtaagcatgaacgctgagttggcgaaaaaagagaggagagagaccatcagttgctgactaatttgccactagtgccacacgcactctaagaaaaaatagtctcaccatttgatctctgcaccatccaaaagtgagatagaaatgaaaggaaagagaagataaagtaaataaagaataaaacattatttatatggagagatgggtaaatgtattagagcctacctactgtatgtacttgcttttatattatatttacctgacgtgagaaggattggagccagcagcgagcgcttttattagacttgctcttaacacatacacatttagttgaagcctagaaaatggtaccaagagtactaaaagcaaggtaatagtaagtaagtcaactatatgcatatgtgaaaaacagagatttattactcaaattaacagactcataatcggtacaatgagcaaataattattgcaagctctcgataaagaacaatctattgttcaacatggtttgggtgttgccagaactgtcattagttaaaactagaacatgctaatttgattcatgtatgaagatcgcatgagtttagggtttatttatggactgctctatgtggtgttctaactagttttaacacagttgagatgaacatatacatgctcggttttcaaataactgaacaatttaactttactattataaactttaaccaataattacttggacataatacacacttaattatcagtgtattttattagtgtctgtaaatattttgctaaaaaagaccgatggtgtcaaagctcgaaagcagtatatattcgctgactaagcagtatatattgagtaatatctttttttttttggctaggagtattgagtaagaataactcctgtcaatcggcaaaacaaaagcattttcgtgtgtatgcatggataaatagatagtttattttaaacattgagatgatccttcgccctttgctttaattaaaaggctataaccaattattgcataggctataggacgaatgactgcgacttacaaattcaccatttgattaaaaacaagaaagctatttaaactatttagaataccaccttaaaaattagatagcaaaataatactcagttgctgcatctatcctacgaagccggccggctgcatggacagataagatactaatataagagtacagagagtacaaatgcttacaaataaattatcagctgagccggctgagagagagttcatgtatatatgtgtgtggatcataaaaagctaagagaagaagagggagcgtacagccttggtgaaaagggtagtaggcgtcgcaagtacttccaccatctaacaactaaaccgcccaaagctgtactctctctcttctccatttagccttcacgatatgatcgtctatcgatctccttctcttagttgctctagaagttggatccctctgggtttatatagcacactagcatcggcaaaatgacactattgtgacgaatccatttattgtaatgcaacaggaaattaataattgcaccctccatcccaaaatatagaatcggatggaactcaacttagtactagattcatcgtaatatgttgagttacatccaatcctatgttgttactacctccgtcccataataaatgtcgctttgactttttgcttacaacgtttgaccattcgttttatttgaaaaattggtgcaaatataaaaaagtataagtcatacttacggtacttttgataataaagcaagtcacaaacaaaataaacaatagttccaaaaaaatttttgaataagacgaatgatcaaacattacaaactcaaatttaaagcaccaagtaatatgggacgaaggtagtatattttatgagggaggtagtaattagttagtcaacatcatcttttttttctcgttcccgccagcacatatatacatacatacggagaaaaagggttggtagagagagcatcattaatgtgtgtaatgtgtggtgatgtggtaacttctaactagtatttaaatattaatataattcatctgttttcaaatacagctagatataaactaggactagataggggtttatactagattgtatttaatctaatagtgttaggtttctatatttatattttaggatggaaatgttatataatatagttacattcacttgttcatgcatacgggtgatacaagttatacttcattaaaaaaaaataaagaattactacgaagtgagcgtaactcaattggttaagtttcttgtggtaaactagcccacccaatttaagtactagacttaatataaatgctcgtatttacggttaattattctttcagtgctagacgacatacccgttgtacctttataggggtaagcgtacgcgcgttgtgaggatatgtatttatattgtgctttaaaaaaataaaaaaatattgtttaaaacattataaaggagaaataatattgttatagcggtaaagtcgtcagcgtgtgattccaaccgtaaacatttctaatcgcttgggctaaaaaaccaaaatttaaatttttgaagttgattttaaaattggttttaagatatttttaatgtaaatttttttaacattatataaaaaatttacgtataaattaatttttattttctaataaaccttttgaatttattagggaatacgagctgccacgaggctctgtgtgtgcatgaccagtttcattgtccttggaaaatataacaatggctagtagtgtcacgtacgcgtgtgatggatccaagttgggcatgtggcatgcagtgcaggctgtagctaaggccattccgtcgtttttcgcgagcctccgggctaacagcagccgtccaaaatggccggccggctttggaattggtccatcaactagctagctcaacactgtacaagccgtaaattttttaccaacctgcactacaccgatcctctgcactccaccgatcctctcctggagtttgcattactccctctgtcccattataagtgacaccgtaagttttcgtgcctaactttaatcgtctatcttatttaaatttttttataattagtatttttattgttatgagatgataaaatactttactcatgacttatgtttttaaatttttttaaaaaaatcttcaaataagatggacggttaaaattggacacggaaaatcatagctacatttaaaatgggatgggatggagtacctaatttcgcattacccaaaagggcatatccaacaacctttgtaatggagataacgatgagaatctttaaaagcacttgagaatctaaacgtgtgtttggttcggaatgagttgagatgggtcacaccaatttatgctttttatggaatggttctattatcttttggcatgagattttttttagagatgggagggtatagccagcatgttattgaaaaagaagtgacttagattagtaagctacttaagcttagttagataaggaaacattcccattcagaaatcaacccatcctacctattctcaaactgaacaccccgaaaaataaaaatgaattcccgtcctatcccatcccaatgttcacatgctaaactgttggcaacagctttttcacaaactacctattctcaaactaaacatccttaaaaataaaaataaattcccgacctatcaaaccaaacacccttaaaaataaaaataaattcctgacctatcacatccactgtccgcatgctaaactgttgggaacagctttttcaccaatagagcaaatagattgaggcatggagttcatagaagcttgtagagatctatttagcacggactccagctcttctggaactagagcccaaccaaacagttttacctctacaaaataaaattggaactggatgaaacactctcacaaaacaaactagaagggtggagttaggtttatactactccacaactccacgactgaagctaaatttaggagttgaagcattctatctttaacaaaaagagaataaaaaaggcatataagcttttattgccggaatgcctatctgtatataaaaagagagcttttgctcaagattactatttgtggattccagccgttcagtatgcagtgatctgttcacagcagctattcgccaccaccagatctgcacccacgtttctgatctcgcacagaagaatttgcaaccaagttgtgtgtatagcatagtaatgtttaccagatccaacatacaagctcactggaccgtaagaatgccaaggcttattccaccagccgcagtcccaggatacagagacatgcttaagcaatgttaacaaatggaggaccaaaattcgaccgaaaaaaaagaagagaaggaacacatatctcgactgtcgtattgataatccaccaacaattgcccaatcatatacactctacatttggagaccttcctaaaagatgtagctgtcaccttggggcttggggaggttcgacaacaagcatccatcaaccaaaaaggagatgagactttggatcaaaacagtatgacaagtatcaatatagctcccaccatgacccactggagaaatgaactgagtctgcttctctcccaagaacatctgtgcctcaaaattggccgccaaaaacaactaggccaagcctgcaaaagaataactcaccgcctgcgatcaccgaatcacaggatactgaccagtgccagtgtcacggattggcaaaactggagaaacaaccaagtaatgactctcttcactgcgcattcgccttttccaacttctctttctcaatttcaacttttctttcctcggcatgttgagctaagccattcgcgagtgcctggtagcggaaatctagagtctgcatcaggctctggaacctggctggatcagatgcttgcatacctgtaacagatggtcactaacttgtcaggtaacttcagccatagtagcatagagtaagcacaaacttgtacaagaatgctgttttaccttggatggtatcaacaaagaagatgaatgggtccacctcatcaattggcgattgcaactcctcatcatcgctaaagtcatcatcagaatcatcatcgtcgtcatcatagtgcggctggaaacctcttgcctaaatcacaggaagcatacaaaaacatgagtacagggtacagcataaacatgaaacatttacatgaaataaagatttgaatttcacaagacactatggtaaaaaattagtctagggaagagaaggtgacactttctgtggcgtgctaaaagaagacagcagcaagctcaaaggccagcagagaacaaaggtgattcacgagaaatgtgaggcgctctaatgtagtttttttaaaaacaaatataagggcccctttccccccccatgatggtgccaaacccctccagaattgattcaggggttggcttagaccgtttagcatacttcatggatagatttacacaattttatagtttaggggacaatagtttacaggtttaaatagagcttctcctttttgtttaactagcttttgtgtgtgttatatatgttacagctactgcagtttaggatataaatggccagcaaaacaaactcaaatacactttgttatatatgcaacaactatgcaatttgggattaaacattgctagcaactcaagccgtatatatatagtaatttagtttgtcagctgtaattgtcattattcagaattcagtgatacaacatccttcatagtcaataaaacataagttaatatttatttaaagggaagtatttgtgttactaactttactagtccttttgttgaggggaaaccagactgaaaacacttgttaccagagaccgtgttagttctattaaataataccccatgaaaaacacttgtagaaaaatttaactattttgagcatctaaataaaaaggaacacatttttacatgctaattctacttaagtccatatcacaatacaaacctctcttagtttctgaagattgacactagatacttcatccccatcctcatcatcatatcccatctccttatcagactcaatatcctcatcttcttcatcaccatcaaatccatccaaatcttcagctgcagcctcattttcccatttagattctgcttatgaacaggaatgattaagatcaggcaaaaggaattttaaagacctctcctctacatcgtaattgcaaaaaggagacataagattagaaaattttctcaggtcaacatgttaacagaatggtatcacagagtttttgttcgaagtatttgaattgtcatatgttcatcagaaaataaacaaaagataaaattgaacctgcaacttgatccttgtaagaaacaagaagctctagtgttgctttgaaaatgcgctcaagagcttctggtggaatgtgattagctggaaggctaattagtgaagtcaatcccaagcaacaaaccttcttatcatgttctctgcaaataaagaaaaataatgtacggagtcagtgcagcataaaaacacaacatgtatagtactacaaggtacaaacatatgctaacaagacctacctcttaaagtttgcccttatgccacttttctttacttgctgtaacatgccaaaccaaagattgaagatttcagtagcaactccaagcttatgcaatgttcccaatgtcaatgaaggattgtagtacagtgtattagctatctgcaatcacagtggaaagttttaggtatacatgtcatcagttagcaagagatacagatgccatgtttgaacaaacatgacactacagtgattagattgatgcaacatatgaatatggactaccacattgggaagtgttaggtaaatgcggccaacaaataatagtgattatatgcagttgttctgatggaacataactgaaaattccactgctaatgactaaattgacctatgatattgatcggccagatacagatatgagtttgccccatgcaacatgaaaacctatgttccttgaagacactataatcaaatggttacatcgctttccacaagctggctactgtgctgtctaagctatccctgctttatccctgctttatccctatgtagaaaaactatccctgctttatctataccaaatgacaccctttttgatcaaggagttataaatgctgtctaagctttaagacaaaatgtcatatgatggataatttacatataattgctcataatttctaacttccgctatcactgggtgtaataaagtcaattcatgtgccagatcaatctaaacaacaaagttttattatccagtgatcctgtcacctgctggagttacatagggatgatatgctacaaactagtcacagcacatgcagagtgtcactgtttggaatgcaatagatatcttacaccaattacatcccatagctatacatagcctataggatttgcaactttctatcattttatcaatatctatctattcactgcggtcaagttgtgcaactagtcagacagagcacaacttgagggcacgaccagacttgggccgcttgagagcaaattgggccggcatagtcaatcagaaagggagataggatcccacgtacatagttagatgctagagccagaacgagagcaaggttagaggaagcagcaagagctacacgctggacattggtgctcaggatgcagttgcccatcactttggcaggagcggagccaggtagagaagcttgacagagagctgcacagggctgccaatggccttcctttccccatctgctccctcttttttcatgagcatgatcccttgtaatggactagtcaactcaatcaggactagtgcacaagtcaacacagggatgactcaacttgactttatgacttatacaactatagtttacaaacaaccatgtatttattccttctttttcatcttgcccaccccccccctccccccctctgttctgacagcaagatcactgagtgcctcctgcagtaggcagaccaacaatcttcctgagggggccatcttggcaactgccagtatgaacatgtgttaggtaaactgtggtgccatggatgccttccaacacctttctgccggttgcagtcgcacctcaccatcgtcctcccatagcccattgacaggctgcaattgttggagcaactccatccccattgcaagcaaataatacagcgtcggcaagattcttcttccccttccccaccataaagcctccatgcattctccagcctacatctccagctcccaccttacacctcctcttagagcgagtacaatagtacaagctggactggtgataggagaaacacgtcagctacagtgatgagctggatgagaggagaggagaggagagagagtgagagtgggcgacaactttatcgctggctccagcaccagcttcgagagaaaagtgatgagtgcagagggagtgagctgcatgtgagaggaagcttaagttattttaatatgatgtgaagttgatgggtcgagcattgcaagtcacttattgtatccacaaggtggatgaaattgacaccaactgcctatgctactattaaccttgctcttatcc

SEQ ID NO: 4458 - DNA, 21674 bp, Oryza sativa
catcaataccaggcttcatcctaaccattacaggcaaggtgttacacgaagaagggcaaacatgcacgttgttaagctgacgcgtggtggacaagaatgaccggtctggcactggtcgcgtcatcgacagacagccacggtcccgcgtcatctctgtcttcgggggaggtgggggtaggtgtgggctgtcccatcagaagggctcccggatggaaaccgtaccgatctccgcccattaaagagaaaaagaacagtccagtttggaaagagaaaggtgcatgtggtatccccttgagatataaaaggaggaccttgcccatttagagaggggacttttcccttttggaaggctgaggggaaaggaagttaatcctttgtaactggtccatacacaaatccacaaaaacacaggagtagggtattacgcttcgcagcggcccgaacctgtatacatcgccgtgtctcgtgtgtcttgcgggcgggtgatctttccacatacagagagagagagagagcttgggattgcaccctaagcccctggtcgaaccggcaaaggggggcttgcgcagtctcccggtgaggggcaacgagctccgtcatctggcgcgccaggtaaggggctcagcgtgtgttttctgagctctcatactcttccgtgtgcaccaagtttcccttgttcagcctaatggccgagcaagcaaaggcgcacgacctctctccgagtgtgagcggcgacgacggggagccaaacccgcgccgtcgagctcgtactcccccacctcctccacgccaaagtcccaagcggggggaggcgctcgagagagtcgaaaaatccgcagcatcgccagtcgcgggtggtgcaggagaacggcgagatggggagcgtcgcctcctcgtctacggcgacggcagcacgcctcaaggcgcgcttcaggctgttggcgcgctcctacgtcacccgcctgtcgtccctgacccggagtctccagcccagcgatggctggacgacgtggccaacttggtcatgacggcacagcaacgcctgggtgctggcggacggtccgccaccaccaagacctccggcgccgccactaccggttccgcgtcgtcaagacggagagcgcggcgagcggcggccgctgcacgccattcggctaccactccctcgtcggcgcctccgactcgggaggatcagcatgaagagccggatgcccgcctcgacattgagcgccgacgtagtgatcggcgtactccccgcgcaacggagggtgcctcttcgtccagggtgtcacctcgacatggacgtgaggatcagccctccgtgcccccggttggtggtgttggctgtagagcctttgtggcgagtcttcggaatgtccgttggcccccaaggttccggcccaccatcaccgagaagtatgatgggagcgtcaaccccaccgagtttctccaggtctatacgaccgggatcgaggccgctgggggagacgacagggtcaaggcgaatttctttcccatggccctgaagggacaggcgcggggttggctaatgaacctgccacccgcgtcggtccactcctgggaggatctgtgccagcagttcaccatgaactttcaaggcacctatccacgcccaggtgaagaagcggacttgcacgcagtacagcgaggggatgatgaatcccttcgctcgtacattcagcgtttctgccaagtccgcaatactataccttgcatccctgcacacgcggtgatctacgcgttcagggggggtgtgcggcacaaccgcatgctcgaaaagattgcctccaaagagccccagactaccgcagagctttttcagctcgcggaccgagtggctcgtaaggaggaggcctggacctggaaccccttcagttccggtgtggcagcttcggccgcccccggatccgccgctcagacagggcggcgtgacaggaggaggaagaaaaggtcggtccattccggcgacgagggtcacgtcctcgccgtcgagggcgctccgcgggccacccgaaaggggaggcctgcgagcgacaaaaagaaagaggctggtactcccagcagggagcgcccagccagcaagtggtgctccgtccacaacacctccctccacgatctcgcggactgtcgcgcagtcaaaaacttggctgagcgaacgaggaagtgggaggaggacaggaggcaggaacgccgtgagggcaagtccgcggcagttccctccggtaaacggcgaagtgaggccaaacagaaggcccccgccgctgacatcgatgacggtgatgatgacctaggtttccaagaacctggggccaccattgccactgtcgacgggggagcgtgtgctcacgtttctcgccggagtttcaaggccatgaggcgagagcttctcgccgcggcccctactcatgaggcgacgcgtcgggcgcggtggtcggaggtggccctcacctttgaccagaccgaccacccaccatgcgttgcccggggagggcagattgcgatggtggtttctcccaccatctgcaatgtgaagttggggcgtgtcctcatagatggaggagcggctctcaacatcctttcccccgcggcctttgatgctatcaaggccccggggatggtgctccagccgtctcaaccgatcatcggtgtgacgccggggcacacatggccgttaggtcacatcgacctaccggtcacctttggtggatcagccaacttccgcacggagcgggtgaacttcgatgtggcggacctcagtctgccctacaacgcggtcctggggaggcccgcgttggtgaagtttatggcggcggtccactacgcctacctccagatgaagatgccgggccccggtggccccatctctgtccgtggcgaccttaaagtcgcgctcgcttgcatggagcagcgtgcggaccacctcgctgcggcgaccaagcccgagggtggtgacgagaggcttggcacttccgcccccaccgccccgaggcagcggattgccacatgcgacgaggtcccggtcaaggaggttgccttgggcgacggcccatccaagaccacacggatcggtggtcttctggatggcaaataggaagacgcgctcgtctccttcctgcgggcaaacgctgacgtcttcgcatggagaccagcggacatgcccggggtccccagggaggtgattgagcaccgtctcgccgtgcggccgggcgcaaggccggtccggcagaaagtgcggcggcaggccccggaacgtcaagccttcatccgcgaggaggtggcgagacttctggaggccggattcatccgtgaagtcatccatccggagtggctggcgaacccggtggtcgttcccaaggcgaacggcaagcttcggatgtgcatcgactacaccgaccttaacaaggcatgtcctaaggatccttaccccctgcctcgcatagatcagatcgtggactccactgcggggtgcgaccttttgtgttttctagatgcatactctggttaccatcagattcgcatggctagggaggatgaggaaaaaactgcgttcattacccccgtaggaacctattgttatacatcaatgcccttcgggttaaagaatgcaggtcctacttttcaacgtactactcgaatttctttgggtagccaaataggacgtaatgttgaggcttatgtcgatgacttggttgtaaaaacgcgcaaccaagaaactttacttttagatctagcggaaacttttgagaacctccgctccgcccgcataaagctgaaccccgataagtgtgtgtttggtatacctgcgggcaagcttctcgggttcttggtctctgcccgaggcattgaggccaaccccgagaagattcgagctattgagcggatgcgcccccccagcaaacttagggatgtgcaatgcgtcaccggttgcatggccgccctaagtcgtttcatatcaaggctgggagagaaggcgctacccttgtttaagctcctcaagcgctcggggccgtttacttggacggaggaagctgaacatgccctcactcagttaaaggcatatctcagctctcccccggttctagtcgccccggagccaaatgagcccctgctactttacttagcggcgaccccccaagtagttagtgcagcattggttgtggagcgcgatgaagacaatcctcatttcgtgcacccccactctgtgctaacttggcccgggagcgagcggggaggagaggcccccgagtcggacggtggcctacggcccctgacgaccggagccggccctctgcccgcttgtcagacggtgctaggtgcccccgaccctcaggagggccccaaggccactgcgggaaggccacacttaacgccctttgaccccgaggctaaccctgtgctgactcgacccgggaaagagcagggagaagaggcccccgagccgaacggaggccagaggcccctgacgaccggagttggccctttgcccgcttgtccgacgatgccaggagcccccgacccccaggacggccccgaggccactgagggaaggccgcccctttcatcctccgaccccgaggtcatcggcacagaaaacaagtgcgcccccaaaggccacttgaacgaagaaccccccgggggtacggcccctagcagagaggatcagccccaccgaagggtgcagcggcctgtctactttgttagtgaggccctccgggacgctaagacccgataccctcaggcccagaagatgctttacgctattctgatggcctcgaggaaactgcgccattattttcaggcacatagggtcactgtggttacgtcttaccccctcggtcaaatcttgcataatcgagagggtataggacgggtggtaaaatgggcaatcgagctttctgagttcgatctgcactttgaaccacgccacgctatcaagagccaggccctcgccgattttgtggcagagtggaccccggctccagagaccgtctcaatccccgaggccagcacgaacccctcgcagctgcctcacaccacccactgggtgatgcagttcgatggttctctgtccctccagggtgccggtgcgggggtcacgttgacctccccgaccggagacgtccttagatatctggtccgcctcgactttcgagcgaccaataatatggcagagtacgagggactccttgccggactcagggtggcagccgggctggggatccgccgcctcctggtgttaggcgactctcagctggttgttaaccaagtctgtaaggagtaccggtgctctgacccgcagatggacgcctacgtgcgccaagtacggcgtatggagcgccattttgacgggatagagcttcggcatgtgcccagacgggataacatgatagccgacgaactctcacggctcgcgtcctcgcgagcccagaccccaccgggcgcctttgaagaaaggcttacccagccgtcggcgcgacccgaccccttaggggagacggatgcgcctgaccggcccccgaggcccgtcggagtccaggcctcgggacccgaagggagcgctccaagctcccttagattgattgcttggatctctgagatccaaacatacctcacagataagactctacctgaggaccgcgaagggagtgaacgcgtacaacgcatttccaaacgctatgtgctggtagaagggaccctctatcggcgcgcggctaacggaatcctcctgaagtgcattcctcaggaacaaggcgttgagcttcttgttgacatccatgagggcgattgcggagcccattccgcctcgcgcaccctggttggcaaggcctttcgtcaaggattttattggccgacagctctcaatgatgcagtcgatctggtccggcgatgcagagcgtgtcagttccacgccaagcaaatccatcagccggcccaggccctgcagatcataccactgtcatggccatttgctgtctgggggcttgatatcctgggaccgttcaaacgggccccgggcgggtttgagtatctgtatgttgcgatcgacaagttcactaagtggcccgaggcttatccggttgtcaagatcgataagcactctgctcttaaattcattaagggcatcacggcccgttttggagtgcctaaccgtattattacggataatggcacccaattcactagtgaactcttcggcgactactgcgaagacatgggcatcaagctctgcttcgcctcacctgcccaccccagaagcaatggccaagtggagcgcgccaatgcagaaatcctcaaaggccttaaaaccaagaccttcaatattctcaagaagcacggcgattcatggatcgaggagttgccagcggtgctctgggcaaaccgaaccacaccaagccgagcgaccggggaaacgcctttcttcctcgtctacggcgcagaagcggttctcccatccgagctcaccctgaggtctcctcgggccaccatgtactgcgaggctgatcaagatcagcttcgcagagatgacctcgactacttagaagagcgaaggcggcgcgcggccctccgagccgcgcgctaccagcagagcttgcggcgctaccatcagcgccacgtccgggcccgatcactctgcgtcgacgacctcgtcctacgccgcgtccaaacgcgtgctggattgagcaaactctcaccaatgtgggagggtccgtatcgagtgatcggtgtcccccggccgggctcggtacggctggccacgggcgacggcacggagctgcctaacccatggaacatcgaacaccttcgtcgcttctacccctgaggagggggggtcgggtgtcaggttttggctcaggccaaccccgcacccccctcgggtgtgtagggttggccgggggctaccacacatgcattacattcttatttctcttttttcaacatttcaatagaagcagtttcaatttcctaaaggttgtgtctgtgctgttctttccttttgaagaatcttggcttaaaataaggtcactcgtactcaaccttgccatcgggggttcggtccggtcagctaaaatcgccaaacggggcccagaaccgagccgtgccccggggcgtggtgaactccgggggggaatcgacaaaaacccacaatcgggtcacccatacccctcggtcaccacgttcccggcctggccagtctcgacatgtggatctccccaggcactagccccgacccgagccattcgaggactgggacttgggcacgagcccttatttcaagctaagacgcaaaaggaccacggcacagatcatcctcatctcgtatgtatagcaaaataaaactaacacaaaaattttttcatcatttctgattgcagattaagttaatttgtacacaaaagaggcatgaaggccttagaagaaagaaaaagaaaaaagtaaagattggcgggggcccgggggctcattccgacgcgcccgagtcgacggcctcgtcaccaccatcgtctgcactgctggtgttgccctcctcgtcggagctgggggcgaacgcgagccgaggggccgacccctcgaagctttggacgatgtggttagcggcatcccggacccgcgcgcgcgcatcgtcctcggtcccgggagggaactcctccagcgccatccatggagagaagttggggtcccgggcctggtaactcgccagcacgagttcgaccgctccccgcgcgaggtccctcgaggatgacttgatggtcttctcaagctcctcggggagttgttcgagaacccaggccatcctgttgaggtgcggagcgaggccttccaaattggtggggggcaccgtcgtctggcctttccagagacccgcttgccgaccggcgcgcttcaggcgggagaccgcatcccaaagcatgtcgggcccaatctcgcccgccaagcgaagggcctcggcctccccggtggaggagtccagcgctcgctgcatatcggcgacggtgtgttcggcagctgcgaggcgggcggctaagtcgctttcgcccgcggccgccccaccgatatgcgccctcgcgtccagctccttttcccgcgcctcgaggtcagcagcccgctgctccagtgcggctctctcggcgcggacgcattcaagattgcggcgcgcctgctcctcctgcgccgcctcgcgaagggacaggctgtccgccagccgtttggtcgtggcctcagcctcctcgagagctcgctcccgctcagcgagtgcgtcctcgcggaggcggagcgcgcactcctcctcggcgcaggcggcctcgtgcgccgccagcgtcgcctcccggagagcagcggcggcctcgcggtccgtcaagccttcctccacggcgccggcgtgttcttccagcgccatagcacgggcctcaagggactcctcgcgccgccgggacgccgcctcactctctgttacccgccgctctcgggcagcggcggagtcaaggactccctgggcggcgtcgagcttttctttcagctccgcctcccggttggcgttttgaaggcggagggcgtcttgcgcctcaatcatcgtggtggtagcgataagggcggccgctcgctcctcctccacctcacgagcgatctccgtcagcgccgccttccgggcttcaagctccgagacgtgacggcggtgagctttacggcccacctccaccatggcgtccaccgagcgccgcccctcctcaacgcgtgcccatgcggcctcgagctccgctcgttccgcgcgcagggcctccacttgggcgctgaacccatctagcaccgcggtgtttgcggcggccaaggcctgcagaatgggctcggcgctcagcggggcgacggaagatgaggagaagagccgccttggagagaaggcgatgcggctcggccccccggaggacgtgctgggctcggggatgtcccccggacccgtttgatcctgggcgtcgcccggggaggtgggcccaggcgatgtgcccgcggcctcgtcgtgagcctccccggaggctgtcgcctgagggttgcccgagggagtgggcccagttgatgcgccagcagcagttgttgcctcagcctggcgagcccgggcggcctcctcccgagcagcttcctccgcttggcgaatccgggcggcctcccgggcggcctcttcagcttcccgaaggcggtctgcggcttcacgccggtcagattctcgcctccgctcctctgcggccgctggatcttcggcctcggactggccggacttggggtggcgggaggaatgcgacgggacatcgctgaagcagaagaaaaaaccagaagacgaacaaaatgagtaagaaaaaacttccttttgggagaaagatggttgcaatgagagtgagacgaacctgcgagggggtcggttgaatgaccaccttggaggggaaatcaggtttccccggcatggttccgtctcccccgtcttgcggagccgtttcttcttgcgctccccctcgggctgcgacgtcggcgcggccccctccgggcgccgactgctggcacgcgccgccccgccccctcggggaggagatgggggaggtgttcctcccagcttcctcttcccctgggcgtcggcagggcggctgctccccgagcccccgacgcggggcccagaagcacgaccccctcctggggcagattgttccccccggcggcgctcgcccgcgccgtcgtggcccttaggggctctctcctctgaggccccgacccccatcataatggttagaatggaggcgcggtcgggatcgctgcagagggggaggatctcctgaggaatgcgagacgcctccacggagctaagattcagcaccctttggaccacgatcttgaagtcctcgggagcccaatcccatctggctccctggtgggtccgcatgtagtcttcaggcccagtgtactcccaggcgctccgggcgcgccgttggagcggcgcaatccggcgacggaggtaatcgccgtacaccatggccccggtgagcccctgggatcgcaggcccgccaggcggtcgaggacggcgtcgtagtcctcccccagatctaccggcgcccgccagctggagacctgcgccgggggctggcttggaagtcggaggcgcgcttcgttggcgaggggggtgtagaaccagtcactcttccagtcgtcccacttcttgcggaggacgcaggggatgtagcggttcaacaccggcccccgcggctggaagtagcagccgccaaccaccgacggcggtgacaccgactgcacggtgaagaaccaccggaacagctgaagagaggggcgcaccccaatgaacatctcgcacaggtgcgcgaagatggccaatgtcatcaccgcattgggggtgaggtgcgccatctggagatcgtagaactccaggacatccatgaagaaagaagaaaatggcgggaccagcccagccattgcgaaggggaggaagaagatggaccgccccgggtagtctggtgccgggcgtccctcgcccagcatcactatctcccgaccggtggcggactccggcatgaagcggcgcggcagtccggcgtgcctctcgctcacgatgcgggaaggtggtagtacactgccgtcgagcagagcagagccccgtgccatggcggtggaggaagagatgattgagaacgagcgcgtgtggcgaaagtagggcgtagcagagaaagagttagagctcaggcggcgaaggcaagaggaacaatggcgaaaggaaggaagcaaatccttttctcgatgcttttatacccttgccatcgctgggcctggctcctcgtttctcgcgcccactacctcgctccctcgtatctcgctatctcgctccctcgtttcccgtgcccacgcttccactaatcccattcgcccgcatacggcgcatgatgtggatatgcggttgtggcaatcgaaatggattgtatcgtgcgcgcgttaattacgctcgccgaccgaagcggcgttaccatatctccgggcgagacaaatctgctcacccagattcgcgcgctgctcaagtggtgtggcagtcttgaatagaccgcccattatggacaaccaaagttaccaataccaatgtgcatggattgagaccgttgggtattttgcccaactacggagaccggtcccacctgtcaccaggctttaggggtggcgtcacacctgaccgcttccctggggaagggaaattgctctggcataacgccgggggctactgtcggtgatatgggaccgggagtatcatgaccagaggcttgaggcagacgcaatcgcccacgtggcctggcaccttcggggacgtcgggcccgagggtgaggtgtccgccctcctcctgatttcccccgagggggggtcgggttgcctcgggggtcgggttgcgcttgccccggccccgagggccgaggcaccccgaccccttaaggaagtctgcgccacatatatgggataagtgagcacagctgtgctcacctaacagcatttattgcagtctggtcaaagcgtgtcacgctgcatgcaacgcagtacagcgcgttcctttatccggtctgtgaccagtcacagaccggtcagatcacgggttaggtggcgactggcggtctgacgcacgccttgccccatcccgtcaagacgaaagcctctaggcactcgtctcaagccggagctagcgtgttatctcttagagatggcacgttagccctggtcagatttataccaggcttcatcctaaccattacaggcaaggtgttacacgaagaagggcaaacatgcacgttgttaagctgacgcgtggtggacaagaatgaccggtctggcactggtcgcgtcatcgacagacagccacggtcccgcgtcatctctgtcttcgggggaggtgggggtaggtgtgggctgtcccatcagaagggctcccggatggaaaccgtaccgatctccgcccattaaagagaaaaagaacagtccagtttggaaagagaaaggtgcatgtggtatccccttgagatataaaaggaggaccttgcccatttagagaggggacttttcccttttggaaggctgaggggaaaggaagttaatcctttgtaactggtccatacacaaatccacaaaaacacaggagtagggtattacgcttcgcagcggcccgaacctgtatacatcgccgtgtctcgtgtgtcttgcgggcgggtgatctttccacatacagagagagagagagagagcttgggattgcaccctaagcccctggtcgaaccggcaaaggggggcttgcgcagtctcccggtgaggggcaacgagctccgtcacatgtcctcaatgttttttttggagttaaccttttgcgcttattccttttcaaatcagcagcatgttctctgcaaaacaaataaacataaaaggctaagcaaaacactttacgccacatataaaaggctatgtcaggacaatacgtactttagatatggtactatagcatcacagttgtatagcacatacctatgggcttgcaatttctctctaccagttaaggagtacactgatggttttcccaatggttttcctactggaggaaacaaagtagattcttgcctactcatgggagtctcaaactgatctggcttgtcattattccttgatggtaggttatgcttggtagggaaaccttccaaatatcgtgaacaaaatgccatacactcatctgccaaatatgattctgcaattgaaccttttggacgcgctttattgcgaacatacgacttcaatttacccaagtacctgtaatatatatacaagacacaaaattaataagttactactatatcatatgacatatgacaaatattataaattgtatactaatatatttaataaagtacctttcaataaagtacatccatcgatagcaaactggcccagcaatcttacattcagtagctaaatggacaaccaagtgaaccataaccgtgaagaatctaggaggaattatcatttccattctgcataatgtgatttgaattgcttcttccaaacggtcaagctcatcaacatgaagaacttttgaacatattccttgaaagtaagcagataagtcaaacaagacggatgtgacatcatcgggaagaatacccctcaaagcaattggcatcaattgttgcattagaacatggcaatcatgtgtcttgagcccatgaatttttccttcggcatagtttacacatctggatatatttgcagaatagccatcaggaacttttatatcccgaagaactttacagaacaattgcttctcgcttttcgacatagtaaagctagcaggtggcaagtaaaacttgcttgaagttctttgttgtggatgcagctcctctctaatgttcatttctttgagatcaagacgagcttggagattatcctttgactttccttctaaattttagaagtgtaccataaatattgtcgcacacatttttttctatgtgcatcacatcaagattatgccgaagaagattgccatcccagtaagataatgtgaatagactacttactgccttataagtttttgacttcttaaaatcaccaatagcatttatttcatccaatactggacgcctatagtaagttataggctctgcactaatctctgtggttccatcaaaagaatttctatcaaaacgaaattcatgattaggtggcaaaaatctacgatgacccataaaacaagattttttcccatgtgccaaacgtttggaccatacatttggaccacaaggcgggcatgcaaattctctatgcaccatatgtgaagcaagcattcctaaagctggcaagtcatttatagtccatagtacagctgccctcaaattaaaagtttcatctctagatgcatcatatgtggaaatgccattgaaaaatatgtctcttaaatcttctagaagtggctggaggaaaacatgaatgtaatctccaggacttttgggcctaggaattattaatggcattagaagattaggttccatcatgcagagccatggtggaagattataaattactaaaacaattggccaacaactgtatgtagagctcaacataccatatgggttaaacccatctgtagctaacccaaaccgtatattacgagaatcagatacaaattgcttgaacctttcatcaaagttcttccatgccggagaatcagttggatgttgaagcgcaccatcctctaagcgctcttcatcatgccaacgtgggagcgatgctgtttctctgcacatgaacaatctttttagcctatcctttattggaaaatatcgtaaaactttgcttggcgttgctttctttctttctttcgttaacttggtttctggctttttacctttccatctagaagccttacaaattgaacaaaaatcatcattaaccttatctttccaaaacagctgacagttattgggacatgcatgaatttgttgataatctagaccaaattttgaaaccaccttcttagcctcataaaagttttttggcaattctttttcatttggaattgccatgtgaaggatatcaagtagatcgccaaatgatttatcactccatttgttcatggatttcatattgaacaaaagcactagcagagataagtgtgatagttcacatccatcccataaaggcttctctgaatctttcaccagcttataaaatgcttgagcttctaaatttggcccatcagtatgtgtacatggtgaatctgcatgatcactcataggcacgtcgtcatacacagtcctaaatgcatcattaattaattcgtgcatgttagcacgcatattttcattgtggggctgtggttgctgattcctagtttgctcctctgaagactcaccatgaaaatcccattggtcataactctggagcattccattgcacaccaaacgatcatagacatcattttttgaaagtagcatagtatgtacgcatgtttcacatggacaataaatctttgtatcctccgacttatctttatatgcaaattcaagaaatccatgtactccagctaagtactcatcagaacctctagggtagcgcaaaagaatcttgatggtttttaaatccattttgacctgtatagaaaaatgatatttaagattcttttagataataacaatgacaaggaattgtctcttctgataattttttgaaagtagcatagtatgtaagccttagtccataaactgtaaaaacaggctatatactacctgaaattaaagaaaagaaaatggattctctcagagaaagtgaacattaagggttaaaatttaccaagaaagaatatatatatagagagagagagaagtgcagcacttaagaaaaacccaggatggctgtagcttgcaagaagatgagatcaagcaaataaatgggacataaatgttctaatttcaaaataactgtatggaaccaaatacgaagtataataaccatcaaacttcatctgccagcagcaagtatctcaacataatcaaatttcatgcactgctatataatgtatatacacacatatcccattcaacttcagtccatcatttttatgaagacatttctaataatttatcaaacaaatacactaatgaaatgagtggagcaggccggggattggactcagaccttagttctgcagcctagccgtagaccaccttcacccgcgtttaccccgtcagcggacgcggaacagatcggggcgctgccaagtggtgagacctccggcgatcgactgcggggttgaaagtcacgacgttgacggaggatcagcgccgggactattaaaggatagagagaatgtttttaagtacaaatgattcaaggttaaacatgagaaataaactatcaaaattatattatcatccataaatgtaaattagtctcttgaaaattcagaacttagttaattcctttaattggaaaagaggcaacataaatgaaggggatcatcgctttggtctaaatccagtgaaaatattgttagcacaaatttatttaaaatcctataggcatggcaatgtagagaaacagattggtaattgttttataaacaaatccagcagcataacatattggtgtaatactttcctactattgactactacctccgtcccattataagtgcagctatagtttttcgcgtccaactttgaccgtccgtcttatttaaaaaatttttgaaaaaaatttaaaaacataagtcacgagtaaagtactattcatgttttatcatctcataacaataaaaatactaattataaaaaaattttaaataagacgaacgatcaaaattgggcgcggaaacttatggttgcacttataatgggaccgagggagtacaactttgcttgattaacagggtagcagaaagtttctgcggcattcaatagaatgctgaatgtccatggtctgctcgtacatggcatgaactagtcagaatatcatgttcaactcaacagctaaataagtttaattggtgtttgcatcattaataatgccatatcatcgaagatcgggcccatcaggtagctatcccatggataatatgctatacgtaggagttcgagagaagcagtagtgcctccaattccaaataccgtcttcggaggctggggttggcagtcggcagcccgacgaacgaggcggcggccggcgtcgctgtgcccggcggcggagggcgacggcggcgcggcacagcggagggggatggtggagcggcgcggtgccggagggggacggcgcggtgtcggtgctgcgcggcgtggcggcggaggccggcgccggcggtgcgctacgacgcgaggaagaggcggagcagagttggggtcgaggaggcggcgctgggttgagcccactgggctatattttgttcacgtatatcgttctgttggttctcattaattaaattactaaatatagtatagtagttatgcctacatataaacacaaagcataacattaccaggttgttaggtgactggacggagagcactttttcacgaatgttgcgtctctgtttcgattaacacaggccgatttgttttttttttaaaaaaaaaactcgcttgaatttttttaaaaaaaaacagctcgcccagtacacagtgtaaaaaaacagctcgctcaattattattattttctaaaaaagcttgctttagtccaaaagtttttacatggcaaaaaaccaactcacttgatgatttcttaaaaaaaacagctcgctagatgtccgaaatgtaaaaaaaatatatctctttcaattattttataaaaataaacaataagtttgcttagtccaaaagtttttacaggacattgagaccattgcaacgcatgttatctattgcaaagtggactcaggcgttgcaatatactcaatctctgcaacatatgttctacaacacatattatctattgcaaattaggctcacccactaataagcgttgttaggctcgcattttggtaacgcatgcttcatgcgttgccaagcatgtattgctagagggggttcctgttgtagtgcggtgggtgcgactccggtcggtggcaagcacgacaaggaggggcgacgagcgcggtaggaaggggggatcggctggcagcgtgtggcgagcggcgagcagcgacgggtgcggctgggtagctccggtcgactacgggtgcagttgggcatgcgtcggcgggtggtgttccggtcggcggtgggcacggcaaggagggtgaactggtcggcggcgagcgacaaggggcgacgggagtggatgggtgcctgtagtcggctacgggcacagctggacgagcatggtttagcgcgtcttctgctggcagcgatcatcgctggcatgagaagttcgtttggttatagtggtaatcagcaaggggcgcggctgggtggccctggtcggtggcgggagcagtggggagggaccgccaccgtcactgatgccgccaccaccgccgtcgctgctttcccggcctgccctgccccccggcggttccttcgccaccaccaccgccagacctggaggaagaaggggaaggaaggggagaagcggctgtggcgaggaggtggcttcgccgacagcggctcgctaccgagctgcactcgtcgccgctggcgacccagctgtgcccgtcgccgccgctcgcaccaccacccacctcccactcctgcgcccccatgagagagataaagtgaagagagagagagaggaaaaagggaagcggagtatgataggtgggtcccataatttttttaaaacaaaatgatgacatgattgccacgtgtatggcatgtaggacaaaatcgctctggattaggtcaaggggggtaattcgtgcggtattgaaagttcagggtgaaataataacaaaaattacatgaaaaaattacagctcataatctttacaaaattagttacaaaaagttcaatcttagataaaaataaagtaaagccatatataacagcataagtacagttaaaaaaggtaaccatacacacgcatacctagtacaattttagacttaggagtgtgcaattttaggctttattttttaatatatgatatcattgactttttcatatatgtttcatcgttcataaaaaattacgtaagtatcattaattttttttgactttagaagagcatgtagacttactgtaagaaacatatttcttaatgaatgagagaaaaaaaataatctgaaactaaggttcatggagttttccatacaagcttaacccgattcaacaaaagaaatatatttttagtgtagtcactagtagaaaaacctcatagatatctgttccaagaccagcaccaatataattaatgaagctagctagtgatggtacttgtaggtgcctcttatatatagtaatcaatatgtgctggtttttcctagtacatatatgccggtttgttataacaaccggcacctattactccttaaaactattaattggtgccgctctgtattttaaaccatcataaatggtgacggattttaatttgaaccagtcaatgaggcttagatggatgagaaattggtcatatttgtgctggttttaagcgaacatgcatgtataaggacgttacatatgtgacgcagtgtattagtgaattattaaattaaattagatgataactagaaaccaattagatctctccttggaagtagactttttgattagtagtatatggacactccagccaatcatttattaattcaacacagtgggattgttgcgcacagctccctccagtgaatcaccaatcctcgactccctcaagtcactactctaacaaccattgtgcgggttggtataatgtttctttcttttaactaatcatgctgaaacttttgcatcgttttgcctgaaaaaagtctgcattaccacggagaaaagatgacaaaataagacaatatccataattccatatatagtcctgccggcgagcttgtcaatcaatcccttaattcatcaaatcttgacgggtcccctatctattaatctcaagccaacagataaattaaaatcacagataaattgattgggccacgttttgtccctgacatcacagataaattttgaatttatataagaagaaaagtataaatctatagtataataatatgagatatatcacattgatgcgagtggatagtcatcgagaaaactctacacaacacataagccatgggctcatggcccgactcaattgatgttagttaggccaaataggcccattcagcaatgtaccatgaggccaagttttaacaaaacacaagaataatttgtagaataataaaaatattctatttgaatgctagaacctattcatagaaatcataggaattgtcgaaactggaatttggcaacaataaacggggtagcgcagagacctaaaaatggatagatgcggagataatggtttagataggttcaggccctctcgatgagaggtaataccgtacttctgtttgaggattgtatccgcgagttatgtattgatttgaaaatttggttgtggttatgtgttcatctacccttgagagggcccctgctcgtcttatataggttgggggtggggcagggttacaaagacagaaacctagccggacacggcattagtttcctaatctactatatgttagataatagagaaatgatgaaatgacttggattgaaatattatgaaaatgatctagcatgtgtatgtttagttttagaatgaagtaaattgtagatataattactatatgtttgcatgttaagccttgtgtgtttaatgggttgatgtggcatgcttgtatgtaggttttaggagtgctaataaatacaatacttgcatgttttgctttaggtagtacccggttgggctctataccatgccttatgatacaaggcaacatagcaaccgagtcctactctataacataatatatgcatcctgcccacctcatatctcttgtcgaatatgcactagaacggataccctcatctcaattgggtggtaagccccatctcaatcgggcatggcgtccgtcacaggctagaagtcactgatgtgaagagctatctcaatcgggcaaacggccgtcacggatgattctatctcaatcgggccctaagtaaagcccgtcaccgatagctttgacccagacgaccagtcaaactatatgacctatctcaatcaggctacaactagcgtccgtcacagatgacccttatctgtgacgggcattaattatagcccgtcacatatgagtcatctgtgacgggcattaacctatgctagagttaatgcctgtcacagatgagtatattccaaaaataaataaattttattttttggctagccctcactcgtcacttaacgtcaaagttctctagagattggcttccggaaaagtaattgtgacatgttggtatgagtattctattaatcctattatgccctagtccaggatgtcaaattgggattattaaatgatttcaaatggaaaagtcaccaaaaccaaagttgtagaactcatcgaggtgcaaaatttttattttggtaatttctccatctgactctatttaaacaatttgaaatttgaaattcaaagtttgaaaagttcaaatagaattttagatcagtgaacgacttcaactgaaaaagtcatcaacaacaaagttgtataactcatcaaaatctataacttttattttggtcatttttctatataacattttttgaaccgtttgaatttgaatttaaaaatatgacaacttcaatcaacattttcaaatactaaatgatatcaactgaaaaagtcatcaacaacacggttgaataactcatcaagatctaaaacttttattttggtcatttcttcatacgacaaagtgatagtaacattgttcacaaaattgacatatctcttatctggttttataaactataacacatatatgtaaaatttgtgaataatattactaacatttcgtcagatgaagaaataaaaaaaataaaagttttagatcttgatgagttattcaactttgttgttgatgactttttcaat

SEQ ID NO: 4459 - DNA, 12505 bp, Oryza sativa
acccccaggcgagcgatcgccctatagcatttccgcttgctactcccttaatacaacttcttccaccgctctcgtgccacgcacatcaaggcccctctatagatccgagtacgagtacgatagcagatggagttatttggcttgaacggtgtggacaacgcagggtgtgccacccaccacatgcgagtatgccctgggcttctaaccatcctctacggatcttcctgcctgtagtttatcaatgtggatatagggcaggtaccttcctcagcaagctcatggagcctaccatcacctttgtatagcatcgaaacataagaactaagcaagtcttaccaccaaaaaccaaaacttttagcggaaaaagttaccctcaagatctgaaggagattggtctgaccagagtaaatcagccggtccaactgtcctttgtggtgccaacgcctatcgccatgcatcgcagttctgaccggaatagatcggccactccaaccatactttgcaccaccgatgcttgtcgccgttgctggtccaacaacccattatgccaccggtgttaccgccgaacccgagcaaatacaaatcaaagaactctattagtgtttacaaagtgcacaacaacactcatctctaaaaaattgactaaactcgaaaccgtaactttttctttcaactcaactctcaaaaaatcgataccgagaggtctcaaccactcttctatatatatatacccgaagtagaagcctaaaagccacgaatccaacttgtacaagtcatcctaatccacaaggaaactttcccatataaatatgtaacttatctcattacaattcaaactctaatcttctcaaatttggcctcctctcaaatttgactctgctttccatacatacacaatctcccatcatatgtcgcatggaatcttcaccaaccacgcacattgttctttagcctaagcataccacatgatatcctgaatgttcggacgtcatcttctcccaagttgactcccaatcatcactaacaatactatcccgaggcatcaagacacacctacacatgaatcaaagaagaaaccatatccgagcataatttttttcccaacttgactcaacattagcacacaacagtattacatatatatagaaatcatccagaagtcataatcatgaaataatcatgagtatccaaataaacaacccgaaaccaactccaaacaggaaccagccgattagaccgtcgagctagccagtctgatagcatgctatacgccggtctgactggccttctctacctagtttgaccggtccaacacagtcagctcaccaattattcaccaaatattaaaatcaattatctcatatgtcgattattcatgacaaaataaataataagaaaaaacactttgatttcacacctcatggatcggaggccatccgccacctcttcgatcctccgtgctcatgttgcaaaagggaggtggttgaaaggagaggggagaaaaaggccttgacatgtgtgccccatagaattttatttcctttgacttaattgatacatgagccacataggattaaaacttcttcgaattgagtaagagggggtaattcatccattttgataagttcggaaacgtcggacgtccaggtattacagttaagggcgtaaatcagactaccaaggtttatatgttaattcagacttttccttatataaatggcttgtttcttttcatacaagttttcctgcagcaacgtatatataggatatcataatgttacatgtgcatcacgaaccaaagatgcaagtagagcattgtaagcagcagcaacgtacagcacatcgtcaagttacatacacatcatgaaccaaacatgcaagagcaaaccatagcaaacaagaatatatattttcttccgctattcatgtgcaaccaggagcactacttcttgaagagagacccaagcagctactcctctttccatgaggacaacggaggggtctcacaatccttccaggtgttggccatctgagcgtaccagtcaccgtgcacatcagcagcagcagcgtaggattcgagctcagccatttcgtcccgagtgagctccagggacagagccccaacattctggtcgaaattctcgatcttcgtggtaccgggtatggggcaaacatcgtcccccttgtggtgaatccaagccagtgcgaactgcgcagccgtgcatcctttcctcatcgccatcgcattgacgcgatcgaatatcttggcattcttctcaaggttttctggttggaatctaggcagattctgcaacaagtgaaaggtcgtactcagcaaattaagctgccaattgattgctcaaaggagtttaaaaaatgttagagtttttgtcaaaatatttgtacgtagtcggttatagtttagaacttggagttgtaggaggtaaaagaatagagagtaagaattagacgctattatagactctctcttagatagagagacgaacatgttgtaaccatatgatgacttagcatagccgagaaggagcggctgcaggtggcatccaaccgatggtcattataactctagttcactgtaatatgttggatcggggaggggtgcacgtaaagtgcctcgaagatgtaggcttcggctgaactccattatcaaatatcgtgtctcggtgtcgtcatcaggtgtttctttcttgtttagccatcaatgatgatttcggggctggtttgtaacaaaaaagtttcatgatttcagacctgtttttgaaatgtaaagcgttcggaattgttttagaacttttcaataacgaaaacaaatttggaattattttttcttggaacggttttggatttgttttttcctaataatgtctactgtctaaaaagatgataagttagatttgacaatgtgatctctgaactgtggtattatcttatgatagtgctattttttgttgctaaaatttggaaattttatctgttgttttaaaaagatttggaagctcattttgacagttttttatattcccataaatattagttaccgtattcgcttttattcatattcgctccattttttatttgataatattttattctgtatatagggatttttattccaattttaattcctaaaaaatatgaaaatgaaaatgaaaatggtagagttggttttctaactgtttccatccctataggagaccgcttaaggaagtcataaagatcatttctattttcacggccagccacttgattttcacgggtgggtgctagcagccacttgatttttacaggtaccagtgaccacatgtggtaacacgattttaccctgtacgaaaatctgtttatttacacaagcagctccattcagatagctacccatgtccacgacatttttcagacattgctcttaaatgcccgcctatgtcttgtcttttctactattgattatcatgcgaactcctcacaagacgaaccatcggatgccaatcaagcccgccactaccacactacgcctcctcacctcccatgccatgtctattagagagcaatgagaaacctctccataatctcccaactttttccactatctacgacaataatgtactcgtcgcgtcagccgtagtacatcgccattagcgaggaggacaacaatgatatataggagcatggggacatctcatcctccttatcgtcactggccgtattgtcaggcgaaattcctggggataattagcatagcgaggatgaccggtggtacaacaggtcctatcaaaggactccaacgagggcccactatcgctgaaggaatagaacgaggacaaaagtggcaacgaggctgacgactcggatgagggcagcagaggcaggtgcgaagaaagagataacctccttgatcaccatggtcatggcggcgatggcagcctatgaggatgacaccatctaagaagaggcacggctagagccgatgccagaggcatacccaacatggctgaggtgccgaagctgatccccagcttggccaaggtgcaggaggagggcacctatgtggctatggcaccataggatgaggcgaaggatgggccactggctagagtcaagcatagccgtcaacagaagcagagattgaggagaatgcatggcccttccccattgcgctggccctatcgcgagctctgacactgggctaactgtcaacgtttgatccacaacgatggtgaagcgccgccgccacaactaattgtacatattatttttttagtataggcccaaagtacgacaagtagcctcagtagtatgtaattaggggcaaatttttgatttgtattatagtactgtgttttctaggttaaatcttttgtagaaattgaaatatatgttaaatcattttttcatccaaatcaatatatattaaatatttcatctaatgtagtatccagagcatttgacaggtggacaatttgttgtctcacttaaatgtggtcccaactttttcccaagcggctttcataagccactgcatatgaaccaggtctacttgttattcaaaatttcataataattttatatgaaggctgattgaaattaacagaatttcagagtgatccttgctacaattcctttagtttaattcagtcaataactctttcaactacaaacttagtagggattaccactaatatcatgatatctgacaaattaaagtcaaatggtatgcaacatataacgatagtaagtaaccctagtaatgcagatattttaatgaagaaacctaacatagctggaacacattacacatgtgtagtggggatcatagtgataagttgtttatctcaatcagagttcatatgaatttttcaaatctttgaaaattgttatcgcaggcggcgacttgcatccgcttggaaaaattatattccaatgcagatatctgaagacgccgcctgtaaaaatgatttagacataataaatggccaagagtgattcaaagctctaactccatgaattggaaaatataatccgaaatcgtcaacgccgccactgttgcccactagatctgccaacacagccgctgcccaccagatttgcacttgtcacgacatgaggccatgacgggataaccaacgctaggaggatagccagtagcgtcggctactgcagaagggagcgcatccatatctaggtgagtgttgtcctgttggatctcccaccatcaccgctccacatccaagtacgtcatcctgtttatccgacggtttgtccggtgatcatgtggtatgtattgttcagcattttttgcagtcccacatttcatgactaccttgtctgatagtccacgtttcgagaaaactgagcgagtagtaagcatatgataatttaccttgcgaaaatcatggtctggtagagaatccactagtttagctccaccagaaaagaactaaccctctaccaagtgggctgtaagctactattccaattccaagttccctgaaacagaattaacaaacaatagttaagatggagcatatgattttttctcaatagacaaactaatttgttttcttttcactacctgcaagttggaattatatcttcttccacgtctctagaccataatgaccactcgagctgaactgcattgatagggtgtaccgcatgagcccttctgattgttgatgcagatgcttcacataacccaatatattttacctttccttcttcaactagttttttgagttcatcaatctaatggcatccacaatgtgagtagaaaccaagtagtaagtattaaatatcaccttattacttggtagtaaatattttaaaggtggtatactaccggatggaaggaaaaaacaatcttatgtgaacaatgtctccgacacacccggtcacaatgctatcagcaatggataatttttttctcaagtggcccccaccttattcatcacccgtacacataagcattgcagatgcagtaaagacctactacccactattgtttgggcccacactgataccgagtttagtaagaaacattgagcatgctctaataatgtgaaaggactacaagataattgagctattccactaaattatcacaacaaaaaataattcgtgccaatatattgtactattgcaacgataatttttctgtgacaaataactatattttattgcaacgacttaccatcattgttttatttagtatttttgttgcaatagaaaataagatattgccaaaaaaaacattaccgttgaaaaaacatgttctatcatcacaattttaattttgtggcaatttgcatagtacatggctgtggtatgttactttttactattttctattgccacgatcaacaaattcgttgcaataaaaaattgtcatctcataatttaacttatttttttcatatggacatggattagaacaaattttatatgaaagttatagctctcaacgagatctacaattttataggtgataactttttcatttgaaatcttttatatatttaaatccgtgattcaaatcttagttagatatgctcaaatggaacgatatgcattttctaacagaattgatgcgtaggtgagttggtaaaggagagcacacgtgaaggataggtcttgtgttcgaatcctagcaaagacaaggtatcaaataataaatagttatgatgtagaacaaaattagttaatatttaaacttttaatttagtatgtagaactaatgccacatatggagtggtggcaataattatttattacaacgatgtgaagtgttgcaatataattttttggccacatccattccgtggaaacatcaaaatttattaccgctaaataaaaatcgttaaaataacctattaccacgctatttattaccacggctagtaacgattttaaaattgtggcagcatgtatctatcgccacaattttagtattgatcgatgccatgatttttttcatggcaacaaattatttttctagtagatcaactagataaacttgaaaagaaaggtcattacttaaaaggcatgcatagctctcaagataaaaaaatacaagggaaggtagtgcagtttatacacaataatttaaagcaacaattcaaaaatgtgtgctagctcgtatgcgttattagaaagatatagcacaccagaatgatcaacacgcatatactgtggggcgtgttatagtaattattgctagtttgtagttagatgttccaaaaggaaaaaatgagtccttcaatcaaagttttttctttcccgaaagaatatgaaattaattatatagtgaaatcgataaataatcaaatgctccttttttttgctcttcattaataaaagaagagtaaattgcactcacggtgcatcaacttagcaggtgggtgtaatttggtgaaaaaacttgagaaatgagcgttctagtgcaacaacttggtaggtaggtgcaatttagtataagaactttataagtaattatataaatgtaacaacttgtaaggtaggtacaattttgatacaataaattaagaagttatgagacaacttaattatttggagattttttttatagattcaatttttaagtacttattttgataatatactagcgtgtatttgtataagcatatttatatttttatcctaataactaattactaaaagtcaattaaactggatgtaaaaattattatatttcggttgatatttgagaaggtgaagaaaaaaaaattcttaaatgttaattggatgtaaactgtatgtgcagtataatttttaaagattaaatctaatattataaggtaatatatgtaggattatatgttaatgatatattgacatcgtgaaaaaaaaaatcaactagcatatgcttagccaagttgatgcatcaaaatattaaattgtcaagttcttgtactagaacacacccacttgtcaagttgttacacttatacgttcatttctcaagttctcatactttatcgcacctatctaccaagttgttgtaccatgagtacagtttactcataaaagaattaagagttaattatccgtttttccaacaactgtccgaataattatgaaccttgacaccaaccatttgccaaacccttcaccaggccaccaccaactttccctttcataatcagcttttcatcactcacccgtttatgtttctcataacaaaacaataaacacaaaggcaaaaagaaaaaagaaaagaaaagaaaaaaacagaaagagagacctgagaaagggaaggggcacgcacagtgacctcgatgggcaccttcttgtcgacgcggtgctggtagtaaaggtctatgcagtcgacgccgagccgctggaggctgccctcgcacgccgcccgcacgtacgccgggtccccgcggatccccaccttaccgtcggcgagaaatttaccgaacttggtggccagtgcaacattgtcgcgcacactgccgacctgtagcgcctgccttttttccaacccatatgcaaacaagcattccgtcgagcaccttcagcgcaccactactcgcgcatggcgcaaatcaacccaaagaaagagagggacaccagtggaaggaagaggaaggtactatacgtaccttgccgaggagggcctcgttggcgtgcggcccgtagatgtcggcggtgtcgaggagggtgacgccggcggcgacggcgtggtggatgagcgccaccatgtcggcctccggcttggacggcccgtggaaggcggacatgcccatgcagcccagcccctgcgccgagacctccaggccctgcgagcccagcttcacgcgccgcaccgccgccgtcgccggagcagcaggtgccatggccggccggaatcggatcgatcgatttccctccactgtacatctgtacccatataatgctgtgcgatggcaactgcgtagttgggaggagtacccttttttttgacaaattgactctttttaaaaacttatttcgaaactaacccctgcgaaaaacttcaaccaaagataggccgtcggcgcagcgccaagcgcatgcgcttggggttggccgtgtcagcgccaacgaggctggcgctgacatcgtgccaccgtggcggccgggccgatcccccagctaacgtggtagctacctcagcaccaaccacttcggcgctgagatgccaaagttcagcgccaacgggtttggcactgaggtttggtacttagaggccggccgaggccgccccagccagcctctcctctcttctccccaccgcggctgcgctagggttcgtcgccctctcttctcccctcaccaaatctcccccaaatcaactcaaatcgaaggggatttcgtcgggattgagttgaggatcgattgagaaggtaaactcctctagaaaccctaatttcccccatgttttattggatatttcgcattgtttggttccaaccgtgggttgataatatttggctccgattgcgatgttaattggataatgtgggtggggatgtagtgcggaagacacatattaatcttgctccatttggttcatgtgtggtgatggttagggctttgttggattgttgtgtggtgattgaaatggttgcaaggggttgatttgtggtgatgtctaggcactttgtaggagaagagaaattttttttgtgaataatgtgtagtatatgagttgaaacaattatgttatgttttatggaaaaagttggacatgttgataggtttggaagttttgggattgctatggtatttagagattattttcaattaattaatgtttatgtatgggttaaatattgtagatggatagattggtccggcttcattatggtggttgtgtggtagatgaaagtaccggtggaagccaatttgagggaatgattgttagacagttagtgtttcatgcgaagcctacatttgaggagttaatgtctcgcattaagcatgaattggattggagtgatgagtcagttggtatgcaagggagatacgatgtgggcgccggtgtcatgttgcataagtttatgttagacttgaatggagagatcgaatggcaaacatatatagatatagtattggggtcacatttcaaagctcttgaggtgtttgcatggaagaaagagggtaggaaagggaagaaagaacttatagacctgaatgaaagtccactcatagaataacccattagttcccacgaacagtcggagaggtgtagtaggaaggaagaattaattgaggtggaggtgggcgagggagtaaatgatacagcggatgtagaggtcagggaggaagtacatggggaggagaatgtcccggtaagggaggaagtacatgtagaggagaatgtgccgttaagggaggaagcaaatgcagaggacaatgtgctgttaagagagggagttaatgtagaggagaatgtgccggtaagagaggaacgagatgttgacgatggtcgggaggtaggtgatgatgtggagttgcctgaggaagaagcgaatgctaaggatgtaagtttgggccttagggagttggttaggctgaaaatctatacccgacaggagtgtgaggaggttatgatacgcagtggattgaacccaggctgattggagtatgatacagaggatgaattggatgagtccgcttctgactccgatgatgatcgtccagtgcgcaagatgtcggagcatgaaaggactgtgtttgagaaactggtgggtagaaacccggaaataacacaattcgaggatcttacaagagccgggctagcaattgctgatgaagatccacaatatgacggtgccttcgaaccaatgtgtgatgaaccaaggaaggggttggagttttgatcaatggaagatctgaagatatggctgcagagttattctatccgtgtccaccggccttaccatgtcaaggaatctaacgcgtcagtaaagtatactgtggcttgtctcgatcgccgttgcaaatggcagattaatgcaaggaagagtggaggagataggtggcgggtgactagggtgggcgaagaccacacatgctgtagtgcggaagtaaccggcaagcatttgcaacttacttcgaggtttattggaaataggttacaggcatttgtgcgagctgaaccaactttgtctcctgtagctattgtcgaggcagttgagcaaatctggcactatcggcctacatatggcaaagcttggcgtgctaagcaagttgctatgaaggtcatttggggagattgggacgaggcgtatgttcgcttgcctacactgatgcgtgccatcaaagcaaggaaccctaccatgagtttccgtgttgaggctcaccccgagaagtcaaggatggtggagggagtacagaggcgagtatttggacgtgcatattggatatttggccagtccatagaagcattcaagcacttgaggccggtgctagcaattgatggcactttcttaaccggtaaataccaaggtacattgctcatggcaataggggtcgacgcatggttacatcttgttcccttggcgtttgctctggtagagaaggagaatacatccaactgggagtggttcatcaacatgttgagacacaagctgatcggtcctaatagagaagtgtgtataatttctgatagacaccctggcattttgaactccatcaaccacaacatgcctcatcacctaaccattcaccacaggtggtgcatgaggcacttctgtgctaacttctacacagctggagctacgactgatcagatgaaagatcttgagcgcatatgtcaaataaatgagaaagcattgttcctagatgagataaaacggctattgggtgtggtcggagagaggccaaagaagtggctagaagaccatatggcacttaaggtcaaatgggcaagagcatttgataccaacgggcgtcgccacagcataatgaccagtaatatggccgagagtttcaataatgtcttgagaggcattcgaaaactgccggttacagctattgtggcatacacattttcgaagtgcaatagttggtttgttgatagacacaaagaggcaactgtagatatcctgagtggaaagaagtggcccacaaaagttaaggacatgttggaggagcagcaaagacgaactttggggcaaagaacagcatgtttcgatttcccttcgatgaagtatgaggtcagcgagcaaggcggagtcacggcggctggggtgcaatggggtggacgtcactacgtcgtggttgcgagagataacacatgtagttgtcagttccctcagctccatcacttgccatgctcccacatgataaccgtttgtaagttgcgaggtttggatgtggaggtggccccccgaatgtgttatgaagcttccaatagggctgtgcaggacacgtactcccctaggtttgaaccttacctagatccatcgcagtggccaagttatgatggagagttcttcgtttc

SEQ ID NO: 4460 - DNA, 59062 bp, Oryza sativa
cccaatccgccaagagaatccaacacagccttgatcattgtcgacagcagacaaaggccgcagggacaaatcgctgagtgaagaatggaggggagcagctgacttgtggggaccacatgggtaaaatggacatttcgtaccacccatttgcactggcaggacttcttgttggcacttggcacgccatgtcgatgaaagtggcgaaatataaaaagttttgtctctctctctccagtaactaaatgtaatactaataacaaataggagaggggtatatgggagattttacaaatttaatagtgacaaattagttaaattttccgatgatcataacactgctcatcaacacttaaaaccgcacagtacgtatcatactatcttctccatatgttcaatagcctatgacaatcggaggataattaaaaacattttggtttgaacaaactgtactattaaacatgacatatggtttggtaaaaaatacgatatgtcattgcttacttgtcttcatacgtattagagcacaccaagcttcacctcggttagtgagccagcagcatgtatggtttggttagggccaggagttcggccatgctgggccttgggcctgttgggcctactaggctgcgcaacggtgtaaatgggccaatagagaggaaagcgagctgggctggtctggaaaaagtgggccggcctgtaagagagaatgaaaagatgtcgagggggttggatcaagggagtggatggaaagtatgggccagtagagaagaaagaattgaatgtggcccaagtgtgatatcctaaaattaaatttgggactttctatcatagtatagtgggccggatgtgtataatttaaatttgctgtcatacaatgtcccatggcacataaaagtgcctccctgagtccctgtttacttcgtgtagttccctgtttatgtaagtatagtaatccttatggaaggtagttctgtaaactacactgtaacttcatgtcttaactcagttaaagaaattggatgaaatattctaactaacgagctagcttttccttatcatatcgaggctgtttgatctctcatgtatgtcaagcctgcggtcatgcatgtcacatggagcgtgttcaacgaaacacatgacattcagcccaggaaatcaagcagctaaacacattgcgtgtgtctccggttctctccctttatatgctacccaatctctagctttatataataaaaagaattgaagttttattattcttattatttggctgtgaaatgagatatttgagagaaccaagcatatcaaagtgtccttagcagggtatggaaaacattgagatgatcgcgagaatactcaaatcatccgtaaattcgagttgctcaaacacaacagcttgatcccaaatctcacggacaagacgtggaattcttcttaccaaatccatgaattccagttgctcaaacacaaatcccaaatctcacggacaagatatggaattcttcttaccaatactgaaacatgtggaattttgctcaccaataccaaaagaggcgtggatcccaataccaaaagaggtgtgtacgttctattgattataatgatcaaaatagttctattgagtataacgatcaaaatacaaatgtgtttattgaacaatgcggctgaataatctctgctgaaattgcaagtagcactagtgcagagttatataatagggatacaatatgcctactcgagaagaataacccatcataccagaataattttctggataattcaaattcatcattattttttatgatgggacaaatgattataccattctattcttttatgttttataaagaaaacctcatttaaaacagaacatggatttctattttcaccaaaatctaccatcatttttgataaaaaatgaatgctttctgtattatctgtactactttaaaaaaatgcatagtggttgaaggtaaagccaacgtaaacacgcgaaccaatatagacacatgaccttaaccatggcatcagaaatccatagttggcgagaaaaaaacggcgcccccaatccctctctatctcccccacaccctcaccccgccgctgccgcctctatacctcgacgcggcgccatcgcgcatccatcactcgtcgtgctctccgcactccgccgcatcaatgcacgcgtcgcccccctctctcgatcgctccctccgtatctcccctcggctctctcctcctcaactcctcaatcgacgccgccgcagccccctctctcggtcgctcccccacaaccgcttggtccgcttcgctccgaagactcctccttcactgaatcgccgggatccgccgcccccacctcgccctgcggcctagggtgctgctgcccgtcatcgtcgaaggagctggtttccgccgccttctttttgatccgtcgcgtcgcgcaccgtggcgggggatctcgtggggcgaatcccgcgccctcctccatcgtcgtcgtcatcgtccctggtccctggtactacaattaagttgaaattgatgcgagtactatgactacattgatatcatatattttagggaaagaagaaaacaatatatatagaaaaaataataacgcaaataatgtaaaatattggttcaagtttttacattcttatgagccattttttctatatgtttattttctactaggttctaatgaatatgtaaaacttacaagttttataaaatcactgcaatttaacacaacacacttactattatttttcctaacacatgcacctatactcatgaacttaaacaacacaatctacccaaataattactgacaaatcataaattactatttgatccatctcaattttcgacaaacatatagataattaaaatccagtaaaacattcttttgaatatatgatttatgcataatttgaaataacccatatactcaaaaaataactaagccatgtaatattatacaaaatttccatattcaagatgatcgataaataatgtatatgggctataaatttctagcgcgccaactaacgcgctgattttctagttatacgtactatagatttttttacttttcttcttatataaattcagaatttatctgtgatgtcatgggctaacacgtggacctttaatttatctgtcggcttgagattagtagataggcgacccgacaagatttgatgaaataacggattgacaagctcgccggcaggactatagatcgatattgtcttattttgacatcttttttccgtggtaatgcagaccttttttcaggcgaaacgatgcaaaagtttcagcatgattagttaaaagatagaaacactatacctacccgaacaaaggttgatagggtagtggcttgagtaggtcgcaggagtggtgattcattggagggagctatgccacaatcccactgtattgaattattaaatcattggatggatgtctatatactacttcctccatcccaaaatatattttaggacggagggagtactaatcaataagactacttcgaaagagagatctaattggtttcttgctatctaatttataatttaatgagtcactaatacattacgtcacatacgtgacgttcttatacatgtatgttcgcttaaaaccggcacaaatatgacccatttctcatccaactaagcctcattgactcgttcaaattaaaatccttcacctatgactactcatttgtgatgatttaaaatacagagctaattaatttttttagataatacagagctaattaatagtttaatcaagtaataggtgcctatttttataataagcgcgcacatataaatgccacatacggtgtaagtaggttgaaaaaaccgacacctatttgtataagtggcacctgtaagtaccatcattagctccattatattggtgttggttttggaagtgatatctatgaggtttttctactaaggactacaccaaaaatatatttcttttgttgaatcaggttaagctaagctacacatgtccacttttcatgctactgtagagcaaccattagaggagccaattactaaggtttctttgtgacaagttgatttatttgttattccttgtggtaaagaagagttgtgttataatacttcacttatatgcatgccacaactaatgaatgaacatactattcctagtgttcttttatgtgctgattttaagcatgttgttcataattgcgaatgaagttgaggaatgtgaattgctatcttctttaaagactttgggctatattatgtttgatgacttttgtgtactcgataatttgaagtagaatttattagctaagtctaatttggcatgtcgaatgaatactatttatcatatctttggtgaaaataatactatttatcatatctttgatgcataaagtttacatatgttcagttttgtaacatcgtatattcatagaagaaaatagtaagtagggagatacattatttgtaatcatgttatctcaagtttatctcatttcaatttaaagaataagttggttctaaagaaggggagctactagattgctcaatattgcttccatacaccattacaactacaccattcgagtactttgttcataaagaaggagagcgatatacgctgcaaagggaatagtttcaatgtagcatataaatcctatgttgtgcatccacattaccaggtataaccgtttcattagacgttaatattatttgcgaaagaattcatgatattgcatgacaaaagttttttgtgttcgtgttcatgtacacacgtctatgcgcaagatcatgcactacatgaacaacaacatatggaaaaattgagaacggtttcctttgaagaaggggaggacgatgtgttcatgcctactatagaaacatgaaggcatggagaacaagcaaaaacaattcaattcggccacgttgaacaacagtgacttcaaacggtcaccaattgtgcataagagctttgttttgggcccatgatggaaagctcttggagtcctctttccaatggatccagtcgcatctccaaattccatctaagttggccacaattgcaaaatcaatgtactgtatcacctgggaccccggcctggggtgcgccccaaacttgtggagcatgaccctaggaaccccttagtcgtcgccccacctccttaaataaataggttccccttccgaatttctttggttttgttagattaaaatttagccattactactaaccttgtatttgcgcgtgtcggctagaccgtctaattacttgtcttcggagccccaccttatcgtgatctttaattcctatttacaatttagattgtttttatcttgttcttgcttgtttctttgatttacttacaggaatatggctgatctgcaccggtaagatcaacaacccatggtaaggcacaacacaacaacgcctcaaacaattgtaattgcgccgacaacttctctcccaaatcgtatttatctcaactcatcgaaagaaccggccaatcatagcagtgtgtgtatcgatcggagcttagggcttatcaacattattttttggagatatgagttttttcttatatatgtagaacttttttgaatagttcaatcggaacctaggaaacaacacttaactttttggttagggttagagaaagaaagttctagctttaaaaaaattatgtgttggtgtgaaccatgccaatgtacaacaaataatataatctgcattagcgtattaaattgagttaatctagaatttaaaacattttacaaagtcaagaagatgaaatcaatttatgctaaatttgcattttatttctggtgctagtttgcagtaagtaatatacaatttgagttgactgaactttttttttgttgttttatacttttcattatgaaaatcaatagaatacataactcacctagtagaagattggttttcctttttttttttagaagttgtacactgcttcattttctcatcgcactctaattatatttataccttctgttgctctcctaagaaatccaatcagaaggaaaaacctcacttcattcatgatagtcgctcgagttcccttttccttttagttcagtttcgcctctcctcgtttccttgtctccattctgattgattcgcttcttcgtacaagcacttggttcacccttgactacaataatcgcactcaatcttttaaaccgatgtttcatatgctcttgatcacatcatcataagaaaatactgttaaatcttcccgatacgagagaacgagggaaggcatgttacaacttactgcttaaaactacaagattagcgataagaagaaaccctagtttaagtactagcgtcccaccccaacgttcttgtagttaaaaagcctctcccagctccttgctgctcgcctcgccattcgtggcttatgtagtggttggcattcctacgtactccgagtgattcccacacgagattatatgagaagatttatacgtgctccgacttattgcctcagccttttagaagggcatttggtgcaagtgtagtcaccaatagtattgtggcatattcctcgacagatgcctgttatactacactagtccacatctgtaaccacacacattgagagcgaagagatgtcctcatcgcaccttattgaggagtcttagcttcaagatgtcattacagacattatagaccttactgacctattcacgaaaggatggtccaataatttggatgcagaaggtctatcatccggatatggtctcaaacactggcttatgaaatcacgagcctcctttgaaaggtattttgggattgctggtggttcaccccttccgatcttaaataaagcttgtgcctgtaaaacaacaattgaagaaatagttggacacatttaattgaacaagaattgaaggaataattcaagggaattggatcatagtggacacatttaatttatcgaattttgacacataatttaattctacagtggaaaacaattttcctgatgaagaataactcacccattctaaatttgggtaaggcagttgacgtgtcaacatctccaggactgtgcaaccgagactccatatatcagctgccgttccatatgtcctcttgggattgacaacctgaatgttcagtgtatagatttaagctgaattaagcggcgtactgctggtaaatttcagtacatgagaacaaaactctacctttgccatcatagacagtttttactatttgatataatactagctagccagttcttagcgtttattaacattaaattgttggatatatccatggccacattgtgccagctgactttcactttcacccaagtccacaatgtatatgtgccgctcatttttaggataatatttcagtactttttattctggacaaaacatcgaaggagggggagaaagctatggtgacaaaaaatcttagcatgtccattttgttatttctttattttttatagaaaaaactcatcgatcatgcatggtggtatacctcgggtgccatccaataaacacttccttcacatgatttaagcatgctgaatttgtttatctgaaagagataactaataaatcaagagtagaacaaagtcagtaacaaagaactgaaagatctaacacaaacataaatacagattctgcccagcagaaagcagagacctgcttagcaagaccaaagtcggcaagtttcacagatccattcctatgcaccagtatattgccacacttcacatccctacaagaattttgaacattgaagtacatgagtatataattaatattttattcctttgcaagacaaattgagaaatctagtgagcaatttataattaagaaatcccatttatgctacaaaattacaggttgaaattgcctatggtgcaaacagacgtatgaatattaccgatgaacaatgtttctgttgtggaggtaagtcaacccattaaggatttgttttgtatatcgcgaaacatgagaatttcgcaggcgatatttctggtacaaggatgcaagagagccttgtgacattagttctaggaagacgtaaagttttgagtcctcctgcagtcgtcacacaatggatgatcatattaaccttaaaagaaatatgtataagaaaacctatgaatttatatacaacacaataacacatattacttcaacaaatagatgaacaaccacaagatcccctaaaggcaaagatcacaagatcgatcaggagcttactttgtctgtaccatagtactgtacaatgttattgtgttgcagacgactcaggagtgcaatttcctgaacagattattagaaattagtagatgctttatgatctgaaaatacaccattaccaacagaaatatatatactccatatattatcaacaagagaagcatctagcgaaaccaacctgctgaagctgaaaaatacactgttgtgcatcgtcgtatttcccttgatcatctaagtacacttctttgacagcaaagaaaacaccctcgctgttacgataaaatacttgtcagccgtaacatggttgtataggtagctatacaaattttattttctttctcgaagaataacactcagggtaataaaaaagaaaaacaaattaaattacatatctgttactttttaatttgagtttttataggtattaattagagttgaaactaaaaaagatcagtactacaacaaagtgattgatcagtagtaattactccctccatttcatattataagatgacttcattaaatttctttagattttatgaagattctattaaaacgtagcaacatttctaacatagaatagacatactaataaaatatatatgttaacggcaaaatttggtgcatgccgttaggcaaagcaagtcaaagagatggttgaagttgtgattctagcaaggatggttggaaagtgtatcagatatatttaaccaatcttagaagtattttgtttttagttttcgtattaaggcaagtttgttagtttccttttctaacaaagttaattttgatgagttctaagtatcgagtttagactgcaccggtttcgatctccaacgagaaagtaagctccatcaacttcgcttatatcggcctaattagtaatttctcgattaagtccgatattctaatcacattttactaccgttccttatctgatatatcgactctttctttgatttctttgctttcttaatttgattcaatatatctgatatattggctctttatttgattgctttgctagtttgatttaatatagatctatcaagcctttcatcaaacttatattgtcttggttaagtccgatctgctagtcttttattcgttagatagacttattcaggcttgataggctctgttcaaagttctatcggagttttagctgatgagttatccatcacgattgtatagatctatcgactagatagtttttcttattgtcttcaatcctatactatctcattttgtcgacgggtgatacccgtagaccggatatagagggtattggggtacgttggtacaaggatctacgtaatacgacatcaagcagacaaaagacaaagattatactggttcagaccccttgatatgtaatagccctaatccagttgatgtgggattatatgatggaaaacacaggttacaaagggaatagtggaacttgacgaatccggcgagatcgtggtcgagttggctcgactacgatccctggcgatttggctcattgcaggctccgacttcgtaggctgtgtgggttgtgttggctctgagattcgatgccttaggtcctccccggggggtcccttttatatcacaggtcaggcggtttccaagtagaactcggaaacatcaaaccttacacgatacattgacgacccagtcttgtccgagtaggactcttttcatttgtaaactccgtgaggggtttccttaatttacgcggagagtatccgtatacgtgtgggtatactacataggtatgcgacgtacgtcaaagggtaaagggtatacctaacccgtaaccctaacagtagcccccgacttctgcttaaataagctcgtgtaaccattcacggcttcttgtgtcgagactgttgtcgttcccgatgcgaggaccgtagagacaggacgtagtcgagaacaccgtttgaagcccaacggtcatgagcgaatttaaactgaagtccaaaaaactgccgcgcgtaaaggacccagaaatttccggcgagcatctctctcctttccttggaattcgcaccgtcggtagtgtgtctatttaaaggaattttgaggatccaaagtccgcccatcgtgtagaaaacatccagcctgcaagcgctcttcgtcttctccactcccacaagaaaccctagttcgtcggccttagccccttctccggtgatctccgatcgacgatggatcttggcaaatcatcctccaccagcgcgtcgctgaagaagctttaggaagatggcgcccttcccggtcgtgggaccatggaaagggaagcaggaggtactaatccccagcctgtcttaggtcgcatggttgtgatcgaagactacattctctgtgattttatccctccgccttccgaatttcttctcttggttctgaacttctacggtctttctctgctccacctgaaccccaattccatcgcctttcttagcatcttttctcatctctgtgaggcctacattggggtagagccctttcttgatctctttcgcttttactatgagctgcgttggatggagcccaacagggtgtctggatgcgtcgggttccgacttcgggatggcctgaagtcgcgttatatccccttccagtgcccttcttctcgcagcaaatggcggacgaggtggttctaccttcagatcaaagattcggaccctgtcttcattgttcctacggaacaaccggacaaaatcccgtcttggactgcaaagccccctttgactccttctctccaatcgttcatcgacattgtcgatgatctccgagtacgaggcttgtcgaggtatgaagtcactgcagacttcgttagaagacggatccagccgctccaggctcgagtccatccagcctttgactattccggaccggaggacgcgacccgggtttctcctcagggtatctttctcgcatttatcctgacatgctcatgtccacgttcctcctgatttatcaaaatttggttctcgattcacaggtctgaacagcgaaaccgtgggacgtcgtgtcggccaggtgatgatcagcagcccgacaacagcgagtaacatccccgttcccctttgtgaaaagcgggcggctgaacgtgatgctgccatcaatgtaagtgttctcgataggcatcctgcgttttccttttgagatcactttatgacttgattaagcgtaggctcttcctctgactaacatcatcgggccgctcgcggaccatcaggtggcggcgtcactgaaagagaaggtcgccaaggaggcgtctgatgctgccgctgctaccacaagtggtggcaatgttctgagaaaggggaggaagttctctgtaagcggacatcgtcgcaaggcatcaaccccctcgataagctatcctgtcgtcagatcatgcagctagaagaatttcgccttacttcgcatcaaccgtttttcaggcctcggacgcgtctcccctgcctccacggcgacaacgtcttgtgacagttggcgagaagtaagtagatgaacttaagtcttcgtgattttgttcgagtgttgtctgaaccatagctgtctcacagggcggcgcgggcgaaggcggtgcaagacgagtccggagggacttccggcgcgtctcccgctgcagcctcgacggatgtcgtgcttgcgcctgggagccgcgaggtgacaccaagcggcccagtcagcgatcccgcagctggtcgtggtccactggctgccgtcctcacctgggaggatctccaggtcgaaatggggcgcctcctcgaggctagtgctcgcggcattggccgtgatggaagaagtcggtgatctgggggaatctgttctccccctttttgaagagtaggacctcttgtaatccctagacatgctgtgtaaacctggattttaaccgcctttgtgtgtgcagctgttatgctagttcactcttgtatgttgatcttgaaaactagttcactcttgtatgttgatcttgaaaacttttgtcccttgtagagatgttgatgacgaggatgtccagcaacgcgggcagcccgagtttgaaccacatgcgtcgcccgacaatgtagaccagacccttgctacggggccagagatggtgacgacttccttaggttagtagtccattcatccctttctgctcctccgactagatcagctctgttcttgaaagaggcgtgtagcttgacttagttgttcccacactgagcagatctcgagagtgctcttggtggccaagatcgtcgtatccaatattggaagacaaaatttgaagtagcggatcttgagagaaccatgcttgcagtgaagaaagagcaggctgtggaaacgctccgaggtggtgaggtgtggttcaactcgtacttgaagagttgctgcacatccatggccagggtttgtagagaacttcgagtaccccatggagatcccgaggagtcagcagctggatacatctcatggctgaacggagcctgtgctcaacttgatggcgtcggcaagcgtatcgacgaggccttgaagcaggagtgtcatcgatcgagccgatatgccggagggcacgtgttggcttgcctacgagatctccgtgagggctttgctcgttctcggaggactccggcggagatagaccacctggcgaggtcgatggcgccgttcgcggagaagatcttccagtctatggactggcgttggccttcttggtagtcttcgtaccctgtggtagatatctcaggaaaaatgtgtaatatagctttggatttgtgtaaaaactgtaagaaatattttgtgaaatagaaaagaaatctatctttaacaaaacaaatctttcttactccagatgtcgtgtgtaagagtgtgttcttagttcacgactttagtcagtcgtttgagtcgtacactctccctagcccccagccttgtcgtcggaggaattttctcggaggataaggctcttggacctttgacctgccttggttgaataagctctgatcctagcccccagccatgaagttggaaagttaatttccgatttcacggcttggttaatacgcacggcgagaactcttacacgaccagatcttacatggtctttcgtctctacaggatctgacaaggccttatcggctctgggcgtccccagccgaagatcctttaggttcctcggaggccttgtcaagacagcgtaaagggacatgaggataggtttcaacgctaggtgtcatcagggtaagggatcatcgggcgggaacactttgattgtaatatgggcctaagaataggctttactgatactgtaaggtgtcttacaggtacggatggtattgagtcatacatagaatttacgtagttggttaatgttccaggaatttgctaactcgtgaccatcgccgtctgcaattttgaatgcgcctggccgcaagacttgtgtgatcgtgtaaggtccttcctatttgggtgagagtttgtttcgcgctgcttggctttgaacccgtcggaggacgtagtcgccgatcgaatgtatgcatactcggatgcgcttctcgtggtaacggcggagggcctgttgatagctggctgctcgaacgacaactcgttcgcgatgttcctcgagtagatttacatcgacgtttcgctgctcctcctggtcctcgtcggagtgcttctgtactcgtgtactctgatgtcatagctcgctggggagcatggcctcggagccgtacacgaggaagaaggttgtttccttgttacacgttgtcggtgtggtgcgtacggcccatagtactgatgggagttcctcgacccattttttgtcatgtgacatgagcctgtcgtagacgcgggttttgatcccttgtagtactatgccgtttgccctctcgacttgtccgttactttgagggtgagagaccgaggcgaagcatatcttgactcccagcccgatgcagtaatcctggaaatcagcgctgatgaactgggagccgttgtcggttatgatgcggtgaggtagtccgtatctgcaaaatatccccttgatgaatttgatggcgttgacagccttgatttcccccatgggtactgcttcgatccatttagtgaatttgtcgatcgccacgaattggaacctatagccgccctgtcctcgtgggaatggcccgagtatatctagcccccagcacgagaacggccaagtaagagggatagtctggagcgcttgcgcggatagccttgtgtgtttactgtggaattgacaggcttcacatcgctggaccatgtcgcatgcatatttaagggtggttggccaaaaaaacccttgtcgaaaagctttcccgaccaatgtccaaccggcggcgtgtgacccataaatgccttcatgtatatcaaggaggaggtgtctgccgttgtcggacgagatgcttttgagaagtaccctgtttggcgctttcttgtatagattgttgccgaccatacagtagatctttgctttacgggttattttctcggcctctgtatcgtcctcgggcaactcctcgctgttgatgaatttgatcagtgggaagcgccagtcgtctgtggtctcgatgtcggcaacggcgcgttctgcctttgtggccttcgagctaatatcgagggtgaccggactaacttcgccactaacctcttttactgatggcttcgtcaggatgtccagaaaagtgccgggctcgagcggttcttgtctggacgcacgtcgtgctaggtcatctagctcgatgttgtctttgcggtagacgtgtcggacttctatcccatcgaaccttttctctagcttcctgacttctacgagatacttggataactcggggttagagcatttataatctttgtgcacttggttcgcgactagctcggaggcccctttcacgattagtcgcttgaccccaagtgtggctgcagctcttatcctggcgagtagtccctcgtattcggctgtgttattggtcaccctgaagttgaggtggattacgtgcttgaattgatctctggagggagacgtcaagataaatcctgcccctgctccttagctgttgagtgcaccatcgaacgccattgtccacgtttcgttgtcgagttggttgtctgatttgttatcaggcatagtccaatcagctacgaagtcggcgagtacctgggatttgatggctgttcgtggcgcaaagtggacatcaaactggctcagctcgactatccatttcgcaatgcggccgacaacgtctttgtttctcacgacttcaccgagagggaaggaggagacaactgtgactctgtgggcttgaaagtagtggcgtagcttccttgatgtcatgatgaccgcgtaaagcagcttttggatttgtggatatcttgtctttgcgtcatggagagcttcgctgacgtaatagactggtcgttgtactttctctctctcgacaacgatgatggtgctaacggaatatggcgtggcggcaatatagaggaataattcttcattaggttggggggcaacaagtacaggggggtttgataggtagcgcttgagtgcaacgaatgcctcttcggcttcctgtgtccatacaaatttgtcttgcttctttagcagagctaagaaaggttgccctcgttctcccatcctagcgacgaatctgctcaatgctgccatgcatccgattagcttctgtacttccttgagtcttgtgggtgacttcatgttctcgattgccttgatcttctcgggatttgcttctattcctctgccagagacaaggaaaccgagcagcttgcccgacggtacttcgaacgtgcacttctctcgattgagcataaggtgatatcgtcggaggttgtcgaacgtttcccgcagatcgtcaatcaatgagtcgcatgtcttgattttgacaacgatgtcgtcgacgtatgcctcgacattgttgccgagctgatcgctaagtgcgccctggaccgtgcgctggaaggtattccctgcggttatcagttcgaacggcatcttaacatagcaaaataccccaaacggcgtgataaatgttgtcttctcttcgtcctcttttgccatgctgatttggtggtagccagagtaagcatcgagaaagctcaacagctcacagccggctgttgagtccactagttgatctattcgagcaagagggaagtgatccttggggcacgccttgtttgaggtcggtgaagtcgacgaacattctccattttccgttggccttccgcaccatgactggattggctagccactctggatgaagtacttctctgatgaagctagctttgagaagtttgtcaagctcttctcgtatggcttgttttcggtctggtgcaaatctccgtagtctttgctttactggcttggcatcgggtcgcaccatcagtttttactcaatcacctccctagggacccctggcatgtcggacggctgccaagcgaacacgtcagcattatcgcgaaggaaggtgatgagcgcgagttccaatttctcgcttagtatcgccccgatcttaacggtcttgtcgtggttggcactgtagagcggaacgatcttgattgcgccgtccggtttcagcgtcttgtttgtcttgctcactttcttgggtggctcagtcgtgtcgggtgggctgggcgtttgctcgaccatgtcgaggctccgtttgtcgcattgcaccgccagctttgtgttcccttgaatagtgattgttcccttcggtcccgacatcttgagcacttgatacgcgtagtgagatgcggccataaacttcgcaagtgcagttctcccgatgatggcgttgtaagctgtatcgaattcagcgacatcaaaggtgatctgctctgttttctttgcacccccaacctctgtcggcagttcagaacttcatcagataggactgtcaaaaatccccatcgtcagtgaattcggtgacgtatttccggaagaactacccggtatgccgcccaagcgggagatcgagttccggatagattttgctccaggaacaactcctatgtaaaagcggccctaccatatggccgcgaatgaactggccgaagtcaagaagcagttggaagagctgaaggaaaaggggtacatacggccgagcacttccccccagggtgctcccgtgatttttgtggaaaagaaggacaagacaaagaggatgtgtgttgactacagagccctcaatgaagtcactatcaaaaacaagtaccctcttccccggatcgatgatctgttcgatcagcttaaaggtgccactgtcttttctaaaatcgatcttcgctccggatatcaccaattgcgtatccgtgaagaagatatcccgaagaccgcattcaccacgcgttatggactgtatgaattcacggtgatgtcgttcggtctgaccaatgctcctgccttcttcatgaacttaatgaacaaagtgttcatggaatacttggataagtttgttgtggtcttcatcgacgacattctggtgtactcacaatcagaggaagaccatcagcagcatctccgtctagtgttgggaaagctgcgggaacatcaattgtatgccaagcttagaaagtgtgagttctgtttgtctgaagtcaaattcttagggcacgtgatatctgctaaaggagttgctgtggatcccaaaacagtgaccgccgtcactgattggaagcaacccaagacagttactcaggttcgcagctttttgggtttggcaggatactaccggaggttcatcgagaacttctccaaaatcgctcaacccatgacacagttgttgaagaaagaagaaaaatttgtgtggagcccgcaatgcgagaaggcgttccaaactctcaaagagaagctggtttcctcgccagttttaatcttaccggatactcgcaaggacttcctggtgtactgtgacgcttcgcgccaaggattggggcgcgtgctcatgcaggaaggtcatgtggtagcctatgcctcacgctagctacggccccatgaaggcaactaacctacccatgatttggagttagccgctgtggttcatgctctaaagatctggcggcactatctcattgggaatcgctgtgaaatatataccgatcataagagtttgaaatacatcttcactcagtcggatctgaatcttcggcagagaagatggttagaactcatcaaggattatgatgtgagaattcactatcatcctggcaaggccaacgtggtcgccgaccctctaagtcgaaaaagccattgcaacactcttggcgtccgtggcattccaccggaacttaatcaacagatggaagccctgaacctaagcatagttggtcgtggattcttggctacgctggaagccaagcctaccttgctcgatcaaatccgcgaggctcagaagaatgatccggatatgtatggactcctcaagaatatgaaacagggtaaagccgctggtttcacagaggatgaacacggaaccctatggaacggaaatagggtatgcgttccagacgactgggaacttaaacagttgatacttcaggaagctcacgaaagctcctattccatccatcctggcagcacgaagatatacttggacttgaaagagaaatattggtggattagtatgaagcgggaaattgcagagttcgtggccctttgtgatgtgtgccagcatgtcaaggcagagcaccaacgaccggccagacttctccaacctctccaagtaccagaatggaaatgggatgaaattgggatggatttcatcaccggacttccaaaaacccaaggcggatatgattctatatgggtagtcgtggaccgactaaccaaggtagctcggtttattcctgtgaagaccacctatggagggaacaaactagccgaactttacttcgctaggatcgtgagtctccatggcgttcctaagtaaattgtatctgatcggggaagccagttcacctctcatttctggaagaaactccaagaagagttgggtacccgattaaatttcagcaccgcgtatcacccacagacagatgggcagaccgagcgtctgaaccagatcctcgaagatatacttcgcgcatgtgtcctaaattttgggaagacctgggataagagtctcccctatgccgagttctcctacaataacagctaccaagccagcatacaaatggcaccctatgaagcgttgtatggccgcaaatgccagacaccgctattgtgggaccaagttggggaaagccaagtgttcgggaccgatatcctgagagaagctgaagttaaagtcagaaccattcaggagaatctaaaggtggcacagtctcggcagaaaagttatgcagacaaccgacgccgcaacctagaattcgcagtggacaattttgtgtaccttcgggtcacgccattgcgaggtgtacacaggttccagacgaaagggaagcttgcacctcggttcgtgggtcctttccgcatcattgctcgacgcggagaagttgcttaccagttggagctgcccgcctccttgggcaacgtgcatgatgtgttccatttgtcgcaactcaagaaatgtcttcgagtgccgtccgagcaggccgactcagagcagattgaagttcgcgaagacttgacctacgtagagagacctgtgaaaatcctggacaccatggagcgcaggaccaggaatcgggtaatccgtttttacaaggtccaatggagcaaccacgccgaggaagaagctacttgggagcgtgaagacgagctgaaggcagcccatcccgatctcttcgccagttcttctgaatctcggggtcgagattccgtttaagggggtaggtttgtcgcgtcccaaaaagaccctaaaatatatcctttaaattatgcctagaataattaaaatccgtgtgaaagcctccaaaaataaaaatgtgcaaagtaaaagaccaaataaggcttagaggatttttgtatatttcctaaaaggctaaaatgtgtaaataaattttagtggaattttcagagcacaaataataattgttaagaaataaacaaagttaaaaaggttttataaaaagaaaaaccctaaaaaaagtcccctccctctcttgggccggttcggcccatttccctccctctctcccttctctccccgcggcccatccagagtctccccgcgcgcgcgccgctgacgtgcgggcccgcccaccaccctcgctgacgggtggggcccacccgtcatccccgtcctcccgccgctcccgccgccccgcccgcgccaagcgccgccaccgccgccaaatccgccgcatcccgccgtccctgcgtgcattaaagtggggggaaatgtttcccccgattccctctccctttccccccaattttccctccctctctcccttggataagtttgaaaacccctcccctaatcctgccggcgccattgatggagcccgagaacgccgcgctggtttccttcccctccggccgccctctctcgccccggccctatttaaaccctccccgcgcttctaccgtccgtttccgcctctcgccacccttcctcctcgctggattcgagctcgcgacgtcgctctctctctccgccgtcgtcgccccggaccgcctcccacctcggcgccgcctccttcggcttcgccgcatccttgccgacctcgtccacctctccgtttcggtcgccgaccgccggagcgccgccgtccccgtcgacccgagccgcgccaccgcctccctccgctccggccgcctcctccgtagccgccgttgcctcggggtgagccgcggaccgccgcctcgtttcccccttcccttcccctctctcggccgcctctccgccgtgccatggccaccatcggcgaccataggggcgcgggtgcgccacctctcaccgaccgcgccctcaggtgcggctgacgcgtggggcccacggcgccggccggtgtgagcccgggtgcgcccggtccaccgtggaccgtgaggctgccgcgtgggccccactcccgtggacccggtccgcgcgcccctccccctcggctgacgcaataaatcccttttaaattaaaatttaaatgaagaaattcgtaaatattcatttaaagagcatttaaacttcaaatggccataacttgaccatttgaactcggaattggaccattcaagtctctaatttttccttaagaaatcaagaacccatttttgtgctttattcctgcttgttatgtggagtttattagcgtaaaagcccttttcttttccgttggtcgtgtagacgctgcagcttcgaaagatccgctctacgtggaggttgaagccgacgtttgggaaagccagcaaggcaagtcacatcatccttgaatatattgaatcccagtttataaaattattttgatttaaattaatgcattatcgctttatttaaattcccgcgttatcactgttttatttagccatgcctatttacctttgttatgaccttattattgctattgttattattaccttgttcaccctagaataaataaaaccccaactagtgtatactctattcatggcaccactagtatgaatttaggtagatgcttcgttggttaattaggcaacattaggtggttttacaactctagactttgggaatattcatatcacctggacactatggaatggttggattatggtggaattggattcacacctccccctctattcaaaatcctcaaaatggttttaggctgggctcggggtgcatggttttgatagtagcacctcggccacataaggaccggtcttcgggcctctattgcaaagcactaccgtacttccacatgtctagtgggtaaggcttagtttgaggctcagtctggttataaacaaaagtacacagatggagatggacgaagtcgggggtcgatggacatctctagggcaaatgaaggctacacgagctgcggctcggtagtcgagatgtcatggcacagggctggtgtcctgctgctaggggctcagtcctgcctacctgtcccagaggttccggccgtaggtggggttgggttggtactcttgtctatggctaggatgggttggaaactatgtcacgtcttccgtccatataccgtggtggtatgtggcatgtggttacacgtgaggaagatgtgtcttgtgggtaaagatgtacacctctgatcagagtataacctattcgaatagccgcgccctcggttttgagcaagccgagcaatgtacccaagttagtgttttaattcttaaaatctgcttaacaactaaaatgtggaatggttggcctgggttggcttgggacgagctgggacctagggtcaggttgccaattcggtctaaatcatcgtaggccttgggttaaggcaggttcgtgtgggttcacggccttgattaataatcttgtatagctctaggatcgtatttacaaaatagctttgagcaactaagtgtcttttaatgctgtttactgcaaaccctaaccccttatattataactcccttgtactcccttgcatttattctgcacttgtgggtgtgtcttgttgagtacggtggttgtactcagtcttgctcaattttttccaaacccagaagaggagttcctagaagatgaaggctttggtgtctagctcgtgcctgctgtcaagcgcctgtggtcgtcgccctagtcttccgctgttttttatttgtcttcctgtgtgctaggccttcgccgcccatgtaataaattaactatttacgcttccgcttgataaactttgaaatatatcaacttttggtgtaccttgcctcctgggacaaggaataatacacgcacataaggaacgcccgttgggttatttccggtcatgacaaacagacttcgcgttccactttcttgtactctcgcttagaggagtacgttgtggaacctccgaagatgtgtaaaacgtggaggtcagagtctggatatgctaaatccgattcctggggagccgcctccgcatccttttcgaccacgcatactcgtttgcctttttcagatgcaatgtgcttctcgagcgatttttttgaaaacaaggcaatcttccagacagtgtctgtccgtcttgtgtatggggcaccatgctttctttgtgtcaccactttgtgggtctgggcgcttgggagggttcgcgtattctgctgcgaggacttccgcttgagatttccttttcccagttttgcgatttttcttcttgcttgactcaggtgcgtccgtggctggtttcttctctcccccggtcttcggcttatcattcttgcatcttagcgcatcatctgcgtgggcgcatcgctcaacaatctcgaacaatcatcgagtggttgtgatgcgtcttgtcgccaactcctaggtagtatagcaatctctgacaccggatttgaaggcgtgaattacagaagcgtcggtgatttcggggattgtatttctgcactcgttgaagcgccgaacatattccctcaaggattcacccgagttctgtgtcaacgcgtgtaggtcgtcttcgatcgcgtggcgcttgtaggttccttggaagttggcgacgaactgttgccacaggtctgcccacgaagagattgagtagggcagaagatgcatcagccatgaacgtgcagagccttttaacgcagttggcaaataattcgccaatgcgttgtcgtctgctccggcagcgtagagtactgtgaagtagacttgaaggaactcttctgagtcggtgctcccatcgtacttttctattgctccgggtcggaatctctcaggccatcagacatcacgcagggaacgactgaaagccctacacccagcgctggggcggtgggttgccggcgattgtgtgtccttcgtggatgtctgtctgatgatgaggaagccgaggatgatgacgatgacgatgggtcgcttggttccggcgtacgatcacgaggatgtcggcctggatctcgagaatcctgtcgtcgtctcccgctgttgtcccggcgccagtctccatcatcgtcgtcgttatggcgacgtcctcaaccagtatcgtctggcacccgccgttcgcgatcgttgtgatcgtggcggttgtggcggttatcacggcctcggtcttcgtttgagcggtctcctcgatcttcgtcattatggcgccgtgaagagacatgacgccgggaacgattttcattgtctcgtgtgcgtcgtgcctctcggcggccgttgacgtgatctcggagatcgctagtgccgcaaggtggaggggtggctcaatgaggcgattccctccattcaggctcttcaccattggcatcgccagttggtggctgctccgggtgcgctgcggcggcggcctcttcgaacgtgttgctgaggttagtcactgattcccgtagtcgtgctgtccaacgagcgagatcgtcgttcagaacaggatcgtagggggtttccctcagtatagcgttgacggctctgatgtgctgggccggggtggccaattgattctctgcttctgcattggtgcgcgctgatgtgccgacatcatcgatagccaatacctcccgcagtgcgctcgttgtcgatgatccatagtcttcgagaaggtgcaagactgatggttcgtgaggatcgatatcgattaccccaacaaatcgatctgaagttggcgtcgctcctcgttccttgtctttatccctgatggggatgtgtgactgttggaccttaggaggtggcgctttcatggcgctgagaaggaccttgcagcttgagaggtcgtgattctttgtcttgtgaataggacaatagacatcacgagttggagaaatacgctgaattccacgctctttgcagatacgaatttcagcgcggacgttgaggaaaacccagcaggtttgcaaagtgtgtttgctggttttgtggataggacaccaggaccttgttgcttcggaagtcatcttcgtcggctcgcggttcatgtcggaacgacaaggtttggccgcattagaatccttctcgagctcggatgtcgtcgatattccgttcttcgcctcggtgggagtatctttcgacatggagtcgtctcggtttgtagccactgcgttctcgtttccagtcattagtggacaggttgagatcggcattgtggtgtaaaccgggaagacgatttcgccgacttgagtccacactagcatcgttgaagcagggaatacttggctgaggttggtgttgacgctgttgttgacgaggctggatgacatagtagtagaaccttgagtaccaagtgcccctacctggcatgccactgtcgacgggtgatacccgtaaaccggatatagagggtattggggtacgttggtacaaggatctacgtaatacgacatcaagcagacaaaagacaaagattatactggttcaggcccctttataggtaatagccctaatccagttgatgtgggattatatgatggaaaacacaggttacaaagggaacagtggaacttgacgaatccggcgagatcgtggtcgagttggctcgactacgatccctggcgatttggctccttgcaggctccgacttcgtaggctgtgtgggttgtgttggctctgagattcaatgccttaggtcctcccggggggtcccttttatatcacaggttaggcggtttccaagtagaactcggaaacatcaaaccttacccgatacattgatgacccagtcttgtccgagtaggactctttccatttgtaaactccgtgaggggtttccttaatatacgcggagagtatccgtctacgtgtgggtatactacatcggtatgcgacgtacgtcaaagggtaaagggtatacctaacccgtaaccctgacacatttaggaccgatctatcggctagatatgtttaattcttgaaagccgatatgttttatacaacgtttcatcggagtttaattctagccaatgagtcattttttatagtcttgaaaagtatggcaccgtcttatgttcacatcggtaaaatcagtaactaggccctgtttgtttcagcttaagattattgtaatctagattattaaatcagattactctaagctgaattataataagctgacatagaataagctgcgagttgtttgtttctctggattattagaggcattaagggtagtgggtctttagccactcaataatctggaaaaagctcattcagaggagattattagattatactaatctggcttatagattatgataatctagcatgataatctatttgtttgtttcagcttactcctaataatccagattataataatcctaagttgaatcaaacagggtctaagtcatcctttgttagtttcaatggtttggtcccagttttgtgaaggtaacttagctttggaaagtttaaatagatctttcattactcttgttcccaaaaaatcaacacctgagagggttaatgaatacagaccgatttctctccaaagtgtggctctcaagcttttaacaaaggttcttgctgataggcttcagtctgtaattacagaactcatccatcaaaaccaatatggtttcatcaaagccaggacaatacaggattgtctctcttggtcttttgagtacttacacaagtgccaacaatcaaaaagggagatagtgctgttgaagttggactttgagaaagctttttatactatagagcactctactattttggacatcatgagacaaaaaggttttgattcaaagtggttgaattggattgatttgatcttttcttcagcatcttcttcagttcttctaaatggggttcttggaaggaatttttattgcaaaaggggtgtaaggcaaggggatccattatcacctcttttatttgtgctaggtgctgatttactacagtctgttgtcaacaaagcttattctcagggtgttttgactattccaatcccaactcctgataatggctttccagttgtacagtatgcagacgatactctccttttcttgacagcttcctcaaaagagcttttctgtttgaaggttattctcaactcttatgcagattctaccggtttgaagattaactacagtaagtcatggatgattcctctgaatgtggatatagaaaaggtgcagcatttgtccaagatgtttggttgctcagtgggcactttacccttcacctatttaggtctgcctttgggaacaactaggccaaagataattgattttgcccccttagttgatagggttgagagaagattgtctgctacttctgctcttctgtcttatggagatagattaactatggtcaattcagttttatcttccctcccaacttactatatgtgctctctttcccttccaaagtcaataattgaaaacattgatagagctagaagaaattgtttatggagaggaactgatattaattctagcaggaaatctttggttctttgggaaagggtttgtcaacctaaaagtagaggaggtctaggagtcattaacctgaggctgcataataatgctcttttaatgaaaaatatgcacaaattttataataggctctcaataccttgggttagcttgatctggtccacttattatattaataaagttcctcatgctgatcgccctagagggtctttttggtggaaagatgttctacaatttgcagacatttttaggggattgtccacctgtaaggttggggatggaaagacttgtctgttttgggatgatttctggaataataaagtcaggtcagtaatgtacccaaggattcactcttatgctgtttctttgaaggattcagtgagtttaacctcttccaagagtatttcgcagcgttttaatctccctctgtctgagcaagccttccatgagtatgatacaatgtctgcagctgatcctttagatcaattatctgatgagaatgatgtctggtcttatgtttggggaaatggtttgttctcttccaagaaaatatatgacattaatttcatgcatatacatgcgcctagttatctagcttggatctggaagagtaagtgtgctatgaaggttaaagtttttggatggctcctgttaattgatcgactcaatacttatgacatgcttaacagaaggcattgccctcccaataattcggatctaacttgtgtcctttgctccacctgtgcaagagaaaccacctttcatctatttttttaatgtccttttagtgctgattgctggacatagtttggaattgtctgggatatttctcttgccttcatagatatgctgcatcagacaatgaattcttataagtctacgcactttatggtgaaaattcttttatgcagcctggaatatttggaaacagaggaactccctgattttctagaatttagcaccctcaatttcttcttggaaagctctctttaagagtgatctttcccttttagtttttagactaaatgtttctgagagatagtcccttttgaattggttatatcttttgtaatttattttctataataaagctatttaactgtgggggcttcccctacagtgccttccaaaaaaaaatggtttggtcccaactatcaaggttgttttaaataaagagttattcatgattggttatgttcagtttccgtaccagtcgatggctatgcattttagttacgttatttgattaattcactattccattggtcaagtagccaatgaccctaactctatcggtatttgattatttaagttatttgattaattcactgttctatgtattttcgttagttacatgataactaagtggcacactctaaatccgattgataggacctgcagtataactgtacgagagctaagcaaatgtctcgtgccttcgtgtgttagttgtagggtaaaactacactttcacatatacactctggcttctatcggtttatccgtggcgggattaggcacacatcgacaccgctgtaaatcgaaaattagttaggacgcctcaaatctggcctaatactagcttgtcactgcatttggtgctgatgccctaccggtagctgcctaaatcgttcacgtgctcggtgaaatcaaaagccccgctatggatagattccgagacgcggatccggacggccaccattgacgccgatacccattgaaatccccaggtcatcgcctccgtgacagcgtggacgccaccgatgctggagttggacgatgtcaatgcccaacatcggcatgctcttcttgctccccaatagttatgtattccatatccaacgaaacaagcttctagcggcaccaataacgaattcaggacactgcagactctgatcgatccattgggaagacgaatttatgtatgcgctcacgaaaaggggagggatgatggggaattacagcgaggcactaggtgagtaggtggtgccactgagtggagtcagtggcgaatcgtggcgctgagatggaacaggaaaaatgttagccccatcgtacctatgccttgcctaatcaactgttagattttttttttacctcttggtagctagcaattggtggtatatccttatgaatggtaaaaagctatgaaaaaaatcgctcgctcagatctgagcatctcgctccacggagtatctgttagaaaattagccccgaaatcaccattgaaaccaaacaagaaaaaaacattatagaaaatccaaacacgttaatgataccgaggaatgatatttaataacgaggttaaattataaactgatccccaggacagtaattgagaggaagagcatttcacttagctttataactgctagatttagttcatgctaaatgacgattttacctctcaatgccttttttttttttttttgacagttacatctctttacgtttctactactgtcaactaagatggcagtagaaatagatggtagcatcatagcagaaagtaaacagatgaaatggagggaatagaaatgatggatccaaagttacttctaattagatgagtaggacttgttacttacttggtgatcccctcgaacaccatcccaaaggatccacgtcccaggaagctcccccgactccaggaccggaccttcctcctcctcctcccaacatcattactcccgttcgtcgggatgtagaacatggactcggtggtcgtcctcctcgtcgtctcatcatccgtcgactccgacagcgaagaccagcacgtgaagaactcaccggacagcaacaccgccaccgcctcctcctcctcctcctcgtcggccgccggaggaaatacggccatcgacggtgcagcagcagcagctagatgctgctgatctggggaggcgatttccacgtccacgcttggcgtggtctcctcctccgggaggtggggaacagcggccacggacatggccagctgcagcagggcagccatgttttgactgacggggagagagtcctgaagggggttgtgtaggaagcagagctggacggacgcggagttggatatctgccaatgttgactgactgatatagatgactagcgatgaaagccttgattggatatctggcttgggacgcgtgaactcagaaaatacttttcctctactgtgcatgcgtttccataaaaagaatatatcgacccactacagcaattatttactacaaaacttacacatcgtttatttttgagctgttggattgtcctgcaggtctcagaatcgttggggtcggcatttgggccagccttctcattcgccaagttccccaccactgggttgtaaattttggaaattttggacatttcggtgggttccgattgtaagtgaggtccggtcaaatatttcggccaaaaaaaagtttgacgtgattttctcccttaactctaaatcgccgttctcttccccctccgtctcccctcattgcgccgcaccgcatccagatcgaaaaaaaatcgccatctcgccaagtcgccagtcgccgcctcgatgtcggtcgccgccctgacgcagcccaccgccggcgcccctagccatcgcctgcagccgccctagctgtcgcccgtagctgccccaaccggtgcccccagccgtcgcccctagccaccctagccgtcggcccgtcgcccgctgctcgatgcccctagctgtcgcccgctgctacggggcgctggcgcgccgctgagcgcgggtggcggtgtgccaaattaccacgctccgggtgatggtggctgcgctctggattcaaggacggacaaaaacaatctgaattacaaaattcaatacaatgataagttgggattctgaagacaaatagacgggcggtctagccgacatgcttgcatcatctaagcgaacacccatatatgatgcaaggacaaaggacaatatactcaaaaacaaggacggcgcttcttctattcataattcaagaatacctaacaactaacctcgccatcacagctagtgtaatccatcgtctcatgtattcgcatcgccttgagatggccgatattattatatcgcccttagttgtttttaaactgtaatcggttgtattttgccgatgtacaatggccgatattggtatatcgctcttagttcaattttttaattttatcaatgcctttgtcattgcaaaagtagggggcacatatattcacaagttgcaaatttggaaaatttttaagcaaaaagcatggagttatattaatcggcacaaggtttgtcaagactagttacagaatcatcttagccgattacaaaatgtgctaagccttattacagaatgtcactgagacaagtatcgttggatagccgatatagctctttgcctaatttgttctacttcttcgatggcttgggcatcttgagcatcggttccagggatgacttttagggacttggtcatatccgcgacattcttgatagccgattttagtcttgccttctgttcttcgacagcttgtgggagatcggctagctttttatgttccatgtccagctcggtgttgcattcttgaagttgtgccaagagttcaatcttgcgagcttcaagtcgatcaatattggatttgatcgggccctcagataactgatcaagcttggccttttcttcatgaacaagctgccgattagcctggattgtggcctcgatgtctttgcgctcccgacgctcggctagtctcagcttggccttctccagcttgaattgttgttgcttaagatagacagctggagtaaggacatcggctagctcatctgggatcagagcttgaacctcatgaagccgagtcctgataggcccacagtctaccaccaaactgtctagtgatgatgcttccatccgatgagagatatcatcaagagttctcttcacatcatcggataagggggctaaggctttgcttgtggtatcttcttttgtctcatcgaagtagtccttgatgtcaaaagagaatagatcggctaacacctgcaagaacaatttcaaggaagttgagagctaaatagtgttaacaaccaaatttggtaatatcagcatcggagaggaagatgggatcgaagcggaatcaaagataaggattgtcgtggaaacagagtaagaatcggctggagtccggatcagctacgattaagatcggctaagtcttggtcagactaggttaagtgattcagccgattccgacaatacgacttgtgtacgacatcgggttcaagttaatgtgcttcaagatgattgtcacaaacggatagagtcctgggaaggcaattgtatctattaattaggatattttatgtaaattccttatagataaatgtgggcaaaagtctgccgcaaagacttatggtatcttagagtttgttagagataatagtcatgtctagtatgggcatatcttgtaattctcgggtataaatagaccccgagccctatgtaacttttaacacacacgttcaatacaatttcggcgcattgccacccttttgctttagttttgtttcgacgagttcttgctttcgggttgagctgcatcggtttcgatcttcaacaaaaggtaaaacttgttatgacggcttatattcttgggattagtgcttccatctttatgatgctctaatcttttttatgtaattcgtcgagttatcatatatcttatataatctctaacaatatcgtcatctaacctacaatccgctaacatctgctaatagagggcagccgattaggttaaatatcgatgttggtttagattatatgagatatccaccactctatgaaacttccagcggcttgattgtctagatattgttcttcttttcatacttaatgctgcatcagttgagtttgatctattcagtcgtgtttagaatatcaatctctagcctgccttcttgttgccgattagggtagcatcagagtttcagccgatcttatttgatttaactatattttctctatatgcttcattgacatgttaaatctaccctttatatcaagatctggtcgcatctaagtatattaggcttctgcttgagtattttacttgctttaatatcttaatataaagtagtatcggagcaacttaaattatcagtatcagcctccatctccacaagcccaatattagccagggaggacaacccaacctcagtttgcttctcagtacagtcagttcgagcctatgcaacagcagcctcaaggagcagttcagcaacgaccgtgggccgacgtgatttccgacgtaatgagggaacagttcggcctcaaaccaaaagagactaggagcttgtatcggcagccctaccctgagtggtttgagagagttcctcttcccaatcgatttaaagttctggacttctccaaattttcgggacaggatggtgtgtcgacttatgagcatattagccgattcctagctcagtgcggtgaagcatcggctgtagacgctctaaaggttaggttattcaggttatctttatctggatcgtcttttggttttcctctttgccatatgggtcgatcaatagttgggccgatttggagaagcaattccatagctacttttacattgggattcatgagatgaagttatctgacttgacagcgattaagcagcggtatgatgaacccgtgcacgagtatattcaaaggtttagggagatgaggaacaaatgctttagcttgagtttaactgatgctcagttagccgatttggccttccaaggtatgattgctccaatcagggagaaattctcgtctgaagactttgatagcttatcacatctgatacagaaggtaaccttgcatgagtataggtaggcagaagtcaggaaaagctctaagaaggttaatcatgtttgtccatacatgtatgggtcggatgatgagaaagacgattctgaaatagctgcagccgaatgggtgaggagtaaaaaggtcatatcatgccaatgggtaaaaagtcctagaaaagagaagaagtatgacttcaatattaccaaagctgacaagatctttgatctactactccgagagaagcaaattcaacttcctgctggccatataatcccatcggctgaggaattaggcaaaaagagatattgcaaatggcataattctggatctcattccactaatgattgcaaggtttttagacagcaaattcaggttgccattgaggggggaaagattaggtttgatgattccaaaaagccgatgaaagtcgatgataatccttttcctgttaatatggtgcatacggctggtcaaatagccgatagggtccgtgcaaagggttttcaagtaaattcggctaagattatcaacaaatatcaaaggaaatatgacaagcagcaggagaagcattatgaagaatacgatgatggttttgatcctcattggggttgtgagttctttagattatgctggaatgaagggatgaggttatgtcacgcccagaaattcactagtaatttccgaacttatttgtgcataaaatcctcgtccaggaatcagccgaggtacacaaactgacaatttaatatactgattcatcaaattaactaaaacgataaatacttacttaataggcccttagtcctcaccatgaagaaaactgcagcgaaaaataaaatctagcgaagctccggctccactcccacaggcagctcaactggggtatatgccaaacgtcttctccttcgcaacttgtcttcaactgaggtttgattgattattgcaaggtgagcatatgacatactcagcaagctacacagcaaatatgcaagtgcataggataccaaaggatggcataatatagggctcatttgcaaaagcagtatttagcaaacatttaagaattgcaaaacagtagagtaattaatcatcaatattaatcaacactgaacagcacacccatgctgatcaggcccaaccatcctgaacaaccatacccggctgcacagatctatctccaaaccaggaatgtaccattccaaaccaggagctaaattaattaccatcaattatcacattattattaatgagtagtgtgggactaatcacgaaagacattgttagacccgcccataaccgcgggcacggctattcgaatagttttactctggccagaggtgtaccactgtacccacaagacacagccctacaacatgtcaccatgcgcctcaataccaccacggtaccacggaaaggagctgtaacagtactcatcgcacaacacaatccaccacagcgcactgttcctggatcataatcacccccttataaacaaggcatggactccccagcgacccccgtgggcttaactctgccacttctcagtctggtgctccacaatgaaccatgctatacaaaaggtaaagccgttgcctatgctggcttgtggttggcacggttaatgtttcacaaccgaaactcgtgaaccggtccttaattgtcatgaacacgaccatcaaaaccatgtgctcacaacccaccattatcaagttttagttggcacattaattaattcacaatcacgattgaccatcgtgagctacaattaaatatccatcattaagtaatagtgaagcattagttatcccaatagtgtgctaatgtttctaagcatggctaagcaattatgtctaacatctagctgaactaatatataaatccaactagtcaaattataaccccgaggtaatcaagaaatagggtaatcaatgcaaattggccataacaaaggaataagttcacaccacccggtgacattcaaaaataaatgcacagttaaaataaatagagaatttaaatataagatcaacatgctcaaaggaattgtgtttgggatctgtgtgacttgccttgcaataatcggtcttcaattaatcttcttgaatacttccgacgcacacgcgaaccatcgaaataacggaaacgacaagctaacatgcaaaacgaggaaaaagactaataaaaaccaaataaacagtacataaaagtaaacaaacatgtgtcatgattttagatgaatttagagacttgaacgacctcattccgatttcatatgaattaattacaaattttacaagattaaattccaattaaacctattgaagaaaagactattccaaattaattaaacaatttacaaatgatttataactgagataaaagattaaaacaacctccggaaaagattagattatatttggtagatgacatatattaaaaataaataatatgccactgaaaagagagaacggatttatatcaattttggacggctaagattaatcttgaccgagagttgaccaagatcggatggcttagattgatctggcaagcgagcctcacgagatatcgactcaacgaatcaattctacgtgacacgggatcacccaaatgttcaaccgaaaccggcgaacgaaactggcggctctgaacggctctaaactaatggacaactcaacacgggcgaacgaacgaaacacagggaacacctcgttcgaacgaacgagcgaacgactcaaccacggctacggctaaaccggtggactaggaacgattcacggtaaagccccggtactgcaaatgataggctggtaggaacctagggatgcacctacggctagacaacttggctaccgagcaacagctaaagcggcggctaggttaaagcggcacacagctgcgacacggtggcactagggcaacttggtttggctaggcggctagcacaacggcggcgacaagcaacaacggcacaaccggtagcgacgatgcacagggcagccggcaagtgacgcggcagcggctgcgttagggttagagcaacagcggcgacatgaccgagggattgaaacctaacccgaggggtcacggatagaagtctcaccgaaccaaagcggtcggagagagatagatgacgacggtgaaccggcggcaacacatggagatgacggcaatgctagatagacaacggattagattgaattaagaccctagggaaaaactcacaggtgaacggcatgggagcggcggttgccggcgaaccacggcacagtaacgcaaacggagggcaccgggagcgagaggggatcaaagtgacccttaccaccacttacgcgacgacgaacggcaacggaagatggccggcgacgagcttcgaagggcggcgaggtactgtccacggaggcgacgactttccggcgatgtgcggcgacaacggaggggtggccgggcttcacttcgcagccgcgaatccaatgcaggcagcggcgaaccttggcgatgacgggaggagcagcagggcttcgccggagatcaaaacgcgacggcgagcttcgggttgacggcgacgatggagctccggtggatttcggcttcggggagatggctgccgggctccctctccttcttgcgaacccaacggcggcagcggcgaccaaaagcggcagctaaggcggctgctagctgcggctggagatcggaacatgacggcaacccactggttcatggcgaggactgcctccggcgaggtttcggcacaaggggaacggcggccggggtggagctcgaccttgcggagccgatggaggtggcggcgcaggaagcaggcagatgaggcggcggctagggacggttggagcggcgccggcgcttggagagagaaggagagcacggggagagcgtttccggcgacggcggcggacggaacttgaagggatagggagaggacgactagggggtcctttatataggcacgggagctcgggtccaggcccaaatcgacgagaaaaaaatcgggaaagtctaggttctcgccggaaaaaggaaggatttgatccgcgaaattggaaagaatttccatagaaaattttggggatttcttggggaaaaggaagaggagattgaggggattccattcccgcaactaatttggaaagaggagcaacggggaggacggattggtgggagggggcggcggcactgtgcacgagcacggctggctcggctctgtctggaagaggaagatggagtactgtagcgcgagggaggtaaatcagactttgtctgggctgagaggaagggagagaatgggctgaattcggcccaagctgaggaggaggatttttattacttttccaaataaattaaccaatgagatgatctttcaattgttaaaaatactttcaatgctcaaataattccaagaaaaatcttgaacatacttggacactcaaagtatttaaaaatattaaaaccataccatttcatgattaatttattaattaaataattactgaaatattctttgtattattaaaattaggaattgagctctgaaaaatccgagaaaattctagagagtataattaatcatggagaatttaataaaaattaaatccatccatgctttatatttaggaaattttatttcccacatttaacttcacttgtaaattaatgaacatttaatataaattctattaataatttattaaatgatttataaatcctgaaacgaaaatcaggctgtgacacccaatttcgggttgcggcctcctctgctgcttcacttcgtagacttgtgaattttggcctgattcatcgtgtcaagtctgcgttcttggcccatctatacacaagtctggttctcgacatcgtccgattaatttatcgtctatgttgatgtcaattcttctccactttattgtcattctctgcaaaaggttagtagacctaatactagtggaatattattgttctaacatatttatgcattgcaagcatcactagttctctcctgttttagtaatattgacggtcagaactgatcgataacaaccgtcaacattgatgtacttcacgtggattgccacacacagattgagtcctaagaaggtaattgtatctattaattagggtattttatgtaatgtctttagagataagtgtgggcaaaaatctgccgcaaagacttatggtatattagagtttgttagagataatagtcgtgtccgacatggatatatcttgtaattctcgagtataaatagacccgagccccatgtaatcaaatcaacacacgttcaatacaatctcggtgcatcgccacccttttactttcgttttgtttcaacgagttcttgctttcgagttgagctgcatcggtttcgatcttcaactagagttaaaacttgttatggcggcttgcgttctttggattagtgcttccatcttcatgatactctaatcttaattatgtaattcgtcgagatatcatatattctatacaatccctgacaatattgctatttaaccttcaatcggctaacgtctatcactggaaggcagccgattaggttaagtaacaacattggcttagattatatagaatatccactactctatgaaacatcaagcggcttgattgtctagatattattcttcttttcatacttatagttgcatcaattgagtttgaccttataagtcatgtttagaatcttaatccctagcctgctttctggttgccgattagggtagcatcggggtttcagccgatcttacctgatttaactactttatgtgttatatgcttgattgacatgttaaatccgccctttacattaagatcttgttgtaattagatacgttaggcttctgtttgacgtattttacttgctttaatatcttaatatagagtgatatcggagtattagccgatacatgctagatctatctgatcggctatgctataaacttatataatccagttgttaatatatatttcgatctaagtgatttatactgtctcggcatggcgaccgatctatcctaatcacttgatttcagtatatatcgacataaggattatatattgctaatatctacagccgatcgagtagatttaattctttattatttatttacgaccgccgatcaatatatatatgacatcggctcaaagataaatgatatgtcatcggcaattagccgatcggttgtcatttatggatttaaccgcggtttctatctttctttcttgttgattgcaggatcaaatcaactggcacgctcacgaacctaaaggcaagcttttggacatgcactggagttaagcagatctctcaggcctggtgtttttacatcaacaccggtaagttggataccatgttttattttattatatgcaggtattgatggtcaaatgttatgatttaagaaccgtcaacatacccatttcccaatcattgatgtaactgtaatgtttatttggtttttgttagtgtttttcctcgttttgtgctctaggttcagtttttagtcatttggaaggattgttagttcgttggaggagttcctgaagacgatttgaagacgcttgtttgcgaggcaagtcacacagatcccaaacacaattcctttgagcatgttgaacctatatttaaattctctatttatttaaaatgtgcatttatttcgaatgtcattgggtggtgtgagccttttccctgtattatggccgaaaattattttattttcctatggtttataatttgactagcttggactttatatattggttcagctagatattaaatatcattgcttagctatgctgaaaaacattagcacacttttgggataactaatgcttcacttatatatcattgatgattatttaaaggtagctaacaatggctaatcgtgattggttaattaattaccaactaaaacctgataatggtgggttgtgagtacatggttttgatagtcgtgctcatgacaattaaggaccggttcgcgagctactgttgtgaaacattaaccgtaccaaccacaagccagcgtgggcaacgactttaccttttgtatagtgtggttcattgtggggcactggactgtgaagtggcggagataagcccataggggtcgctggagaaagcataccataagggggtgattatgatccaggaaaggtgcactactgtgaattgcgttatacggagggtactgtcacagtcccgtttcgaggtaccatggtggtactaagggcatggtgacatgttgtggggctgtgtcttgtgggtatcgtggtacacctctggccagagtaaaactatttatatactcgtgtccgcggttatgggtgggtctaacaatgttttggtgattaatcccacactactcattaatggtaataatgtgataattgatggtaattaatttaactcctggtttggaatgtttaattcctggtttggaggtttgatctgtacgaccagggttggttgttcaggtttggttggacctatgcaacgggtatgttgtatattgttggattaatactgtttaattgatttctctactgttttacatattttcaactctttgctaaatgctgctttcgcaaataagccctatattacgccattcttttggtatccctgtgtacttgcatatttcctgtctggcttatggagtattccatgtactcaccttgtaataaacaccaaatctcagttgaagaaaaatgatcaagaaggagaagaactttggcttagattctagttgagctgcatgtgggagtaaagttgaagcttcgatagattttgttttccgctccagttttcttcgtggtgaggactaagtgcctcttatgaaagtatttttcgctttagttattttaaagaatctatatataaaattatcaatttgtgtacatcggctgatttctggacgagggttttaatgcacaaattagttcggaaattacttgaatttctgggtgtgacaatatcaatgcagcgactgcagtgggaccagagatgattaaacatcatagagaattacctgcccaacaacataaatggcaatgcacttcggacggtgccatctttatttactaattaccaacgtacacatagagtatacgcataagaattgctacctgcatcacaaaataaatttcattctatacatgagtctggatatagaccatgtccagatttatgtacaaaagtgaacttattttaagatggagatagaattacataagcattgtgtaagcacatagtttgctgcattgttgatagctcagttctaaagggtgacaggattcacaaacagattcccaacatttccctgatgatacttcgaaaatgtatatgcatctttcttcttatcgtaaaagaatggcactgctacggccaaattcataactcgttgcaccacatggaactgcttttgatgatcacaacgaacctgattcagggttctccattcactttcaatcattgattcgatcttgtctaaggcaacttcgcttgtaaccttgtgctcattgatatagcactctactgtgtttgcggcatctcctttgttctttcttccagactgcatgagtgtgaaaaaaatatatgttacttcctctattttacaatatataattaggttttcttgacaatttttgtttcaatattatatgctgtaggaaatagctagttatatacatataacatttcagctctccactaataatttagtaatgtaaagtgattaagtagctggaccacattcagcatccaattccagactgcatacacatttaggctgtgttccataaactatgttgggaacttctcccagtgtacgtaaaacaggggacttattagcgcgcaattaattaacttttagttattaaaaacttgaaaaaattaatatgatttttaaagcaactttttatagattttttaataaaaaaagcacaactcaacagttcacgaaacttgagcatggaaaataagagagtagaagttaggaatcgtagttccgaacacagccttacatatttaaatacaataaattagggaagtacatggaattagtactctcaattttttttccaaaacagtaaaattgaattactgcatctataccttgaatgcagcaatgtcgttcatgaaacgcataatctttgcacaagctataacggcacttgaacgtactgttgtcaattcaaatgattccttcgttactgcatcaccctggccaactgcagcagtcacacagagtagtggaacagtactggacagggttgacaaagcaacccgctccttaaatgctggcttgtaattttgatgcaaccattcaaattcttgcaggtaatacgtggatagattttggaactgcacccatgcaaatcaaattagccaaaaaaaactagttagctacatcattataattattttaccgcactactaccatactcatcaaacaaagacatactccacccggttccaataattatcattttaggcaagttatacatagttaaaggttaacttcgtcgagttatttatgggtgagtggacagtgtctcccccctcctccacttgactatccttgtgcgctgccgtttgctttcgaggtcaaccaactgtaaggagagcatgtgccggccacccccttcccctcatcctcggcagtcaccacccaccggctacccgatcgagctagccagctagccatctttggaggtgagcgttgtttcaatgtatccacgctaatgtcaggttgatgcatctattttactttaaactaaccagtttgcttgtagccaaagccagtctattgtgaaatgctaagatgggatccttgtctgtaattttctttcgaatgctttttgtctactgtattaagtaaggtgcttgaatgctgagaggttgtgacttcatagtttcctattgtagaaaaaagccatggccttcccttggtttcttctaatattgttatgattaaaaaacaacatatttagatcgatgtatacacttaaagtctctagctagttcattattttgcgtgtatcttcagtccctgtccatcttgttaaggatatgtagttcgtgtgtcagtgaaggatatatattttgtgcaaagcccgctggaatacgattagattaagtataagctatgggttaattgtgcttcctgctagctagattgatatggcagataattccatttaagctattgggctaaataatatatgaatttcataaatagtatagaacattaaagcatgataatagcagccatatgattaatcagttatttatatccttggaattcttagactgacagttacttacatgtattcaatattatgctgtttgtagtatcctcagtaaccacaactttttaagcatatagcaggatcttattgaccagcttacaatattgtgtgtctcctatacgttgatatatttttaccataatctgtagtattctcaaggcaagtaaagaggagaaaatagatagagataaaaatgcatcgaaaagggataagatatctgcattcattgtctcatctagcttggaatattgctgccggaggacatgtagtaccataacttgtaacttatagtggtgaataaaagattcttgttgatgtgaattggcatgtacgtgtattggttatataacttacaggattgaagtttgcttaaaatttgatgctgaattgttgtgcatgcctatctgtagctttatcacttatgtatcagtaaaaaaaaaagagttcatttgcatattttgttgaaaaagttatgttcaataatccatatggatatgtggattgaattgttgggggggggggggggcgggaggttttcttgaacccattttattttatggtgccacatgatcttttttcctgacggcagcacgtcacaatttaggcgacaaaacccgatgccaatggaagttttctgtgttaaacacatagggaaacccataggaaaatataatttctccgttgtgatttttctatcggcaattcttgtcggttccctcaaaaatacaatttctacggataaaccctatttttctgacaatttttgatccgtagggttagcacaagtctggtagtgcatagaagtctacgtgtgtacagtatgaaatgagaagtttagtcctaccatgctaattttgggagggttacacaagtttacgtatctagttgtccaagttctagcaacacttactaaacattttacataaagtgaggatgaaaaagcacgtgtgttatcgtttaggcatggtttaacaaattcatgttgagcatacagctataagtattggtacctggattattacgattttctatcagtaatagatgttcaatatggtttcaaaattttaggtttggtggtgaaaagttagccctagattctatcccaaaattttctcattagtgatttaaacaaaagatttcagggatagaattttgggaactgttggtgatgctcttatattgaatatataataaatgtggatagtttattccaatagatgacaaatttcattggtgcacacgatcttttcttggtatatatcgataacatacagtaagaagaatccattaacgatcaatgcataatatgaagatttaaacaaatacaggaaataaaagtggaaagatgcagtacatatataactggtatacctcttttttcatgcaggtcacccggtatttgtcactggcctctacttgagcttcagtctccctgaagtaattcagcagtgcacggtagaactttttcatgtactctggtagtaatgagatagcactttcatcccatctgtccaataggccaattgggaatttttatgaaattacttaattaggcaagtgtaaataaatctagccgaaaaagatagtttgacagggatgtatcgcgttgaaaccacaaataaatgaatgaaatactttgtaaattatgctcaaatggacacgccatgtaccagtgacgaataaagtggtttgatgatgtttaatatttctcgaatgaaagacttgttaacattgtgtgaaacgcgtgaccataattaattgagatgtatagtgatcgataaattcgatggtaactgtacaacaaatttatttagttagaggatcaacatggtttttcagttgtgctttactcagattaattgtttaggtgcattaaacatcaaaaggtaaaataaacaatttcttttttatttgctctaagtagctcgggttcatggaaattgttggttcatatcatgctggcagcaacagctcggtaacaagaatactgatgccagctacctttggtagttgtagctagctctacctccagttgcacatctctgttttaattaactaaaagttggccttagctgtttcttgatagaatgacagtagaatatatgtgtatgcatgagcggtactctgcttggtcattgcatagtagttggaaaaactcgcatgttttgctgctctagaattagaggtggaatgttgaatgctcggaaaactacttttataggcggttacaatataattggtacccccatttttgaaagtgtttagccaaccaaatgttacatagggcctatagaaatcgacagttttgtgctagtggattgcacaactgcatgttaacaaatctatttttttgtattttaagttcgactttcaagtctttaattattgtaggcgcaaaaagtatttcatattttaattatcacaagttcgcaattttttcacacaaaatatgcatctagtatgtaggattcaaatccgggatctctcccttcatgtgtatcttacttattaccatcttacatatgaagcactttgttaattactatgaaatagacgttggtcttctaatttaaactctcctaaacttgtaacacatattaaaaccttaaagatttatgtagtgttcatttgaagtgcgattgaggtgaactaaagttatatatgatcccaacaattttttcattaaatttgtaaggtccatattttggtaatatccttgttcacttatgtcaagttcccattgtatgttttgatgtgttatgcaacttgacatttgtgaatgttcataataaaggaaatatcaaaaaaaaaattgactaggccatatttgaggaaatattgtaaggatctcatagaactttggattaactcaattggacttaaggtgtattttctatgaattttaaaactttagacttcataaagatctgtttgtaaaatcatcctattttaaaaagtagattccgaatttgtaacgaatatttcggcacctaaatgttcttaaatgaaataactttgactagaaagttacaaaccttgtcgagcgctatattgttttatagaaattgtacccgtcaacgtatgtaacaaaaaattctaatgtagaccttaaagcttcttataatgaacttttgatcccattaactacctaaaatagaaaaacattaactacaacatctcaacaagaactataattgtcacataacatttgtcattaggcgacatcataggaaagagttacaagtggtttcctaatagaactgcccttaaaaatcaattttattgattttttcttatgagatccgtatataaaaatgaccccacctttcaaattacgcgacccatttgtgttaatagacctattttcacatgcaatttttcataaggagctatctgtaaaaatagttttcttttgttatatgaccctgggcggcattagtcatcttcatagggacacggaaatggtttgtagtggttacgatgaaaaatgtgcatgtgcctattattgaaataaaaagactgccagcttttggccatctagacaatgcgtcagagacaaccatcccaatctatcccctccccatcccatctagaagtaaaagtataggtagggtcttccaaaaatacacaaaatattgaatctgcatgggaggggcagagggtagctaatgaaggggtgggagaggtgcagaggatcgatgggcacgcgtgtgacacattgcttagttaaacaacatgctacgtgttacgcaatagcacgttctctctctctctctctttctatctatctctgtatatttttccatagaaattactttaagtatatgaggttatatcacacggtcatgcatagcgtttagaagtttcaattgattcagatttacaggtataggggtagaatagttaaattttgatttatttttgggcttctgatttgatcatctgtacctttcaattttgaaaagcctgatctttaacatattataatattctgtgaaactttagaacttttaaatataatttgttgtgcggttttcttgatttctcttacaattggtggctcgagatgaaggatattaatttctgttgtttttgacctattaattaatcgtacctttgtatggcttcattcagcttcctgcattcctcgatggtggcatgatcatcatatgtgtcatccataaggacaatgaatacaattatcttggcaaggatcatccgtgtgagtgttaagttttcttcatagaacagcgcataggaccaaagatatgactccactgcacgatctctaacatgacttagctcgacatatccataaagatctttccaccacctgaaaattaaaatgatcgattgttttaggtgcttgttttgaagtatatttaagatatatatattagatcattagaagcaatgagtattaattgatttatgatagtaataatatgtacatagcatatcaggcataccgaaaacactaacaacatgaagagccatattgctagttatttcagtatatgtcactagttattggatgtttaaagccgcataaaagcctctagtgtattgctgctgcaaatgctgagacaaagattgataaaatattcggatattccttgaaggctagctgtccttcttttttatctgagagtggacaaattatatagtagtataaaccttaattttctattgttcaatacttgaaactacagataaagcgatacctaaactcggatacactaactacctcattaacatgacatatattgactacttctggacaaaacataaagttgtacatgtattttgtgattaattaacattaaattggttgcacaaacaaagcgtcaatttgtctaaaacgaggtacacattttatgtatttaccattcagtacatcgaaggaacacaacgtctctccagaattttgcacttatctatatctgtctatcctatatagtcagagctaaaatatccacatgtattgattaagttcatctgaaatacaacagcctttggattcctcctttactttgatcatagctacccacatgtcatgtgtattcagaattaaccacttagtataattgctttagagctcaagatgtattgagcaacatctcacctagaaagtaaaagccatcgaatccctctcatacttgtcataactattcatgagttgaaattacacatcaacttctacgtagctcaaattatagtccttttaggtatgacgagtaaataatttccaataggtttttatcaagctttcctagaaaacaaatacttctaaattctccactgtaatgcacggcccattcactaataactaaatgttctctaaattatctttactaactgtagagcgaagatcgaaaaacatattttggtagttgtatcgtgcacatacacagatttgagattattacagtggtttgtttctgtcctaaagggcacaatcaattactttcatggtatatatttacttattatatatataaatatcaaataaatactctttttttagataaaggaaatgaataaacctggtatctacatccacaagacatgtacaaagacaaagcaaagaaagactcttactgagaaaaagctttgagctccttcaagtggacatgctgcagaaggttaaattccagctttgcaagatctaaaagaacaacaatacattcttcctcctgtccgtactccagcatgtaatgcaacatttcaactctcttgtaggttctcggtaatggtaagtgtagggcacggttgatttgattatctagaggggccttgagcctacttccgtccctcattgattcgaggtggtgccttgcaaaagacatagcttcttcaagttctggctcatcatggacaaggaggtgagctgcattgtacaaacttaataatgcccttggttcatcagctattgtattgatgaacctcccatcctctcctttgaatttttcgaatacatctgcaaggcagctaaattaaatgtggatttttccttccaaaagacactagattcccttttcatacaattttttaatacatcggatattcttgactaatttttatgtatatattctaatctggacttgtattgaaaagttgtttgacacaaccataattacgaaaatgaatgaatacctacaatacaatgacttaaaatttgtgatctagagaaaaatacaaaaatttgtatatgtaagtcatcaccaatataagaaatactggcactattgaaaattgggcctatctgtcatatgcacatagtggataaattgttactccctccttttcatattataagtcgtttgacttttttgctagtcaaacttctttaagattgaccagatttatagaaacgaagggtgtattttgtaatagacttgtttggcattgttgttgtttgtaaaatacatagtaaatgttgcagtgagatagttttgaccaagttgcaattttgtgaaaatcactctgcaagttatctctttcagtatttattagtacctggagatacccaaatgccatgctccctaagtaagcgaaagtggagagcaacctcgtggagactagagctagtgaattcactttctttgatgtcacttattgcattgtttatctcatcttggaaaaggtgatctattccaagacgttgaactgcatctactaagtgcattttcttggctgtatcattgtgcgtctcaaacagtatacggacgtcctgttttagtttatcagccttttccatcatccaatcctccgatctctgtttatttgcatgcataaatttgatttgttagtatcggatgaaagaaatacaggaatgaataattaggtgaaataaaacattccttttagataacttgttggtgtgttgtggatttgaccaaattttttcttgccaaaagctgcattaaatcaaatgtaataaaaaaatatgataaaactccattgatccactaggaaaatgtgaactacgtcgcccctccatccttttaatttccaaatatgtgccgttctacaatgagtgcttgcaaacatttttaaagtacgtaaatagatatagaagtattaattatataatttgtcatgtgaatattgccgttgattttacagctaaaatatgccattcttactataaaagtcaagtcttagttgaagttgtgttgggaaaatctgcacgtcagaataccaaatgagaaacattggagggagtaattgcccacgctataaagaactattttcgtgaacaacccgtatatttttataggcggcctaagtaagtacctacctgtgaaaatgcgtaggctctctggtcaaggctctacgatgagagtcaattttcataggcaagcatgctagctaggaggcacatagaaaaataggatcattcttttaggtgcccatcttaaaggccgagaaaatcgtattttttaatagaaaatacccagagctgtctataaaaacaattgacaggtcggcctcataatagcaccacgtgtgaaaaaggcgaaacctaaataatatgcccatcaatctgcccgacctctagtgactctttatctcacatcatctcgtccttattccttaattatgtcatctcatatcgattgccacgatgcttgtattggatcaagatagggtttctacaatatgaaaataaaaaaggtatacctgtagtggctttgggtcatagttgataaagaaatccccccatacagagggctcaaagctagatacttcctttacaggagtgattgattctgaggacacaacatgtgcagcatgtcgatgcgcactgctttgtcgtcggaaggagacttttgccggggcaccagcagaaagaagcccaaccgatggctggattggacgatggcctatcctagcatgcacaacaccatgagagaagaagaaagggagagggatggaagttgacatactagtatatttcccttgggagggcaatagcagttcactgatactattgtagtgtggtagtctgatcgttgctttagctagctagctagctagctgctttatataggataaggcatagggcttctagaatgtactcttaaaaaggatactctctttgtcacaaaatagatactttctccgttcaaatattaggtgggcatggatattaaagaaataagtaaaaataatagggcttccacagtgaactcttaaaaggatactctctatcacaaaatagatactttctccattctaatattaggtgggcatggatattaaggaagtagctaggtaaaaatgattggatgaagtttgtgattgattgagaagaaaaaataggtagtaaaataaatagatagtggttgctatgtgtgggatgtgtgaaaaataaacttattttgcgagcagggtgtaataagcaataaatacatcccttataccaaccagtaaacatgatggaggcactaagcaacaaatatcaagcaagactataacctgctagtaaggaataaaaaacattaattcttttagcaagaaataattgcattgtcatttgagaaagcaagtgtattattgtctttttgttttgtattggtgcatgtgagatgtgtgaaaaatgaacttattttgggacgagggtgtagtagtaagcactaaatacatcacttatatcgaatagtaaatattttggaggtagtaagcagcaaatatgtgacaattgcattacaaccagctagtaaacaaaacttattttagcataagggtgtagtaagcgataaatacatctcttataccaagtagtaaacattgtgaagatactaagcaactaatatcaggtaatagcactacaacctcataggaaggaataaaaaaagcattgttactcttagtaatgaataatggcattggattttgagaaagtaacggtattctagttgtgttggttatgtattggtaggtggaatgtgtaaaacgaacttatcctggaaggcgggtctagtaagtgataaatacatcccttataccaaataataaagaaaaaggtatgaattaccccccccgaactatctcggtcgatcgaattaccccccgagtgggtggcgagccgctgtcagcgacgccacctcctcgccgcagccgctcctccccttcccttccccttcttcctctaggtccggcggtggcagcggcggaggaaccacttgggggggggggggtagggcaggcaggaaaagcggtgacagcggtggtggcggcatcagtgacagtggcggtccctgcctgtcactcccgcctccgaccagggccacctagccgcgccccttgccaattgccgctcactgccaaccaactcctcctccccgccatgccggagacgcgcccgccgccgctcggccagttgcgcccatagctgactggaggcaccgatccgtgtccgtcgccgctcatcgctcgccgccgactagttcgccctccttgccgcgcccgccgccgatcggaaccgcgctcgccgacgtatgctgaaccgcacccgtagtcgaccggagccacccagctgcacccatcgccgctcgccacttgctgccggccgattccccctccctaccgcgcccgtcaccgcttgctactcgttgcgagtcgcacccaccgtcgctcgtccaacagtgccagtaaaggggaattaatatgattggatttccatgtcagcgcctcgtaggatcgagaaggtgaccagtgtcgggactaactgctcctgtatcttccttgcttatcatgaccagttctcaagcaaggtgaccatgattgagagctgcgcgctaactgctgcgggtccactcgaggcaatttatacggtcttgtgtggaggagaataacctgcaggcagaaattccggtgcttggtgatgtggatcaacagtataccaccgtactaattcgtggattcgtctgccgaattccctcatctccctatcccagctgtcccgttctgacgttcacttccgtagcgttcaattaggattagacttccctatgctcaatcaggaatcagactcggtacatccaattggccattaattttgacaatttgaccctttgcaaaaactatttttacaaatgaatcgctgccaaaacttatttcaaatctgacccttttgctcaacgccaaatcgtgtggcgctgaacttagacagaggccgggttttatttaaatctattattaaaaaaatatctaattccacagatgaataatctgaacataagttcatctttggcgttagactttttttgataaagggagtagaagtagtacaagtactaataaatacacgcactttttccttccctatttttttgtttttcagatcgacaatcgaaacgactactaaaatataaataaatgaaactattcttcgatcaaagcaatatttaaggtcagcacaaaaatgacttgtaggattatatcactgttgcacaaaccatcttttaaccccggttgcaaccccttggcggagttatgtatatgggactaaagattactattttaagttccgattcaaatacctggcactaaagatcaatctttagtcccgattggtgccaccaaccgggtataaagatttttttttcatgctgcttgttgcatgtttatatattatgcatatatatgttccaatatatatatcatatataattatatatatggtggcgctacgtgaagcgacaaacagacgctgcgtgctatgaaacttcgtagcgctactcatgacttcccccaccaccgaggcaaccaacctctctgtggagttaaaatttaaatatgatacagttggttggtggattgagatgacattgttgtggagtaaaaattgaactttacaatgtgagttgttgaacttggagttacgtaaactcaaaatatggatgagttaactattaactttaaatcgatgtgataataactgacattaaaaacatttgttttattagttaaaaaatatgaagttgtagaaatacttatacggggactgaatatgtacttaaagtttagcttgtaaatataagatcttgtaatagtagttaaaaactaatttatgaaatttgtgtgatgttataattgttggatttaatagttaaaaagcaacttatagttataaaaacacctatatgatgtttgaaatgcatagttaaaaaataacttttagtttaaaaaaatgtgtgatgtcataattgttggatttaatagttaaaaaataacttatagttttcaaaacacctatatgatgtctgaaaaacatagttaaaaagtaactttagttttaaaaaaatatgcatgattgaatggagtattgattcggtgttaattgaaaaaacggttagacgaggtgcccaaaaaaggtgctttttttgtgcaataattcctctgaacaaaaccggactcttcgtttggatctgcaaaaaatgatgttacacatttttttggcgtgaattaagggaaaaaaaataggttgcgtaattgtcacgttgtattcattagaaacccgttttttacatgggatgcagcttaataatgttaaaaacataggggcgactatgtaaaaaattaacttggtatccttcctgagtaaaaaattaacttggtatgacaaaaaattttttactcaacatatacatcctcacaatctataagcataagttaaattttaattggcacttgctccggacatcgacggcggcgcgtcgtggaggtggccgcagctgttcctccatatccatcggagtccgagctcgccgccgcggaggtcacgtcgtgcgcgtgggggcggagtggtggcccgatccaccgtagcctcgcctcccgcctgtcacagccgcgctcgccgtcacccgtgcaggatccactccgcatcctccgttgcgccgcccgcatccatgcttggatacgctccaccgcaacaggatccgcgcacgtggggcacggagcggcagccggatgcgccgtcttctcgccacccccctccccccccacccccgcagtcgcccgtcgccgccgcacccacagccaggccatgccggatctgccgccaccgcgcccgccgccgctcggtggtggaggtggagtcgccgcgcctcccgcccacagtcgcccgtcactgctgcgcccgcaaatgtgctgtgccagatccgccgacgccacgccctctgccgctcgacgggagaggtggtgccgccacgcctcccgcctgccgatgcgcgttcatagtcgcctgtcaccactgcgctcgcagccgtgccgtgctagatccacctcccacttgccgatgccgtgcccgcagacgcccgtcaccactgacccaccgcctctccctcatatccaaaaaatcagattgggatatgcagttggttacgggatgggggaacaacacatgtatatatatgttgaaaagttgggcaacattaattaaaaaaattactcggacaatgggagtgggggacggggcacaggggtgggaccgagattggtcgtcgatgagttaaattttaactatatatagaactactaagaagttggttaacatttaataaaaaattacttggactatgggagtgtggggaggggcataggggtgggatcgagattggtcggtgagtaaaattttaactgcattctgtggacctagtggtaggcagggtggggagtgtgtgtgggtgtggggttccacagtgggtggggctgggggctggggttgtatcacgtgccgtttagtacatagccccttaaggtgccatatagtaattctctatatataattctctatatatatatatgtatatatatataagtcagggtattgttcgggtttataaagcaatcgattggatacaatatcgtggcatttttgctacgtaagtatgcatttttatttatagaccaatattatggcttaggctgattatacattttggtcctttttaggcggctggtaaatcctttatgagtttatttacacggattttacaccacatatgccgtatatttcttggtgtagtgaaaccatgtgtcttttagtgagttaagcatatttgttaaagcagcgtgcgcatggcatgtgcccgatactttagagatttctttattcacagcatacaagcttctttatagctatttttctatgtgaattttgaaagatgtagtcaactttaggttgtacgcattatattttttaagcagtcagttttatcacttgagtatcgtatactcgagggttcatactactattattatgctacttaggtggcttaaaccacttggatggttaaattatttatctcttgactatatgcttagattgttcaactaaacacatagtcaggaactacacttaattaggtgcatctaatcaattcacttaaatatatattcgatattatccttaaattttttcggccctccatagcctcatgatttgataaaagcgctcgcgagactatggcgaagatgattgaaatacttggctttttggtgatttacctcagcagaagattatcttttcgactgtgatggtcgtcttagtggctactgtggagaatatggttaccgggtacccacatggcctccatcactagtacagatccttctatctgtgacggactctaatatgcttagaaatagcggcccgtcacaaggaagtcatctcaatcgggccgaaaagtgcctgattgagatatggtcgcacagacatgttagatgggtataaaacttaagcccgtcacggatgacacctatcagtgacgggccacaactttaggcccaattgagataacatttcatatctcaaacgggcctaaagttgtggcccgtcactgatgggtgtcatccgtgacgggcttaagttttatacccatctaacatgtctgtgcgaccatatctcaatcaggcacttttcggcccgattgtgatgacttccttgtgacgggccgctatttctaagcatattagagtccgtcacagatagagggatctgtactagtgatggaggccatgtgggtacccgataaccatattctccacagttgccactt

SEQ ID NO: 4461 - DNA, 84969 bp, Oryza sativa
ccccccctccccctccctctctccacctctggtttccttttttggcaccgcattacttttctattttagtaaatttatgcacctaaagtttatatatctcaagtttacacatctaaagtttagagaccaaaagtttatatctcaaaagtttatatatccgattcaaatttgaatttgaattcaaatattttttcatatatagtatttctatacatctaaagtttatacacctaaaatttatagacctaaagtttatatatccgattcaaatttgaatttgaattcaaatattttttcatatatagtatttctatacatctaaagtttatacacctaaagtttatagacctaaagtttatatacccaattcaaatttgaatttgaattatatccgattcaaatttgaatttgaattcaaatattttctatatatagtatttctatacatctaaagtttatacacctaaagtttatagacccaaagtttataagtcaaaagtttacatattcgattcaaatttgaatttaaattttttatatatagtatttctatacataaatttttctaacttttattttttttaaaattttttttgtggtgtactgtagtaggaagagaagaagggaaggaggaagggggaggagtgggaggaggtattgcctatagggggaggggggccggatctgatcgcttggatcgatcgctggcgattgatcgcccgttagggccccctagtagcaagagacataaaaaaccgaggctatacaaaaggaaataataataataataataataataataataataataataataataataataagggaaaattacaaaaaccaccccacaagtcacccacaagtcacttgaagtttgacattccatcccataagtcattttgttgcaaatacccacccgctactaagttttgttgaaaaaccacccaatgctagggtttgaaattttggttcgaaatttccgaaatttcgccatcccaccggcatgctcaagtctcgcccaaaatttttggatttttgcattttttaaaaaaatttggtcaaattttattcaaattcagtcaaattttcaaataatttcagccagaaatttctgaaatttcaggaatccccggcataaaatccaatttcagaattgaaaaccctacccaatgcgcacgtgcttaaccaaatcagtttgttattgcggatgtagggttaccacatgctaagctagccaagtcaatcttgtctaagtgcttaaattagacttattttccatatttgattgtttttttttcatatagcgaaactcagtgcgacaatgtttaaactctcgtccacaattttatttgtggaatcttacataaaatgtatcaataatactctagaaatatttagttttggtaaggaccacattgatagatcacattttataaaaacatgttgattcggttaagcatacgggggcgtcccgggggcccgtgcggactgtgcgaccgaacagggcccccaaattttaagggcccttaaaatattaagtatgccatatatataataatattagaggctttaattttgttaacttgcagtccaaatagtatcaaacacaaggcccaaaacgctgcagaaggtgaatcgatccatcttccatcgtgctcccatccaggcgttcgcgtcgtcgcgtatcgccaaagtcccgatgccgcagccacttcatctcctctccccagttccctctagcctccgcttctgcttcatcgctgatgatcagctaatcgtcacgcccgtttttaattttactataaaaaaatttactaggctactatggcctattttaatatttcgcacggggacctgatttgaccgggacgcccctgaagcatgtgtttactggggtggttgttgtaacaaaattgagtaggtgggtgggcatttgcaacaaaataacttacggggtggaatgtcaaacttcaagtgacttatggggtgatttttgcaattttccctgataataataaccgacacgcgtaagctcttgaacacatgacacattccttctcccaccaaccactaacgattgctctgcactgtatttgtatgtactccaccattatataagtgacggagtgaaccaagaagcggcggagagaaatcgatcgatccgattccggccggccatggcagctgctgctccggcgacggcggcggtgcggcgcatgaagctgggctcgcagggtctggaggtctcggcgcaggggctgggatgcatgggcatgtccgccttctacggcccgcccaagccggagcccgacatggtggcgctcatccaccacgccgtcgccgccggcgtcaccctcctcgacacctccgacatctacggcccccacaccaacgagctcctcctcggcaaggtacgtacctactttcctcctgtcctgcccgctctcttgcttctttgggtttgtttgtgagagtgcgctcaaggtgctcggcggaatgcctgcttggatcggaacggcaggcgctgcagggcggcgtgcgtgataaggttgagctggccaccaagttcggcatcgcgttcgaagacggcaagcgggacgtccgcggggacccggcgtacgtgcgcgcggcgtgcgagggcagcctccggcggctcggcgtcgacagcatcgacctttactaccagcaccgtgtcgacaagaaggtgcccatcgaggtcacggtgagtgccacttccccagtctcctatccttctttcttttagaaaattttgtgatgtgtggatgcaaaagatacacgtgtatctgaaagggaaagtaggtggtggtgggttggtttgtcaatgggttggtgtcaatattctacaataattattaggacagctgccggaaaaatggacatcttttattgatgaaaagcaaaaaagaaaaaaaaaggagcatttgtttgttacccacttatctagatgattaatttcatattcattgggaaaacttactagagggaggatcatgaagttgttgaaattttttttaagagaggtcaattttgaacagaggaaattttaacccagcttaaggtacacttaaattcttaagtttgtttggctgtttgtacattgacctttcttttattcagaccaatttggtatgagttctgaaaggacagggtatgtaatggagagaaaggataaaaggaacctccatttcatggcacctatccttttattgttgtttttctacctcatcttagggctgtaccaattaaattttgactaaacatactagggcatttgtaaagatacgtggtacaatattatttgcattaagatctttctgtttggcataactccctatttgatcgctggtttctataattcaaaaatgttttcttctatttaaatattatacttagtttagatatatagtatttcatttactctagacattagctgtgaaattttgatgggtgacgaggcaaagtaaagattgagccaataattttcatttacatgtcactgggcagttacaacacagaatgctgtttttgtaatagcttgggatctgaagcaccaagtaaaccaatatttcaaagtttaataaaccaatgcacaaatatcaaaacaagtaaacatgagaggactgaaaatttgtgcaaatatgtttgctgaagaggactcgttctctttctgaacatctaactacaaactagcaaaatttactataacattttgataatgtgttttgattattttggcatgctataaactgaactaccgtccattgtatttttgtcaagtttatctagttgatttacattttacattgttagattggcgaactcaagaaactagttgaagaaggaaagataaaatatattgggttatctgaagcatctgcatcaactatcagaagggctcatgctgtacaccctatcactgctgttcagcttgagtggtcattatggtctagagacgtggaagaagatataattccaacttgcaggtattgaaaaaaacaccaaattagtttgtctgttgaagaaaatcacatgctccatttgaactattgttcttatttccatttcagagaacttggaattggaatagtagcttatagcccacttggtagagggttcttttctgctggagctaaactagtggagtctctatcagatcaggattttcgcaaggtaaattccatggtttactactcagtttttcctaagaattgggatgaatgaggtcatgaaaatagcagagcatgacagcgaaaacactgtgatatctgtagtgttattgtctttcagattaagaagaatagaataattaatttatttcctttcttgaaaccaattttgttggtgtgtttactcatacatcgtgtagagatgaatgatcaatgtagagaaaaacaagaaaaagatcatcaaataggcattcatgccttatattgggaaaccttctagtttaattctatgccttgtagtttgaatgatgggaatacccattaagtacctcttctgtattctcattttctgaactttctacattggtaacacgaaatacttatgttcaatagaaatatttactctgcatttatcggactcaaacctttattaaactcatctttgtgctgtgttgtctatttgttctttgaaaaattaaatagaactacaatgagttctcatttactaagaacttgtattgatacttttgcagcatattcctagatttcaacaagagaatcttgagaagaatgctgaaatatttgagcgtgttaacgcaatggcagccagaaaaggatgcacaccgtcacagctcgcattggcctgggtccatcatcagggaagcgatgtatgccccatacctgggacaacaaaaatcgagaatttaaaccaaaacattggagcactatctgtgaagctcacacctgaggaaatggctgaactcgagtcttacgcaagcacagatgatgttcgaggcgaccggtatcctcaggcgatggccaacactacttggcaaaattctgagacccctcccttgtcatcttggaaagctcagtaattgttttcatctgttcaaatacaaagtcctggtccaaaatagctgaatggcagagcgcacacaagattttgtagaacgtattcatcagtcgctggacgctgcttgctcctgttatacatcacgtatatttggaatgagatgtcctgtctgtctgtattgtgttatgttctatgctttcgtcatgtttgtgcctacaacctacttgtgtgaagtgcggttctataagcctgtgcactgcacgcagtacgtgtgctaataataaaataatgttttgcaatcactaattttgtgttactaacatgtttgttcaaattaagcaatgtcatgtcttattctatattcatatggtctgttgagtgctgactgccttgacaaccttgtttgtttcttaccttccccaaagaaaagttcgaccggaatttggttgtgaattgtgaccggtgggaggattattgagtggggtggtgaaattagcctgaaaaccgttgccatgactgagctaatgccatattgatgaggacacgactagctcggatataaccatgattatcttatatattaatcaaccaaaggtgcatatgttctatatttgatttacttgctatatatttgaacaaatgttgctacacaatgagttttgtgtattttcgtttgcagaggtactttcttgggcgaaagaaaagagaccaagcgtaaggaatgcatggatgattgaagaagttgattgaggaccaaaccaagaccttctccaagtcttttttcatatcaccacgtcacttttggtccataggagacaagagataaagttttacacgttttggattcggattcgggcctcctaacagcattaacttcaaatggacctagccgctgatctagaaggaatttagggacccatgagtacttattggaaagcttatggagtctacttttagatggtttttgtcccacgtcaaaattcctaccgagctaccgggaatctgcaaaacaagccatgtaccttatccagtccgaatttgatttgtgttttgggccttataattatgtcatgggcttaccccaagggggtgtgtgccctagggcaaccccagaacgtccctaatcatatttattcagtacccgtcattgtttagagtcgggttttgcttagattgttctgttaagaacagtttcgccgctagatcggtttgtagaaccataaattcgagtgcttaatcattcatatgcaatttggttgcaatttatcttgttcttgattgtgttcttcaattcacatgcagtgattagccttctcggcgaggttaaccaggttttggcacgattgataaccaaaggagacgtggtgctgcgcttgcggggctcagtagcgtgttcgttcagaagtcggatcgagttgtgtagcgactccgcccaaatcgactgtttattaatacatttcgaaagatcaggacctaacaccttcatcacatctggacctgtattattttataagcagtgatatatatttaaatactttgttccgctgaataagaccagtgataacctgattttaacactctgcgtgtaaaggtgttcacacgtagttttgaaaattaggcaagttttttttaaaaaaacaaccacacaagataaacacggctttacatgtacggaaaatgttaaaatcggcacctataatgcttttggtatctgaatgcgcgtctatgggatgccattttttaaactggcacctatatggtgacatagatactggtttttaagaaggactggcacgtatatgttatatcagacgtatgtgtcggttgttaacagaaaccggtacgtttaattgatacctgttctatcaaagtagttctttcggacccactttaaaatcgacatgtttcagactgttatatagagataccggttctaattaaaaaccgacacctttgagacatatcacaccgaagtgaccgaagtcatcatcagtgcggtttgcggggtgccggttgagaaatccgacatctaaaagggtttctcaaccgacaccaatctaatatttttatagtagtgatagcacgatcaactcgacaagtaactgccacccccaagaaatatagttaatgcagataatgaggaagtagatgaaacctcgcacacacggaactattatcaggaagtacttagtagtaattagcaattcccattaaataaccccacaagagtttttccacaaaaagattttgatccatacatttataaagatatgtagtataatactatttgcaataagatctgtatttttagcataattgtgcaataatttagctatatatatatcataaacacatacatgcccatctgtattatatacccactcctttccaaattggtcatcatattataaaattcaacatttcttaaattgatcatcatataaccgcatagacacggattttatcagaatacaattaatgtagcatgagagaatgtgtgcatgtaattggcatagtgttttaatcgatgcatacattgtgagagaatgtgtgcatagtgtcttgatttatgtgatttaaattatttttcgtctttgtgtataaatagatatgacgatcaatttaggaaggagagagtaactcttactccagattggtagtagaaggaaataggaagtacggtggctagatgttgggcttgaaaattggcccataaattacatgcagattagatcgatgttgggtttgaaaattggcccataaattacatgcagattagatcttaggatctaacggtcatgatatatcatgatattaatcaatggtcaattttttttgctgattaacatgagagctaatagaaagtgtatagatatagatagatatagatataatatagatatagatatagatatagataaagatacagaaatagatttagatatagatatagatatagatagagatatatagattggctcttaacattattttttatatactttttgttaataaataaatgatggaggtcccagcgacagagcccaggcggccatttgtccggcctgggagctttattcgccgctgtgcgggaccaagatattgcattttacgaattcacattccttttccaaaatcccagctctctgtacaattagaaaaaaaaacctacatctgtccactcactgattatgaagttgtatattgggggttacatggtttggaaagactcgcgtattattgtattattaaatggtatcgtagtgttaccacggcatattactatgtctacaaatgaaagcattatgttgctttcatcccctttttacctaaaacaaagtagattaactaattaagggatgacccctatgcaatattgtttagaaagagaaaacatctatctgggtaatccgagtttaagtccctagccagaataggtgctcatatttaagctaattattctatcatcgatagacgatgtacccgttgatactgagatgcattcatgtggttaattacttcgtcaatattaaaatattataacagtccagtgtttagaggtactcgtaaagatagcgtgtgcgtgtatgttatatatatggtgagtgagctcgtgcgtattagcgtatatatgagcatctggccatctgctattatcgtgaggggaaaaaaaagaaaggaaagcgacacagttggaaatttaaggcagcacgaccaccttttgtggcaaaatttgctacaaaacacacaaaaaattttatgtaatttattgatagacataaaaaaatatgtcacaactaaaagacatccttaaaagactggtaatttactagatgacactggaatgataaattcttaataaaacgagaaagcccctaaaatcacatgcttcaaacatgatgttaaagtaaaaatttagaaattatgaaaaatctaaatttaccatcaccccaagtacatcattaggatccattatattccatcttcactctagtcttaactcaaaagcttttgtcccccaacaaattaccagttctttagtgtttttttagccgtaacgcgtttttatgttctttagtgtcttgtatgaaattttgtcctttgcaaactgaaacgttcctttcatctcttacgttgagaagaataaaaaaaaacttggaactctttaccttatttttttttctcgtattatccaaaactacagggggtaatatgctactgtattaatttgccacggataatgcctgagaattctcgcgcgaagaaagacggggctgcctacggctcggacgcccaatgattcggagaaaaatcgggcgctgacgtccgcgcctgatttacgtgcaaaaattactttaaactgatttttttcttaaattacttatccaaatcatgatccgattgcaccattaaatttgttgcaattaaatcttcaaaacaagaccacacatagatatattccggcgacaacttttttaagcttattattgaattatttttaaatgttgtacgatgttccaccagatatatcggaattgtttcgctaagtagatcgaaaatgtttcactcgtttaaattgggtgttgtttcaccgtatataaaaataatgtttcagcaaatagcgaaagattgtttcagttcattgcaacatttgatccatacatagtaaaacattataaatgcactaggcgaaacattttttggtggaacaacaaataaaacgaattctcttaataggggtttctaaaatatgtgggttttttttgttgcaatggaatatttcaattcactgcaacgttacatctatacatagtgaaacattatgagtacactagatggaatatttttggtggaacaaaaaataaaccaaattttccttactagagggtttttaaaatatgtggttgatttgttagaggtggaggcaggtattgtggtgggaccagcgacatcagcgtgcgcgcggggacagggttgggggtagcgaacgatttttcctcccccgcccggtcgcccaacgaccatcattatccaagaaagacttccaagtcttcgaccgcgacactccttacccgcacgcgcggccatgggaatgtgaatccgacgtatggccatggaaaaactgatactccttggtctcggtaactatatgatgacatctttttaaataaaattaaactcgttaactttcgactaataatcatactaactatatatactatatactaagtattatacatactatataatatatcactagatttatattttaaaatatacttttatatgacactaattttatttttttaagaaatacaatatgtaataaattgatggtcaaaaggccctatttggatccaagggatattttttagtcctctcttaaatagcccaaaaagatccaaaagggtgagctatttgagggctatttgaaaataatccaccaaaaaactatcacatccaagaagtgctaattgaggatatttcgggtgaggtcctctgaaaaagtgtcttttctctctatctcttttcatgggaaggtacattaaagccaaatagctctcaaaataacacttgatccaaataacttagagctattttattaaagtgttattttcttgtgataaaaaatagctctcagagtaactcttggctaatttaggaacggagaagcacgtgcgtaagctcttacgcacactgtgcagcgacgcttgcagtgagttgtatggtactagcattaacccctatatatgtgagtggccagagcccacgtagcatcaccaccggaatcgcgcgcgcggcggagagaaattaatcgatcgatcgatcgatccgattccggccggccatggcagctgctgctccggcgacggcggcggtgcggcgcatgaagctgggctcgcagggtctggaggtctcggcgcaggggctgggctgcatgggcatgtccgccttctacgggccacccaagccggaggccgacatggttgcgctcatccaccacgccgtcgccgccggcgtcacccacctcgacacctccgacatgtacggcccccacaccaacgagctcctcctcggcaaggtcagttataataagtttcttcgtgcacgcttcggttgtttttttgggtactgggatacgcgctgaaggtgctcgacggaatgctcatgtgcgccaatatgcatgcaggctctgcagggcggcgtgagggagaaggtggaggtggccacgaagttcgccgtctcgttcgccgacgggaaggtggagatccgcggcgacccggcgtacgtgcgggcggcgtgcgagggcagcctccggcggctcggcgtcgattgcgtagacctttactaccagcaccgtgtcgacaagaaggtgcccatcgaggtcacggtgagtgcccccccttccctctctcctgtctttcagttcctttctgcttttttttttactttttttctttttactactttctccgtcacagaaaaaatatcacttatatggcctaaattaaataagggctgtttgtgaacaaggttataagggtaaaaaacaattgaatgattggtgactaataagataaatataatattataaaattgttacttattttgaatagattttaaatggaaagtggtttgattttttttacggaggaaatatctttttttttttggatgaaaggcatacatgtgtaagtgacggctgatgaatccgaaagggaaagtaggtagtgatgtgttgatttgtcaatgggttggtgtcaagattatacataaccagatgcgtggtagtggggaaagtttgcatgataatgatagaaataaggtttgtaaataagatgtaagatgggtttgttttttagctggactgaatatttgatcgatcatgttaaaaaagttataaataattcagatgatatggtttgtgataatttaaatcttatataaattgaccatttaaagtaaaactaaagttacgtaacttcatgagagaagaaaaacaagggaaataatatagatggatcatccaaagacaaaactgcggtgttgtggattcatcggagaagaaaaaagaggaagacgatttcgcctatagattaatcatccgtgggttataaaaatttgaggtgatgtggtatatactccctccgttccaaaatataactgtgtgtccagattcatagccaaaagttgttacattttagaacggaggtagtagtattattgggacaactgccagaaaaatggacatctttctatcaatgaaaaaaaaggcatttagtttgttttctagatctcgtagataattaatttcatattcattagtaaaactagaatggagagaggattaggaagttactgaaaaaaaatgtaagagagaattttgatcaaaggaaaacttgaacccggcttgaagcacacttaaattcttaagtttgtttagctgattatattatacatttgacatcctttctttcgttcgcagcaacttggtctcttaattctgaaaggataagttattaggttttgttgtaatagcaacatgaagcataaatttctttttcttttttctcgagaagaatttggaaccatacatttgtaaagatatgaaccatacatttgtaaagatatgtagcacaaaattatttgcattaagatctggactgtgtgccataaatcataattgcgtggaaaaccttacatgaatatctttcactgtcgatgacatgtgactggacggttacattactccatatttggtctcgatggttttctataattgataaatgttttattttcatttatatagtacatttatcttagatacagaggagggcttgttttattagacaatagctgtgggattttgaaggtgaagacgtaaagacaagactgagccaataattaattttcaccgacatgcatgtctcactcggcagttgcaacatacaatgctgttcttgtattagctgagatgttaaccacaaaccaaaccaacatttcaaagtttaacaattttaagatccaatgcagcaatacataaccaaaataaatagatatgagaggactgaaattggtgcaaatatctttgccgaagaggacttgttttcttgcagaaaatgtgagaatccaaaataggacctacagaacgtctaactacaaactatcaatacgagcacatgaactactgtgtttctgaaagcggatactagcacctgaactactattacttatgatatttccaaaccgttggatggaattattgtgtacaaataaagtgtactacctttcattgtatttttgtctgccttttaagtaatgacctttatttcttcccaatattatctagttgatgtttaccttttcattattagattggtgaactcaagaaactagttgaagaaggaaagataaaatatattggtctatcggaagcatctgcatcaacaatcagaagggctcatgctgtacaccctatcactgcagttcagctcgagtggtcattatggtctagagacgtggaagaagatataattccaaattagtttatccattgaaaaaaatcacatgccccattttaactatttttcttatttccatttcagagaacttggaattggaatagtagcttacagcccacttggtagagggttcttttctggtggagctaaactagtggagtctatctgttcaggatgttcgcaaggtaaattcttatggatactactcattcagttttccctaagaatggggatgaaggaggtaatgaaaataggtatcatgcctcttattttgaaacattgtaatttaattatattccttatatatagtttgaatattgggagtttccactaaataccttcgtgtgtactctcattttccaaactttgtgatgtatattaacgcctcgtctatttatttatacttttgcagcatcttcctagatttcaaccagcgaatctcgagaagaatgctgaaatatttgagcgtgttaacgcaatggcagccagaaaaggatgcacaccgtcacaactcgcattggcctgggtccatcatcagggaagcgacgtatgccccatacctgggacaacaaaaatcgagaatttcaatcaaaatgtagcagctctatctgtgaagctcacccctggggaaatgactgaacttgagtcctatgccagcacagatgttgttcaaggtgaccgctatgctcagacggccggcacttggaaggattctgagacccctccattgtcgtcttggaaagcagagtaaacgttttcatatgttcaaatacaaaatcccggttcaaatttagctcaaatggcagagcacacaccagattttgtataagtgttcattgtatcagacgcgttgctcgctcttgttaaaccatcgcttatgcttgtttgtgtctaaaacctagctagtggtgttgtaaagtgtggttttattagtttgtgcgcagtacgtgtgcgaataataaataaagttctgaggtcacattttttttttgttgccgacatgtttgttcaaaatttgaaattaagcagtgtcatgtctaaatctatattcatgtggtctgctgactggcttcacagccttgtttgtttattaccttcacctaacaataaatcgactgcattatatttggttgtgaactgtgtgatcggtgggaagattatattaaacggtgcgtgttttgaaaaaaaaaatctatagaaaaattgctttaaaaatcatattaatctatttttgaagttttttaaactaataattagttaatcatgtattaattcattactctgttttccgtgtcaaaagtgagggttcctgaccctcaagccttacctaagaacacagccttaaggcatccacaatatggtgtaaaagtagtccataagcaatagaatattccatccaaccacctataaccattgtgcaactagtccatatagaaaaaataacaaaaggtatccatatacatatggactacccatatggaataaattatattatctatctctactcatctctcttctcctaatgatacattgtatccatatatattgtggagattgtcataggtaaaaactatttatataggtcccatctatatggatcactttgccatatacattggtgatgctcttaggacacagactgtgtcacatcgacttgagaaacatatattactagaatatcaatgcgccaaaaggcacactaagtaatttaacccgtgtataattatttttatgaagcatgtatttaagaaaacggtattttttaatggaattagtttaacaatcataaattgtctataagcatcatacaatttaaagcatactttaatttttttaatggaattattagttgtttagttttaaagtataccgagaagaatcaaattaagacgggtagtaattaatgataccaacaaacaggtgaataagttattgtaatgacaaaaaaagtattttatgaatattttatcgtacttttgtacatttaaatctattacaatttgtaaaattagcagaatatttttttcatttttcatttgtatttgtttatactcgctattgtaaatttacttttactcgctatttttgatagtcatatttcatcttggaacacagaccaaggataagtaattctacttatcatccatttaaaatgctactagtcatttctcgtaaacaagcaattcattaatatttacatttctcgatgtccatatagctgatcttgcgtggaagaatgaaaagtcatgcattaaatccgagaaagttattaagatgatatgttgttgaattgaaatatgcctatcaaaaataaatttttcaaatttggaaatattactatcaaaagtagatggagggagtactatttaaataattggttttcgtttaagaaatcgcgtgcgtaattatattttaaaatggtattattgttaaatctgataatagttgcttttataatactatatctttaataactactaaaataataggaatctaaacactatttatttgtcacagagatttttatatgtataccaactaatagatgcatagatgtatgcatgtggccggtttagcccaaagcacacgcatgtacatgcgctggcttgggcgaactgtgcacgtattgccatgggccggttagtgtggatttggatcgtctgacttcaccctgcaaaggcatgggcgtgcagtcatcatttttccactgttcatgcaatcaacgactcacgcgtcacgtgcacttaacttttgttaaaacaatccatggcagccaacaagacaaattgataaggcaatccgatgaggtctcgtcgtcgctgccgccgccaccgccgtcgatgtcatcgatggcggtgactagctagcttagagcttgtttgccggtacgcacgtgtcgtcaccagccatcgcctcggcccaactatttttttttgttgttcttcatttttttggccaaagtatcaaatttgctaagttaatttctttgttcaactgttgatggtactaaagacatattttagctatggagactgtagtttctagtgtgttgcttttgttttgtcaatccttttttatttacgatctctattcactatctgttttgatttatgatgtggcttactcttcattgtactccacttagtaatgaatggtgttgtttgaaacttatgaattgcctgatgggatgcaatgatttatgctttgcttgctgagtagttgaatcgaatgcattctttgctctgctctgctcattgtaatcatgttccataatccaaattccaagtagcaagcatgctgcatcactgccgattgatacatccaatcctagcaggaagatggaatggcaaagcttccatatgatgcctaagacagcggcggtggcagcacgtagcgaaagacgagctccaggctattcgtcggcggcggcagcgatggcgggactacacgtctaccaaactgaccctgaagtctggaaaacgtgcctcttgttgggcggccataggtttgtgtggacaggagccgttgcattgcatggacggtggataagtgatgactacacgttcgtgccttcacagggtgaagtcagacgatccaaatccggttaatgtggctcagccgtggatgattagatgggtatttagcaaaggcgcatacggcgtgcggaggaactcggaaattctatcgttattaggggtgtaagtggataactcgtgaaacccatttatagactaaaataagttgcgaacctacttattttaacctataagtgggtgtgcagctgacccacttacactcctgatcgttgcgcacaacactctttctcacattgctccacgtgtcgctagattatagggacatctggaccaatcgaatctggaccgaatgaccggctttagaaatatagatggtgtaaggagcgatatatattaaaaatagtttgttccactgaataagatgagtgactagtgacaacctgacaaaagtacgaacatgtcaggtgtaaagatgtcgacgcattttttgaaaattaggaaagttattctcaattattatgcttgtcctgacaatattgcatttatgcatttctttgattactctaaagatatgcacgcgagcatggtacactatacttacacacctacgaatgcgtccatagcatactctcaaaaaaatggagacatatggtaaattcctgaactcattaaaatcatgttaaaagcgaatctatgtgcgattttacatgagaagaaactacagaggaaggctgaaaacttgaattctctagcggagttgccaattcatattggcatctattttgtcaacatggacccacctaaagatttacgatgttaatggagtcatgagcccccttaatttagaaaaactcttgacttcgatgggtttacaaaagattaaaaccggttagcgaagccaatttagagatgaaaccaacactagtagaaatgtgcccatctacgaaaacattattgtcatggtagatactgaatttgtcattaagaaatttctatgatgaatttgtgtgctcttaaaaaatggagcgtcacattagtttctttatgacgaatcaacaaatttcgtaatagaacttgtgtacatccatcaatattcaccttatgaggaacccgctttctgccacttgcatcttcctatatagattcaaagcaatttgggcatgcatcaaatttccccacaagtaatgggaggcactctccaatctgaaaaatagactctcgctgctggtgggccaacgcaggttgccggcggggaaattgatggccgagacatggcggagaaaccctagtactagggccaggggtgtgccacagttgtgatacctgtgcagtgaaggcgccctcatagtggaaaggtcagctggaggtgagagaggttttggcaaggtggatctccttgtgtctggaatctttggggcagcggcgagtgaggttgtaggggtgcttgaatgaaatatgaattgctagtcaagattagttatatgaacgtgaggctgtaaaaatgctaacatagtaaagatgcatgcttggaggaacttggacaatactgtgcgatcaccagacaaactaccaggtaaacgttctgaaatcagatttgtacgcacatgatatataacttatttgtaagacaaatgaacagtctctaagtactgatgtggatagttgtcctatcttctgataggtttgatttggtgaggtgaagatgttcacgcattgaggcctgcgatcagccgatcgtcacctcacaaccgctacagccacacgtatagtcgttatcaatcacgctctcatgcaatcaacctttctagaaggattattgctcctgcaaacaatcgaagaagttcaggcttccgcctccctcaaggagaaggttgcggaggaggtcactgctgtttcctccgtccctgctgccgcgggaggcagcgggatcaagaggataccctgggcctgggcgagcggcactgccagatatcggcagaaattcagctgctctgaggacccatcattctcatcttgtcggacttttcttcttcgcgggataatggaatgaggtcgtaatttactatcttactcaggacacgagcggtctccctcctcgtccgaagaggagactactgaagagggccaccgacaagtaagtgaaatctttgaccccctttgttgtcatgtctacaagtttattgagggtgtttttgatgtcagcaggaaggcctcaacgatctccgcccaaagcggtgacgaggtggcgactagcgggactcccgctgtcgtcctagatttttcacaatttggttcttttgaaaaacttattttgcaaatagatccctagaaaaacttattttgcaaatagacccctagaaaaacttatcccataaatggtcctatttgaggcgccagagtgcctggcgccgtcgtccaatgggacagcgctagcctctctggcgccgtcctcttgccgacattgcggggtggtgctgaggtggcagggggagcatgatgacatttttaaatactaaatgatttcaactgaaaaagtcatccacaacaaagttctggctcggacgcggcgacgatgacctcggcgacaacgactgcagcgggcggcggcggcgaggttgggcgcggcggatccggcacggtggtgaaacctatcccgccgccgtcactgtcatcgtctctccctcaccctcactcaccctctcctgccgccgccgctgctgccacgcactgcctccggcgcctcgcgctgtctcctccatcgtgccgtcatcatcatcatcaccgttgccacgtgctgccccctccgcctccacctctaccgccgccgccgtcatgtcgccgtctccgagcgattccgcctctgcctcctcgtcgcgccgttgccgtcgccaagcgcgggcttcaaggcggacgcggagaaagcggggaggtgagtgctcctctcctcttcccctctcgtctcccctatgcctacgaggaccggtgccttgtcgccgttgtcactgtcgtcccgctggttggcgtcgccctttcccctctccccatggtgtcatcctctccgatgccgcgccttcctcctcttcatcggatggggtgaggtgctcagcggcggcaacgagctcgacctcggcaggctgggcaacaacgtagacctcggtatcagcacggattgagctggaagaagggggcttgctcaattcgatttcccgggagggtgatggggaggttgccagatgagtgggggtgtgtgagtggcactgcgacgaagcttgtgcctagctatgatcgagtaaaaatttatattagttgaacccagttttttgggttaatactttctctggtagtacaagcattaagattcgatggaaatatcaggtgctgattcagatttcacctttgcatgcaatctatttctaatttcgtacttctgtgttagtaaaacttatataagtgatattaccatttacttgcaacaatctatcagtgtcagacctgaaattgttcaagcttggctcttcagttccagctgcacaattttttttgtatgggctttactgatgatgtactcaggtgacacaattgtacgatggttaaaaaaaggcctaggttatgatgttagacagttcataataagataagggaatttggtaggagtacaatttactctgcaagaaacagagaatttatgcttgttaatccctgtagatcattgagccatcactttcttttacagcagtagcttcgctcaagaaaatgtttgccttttactgaaaatttttttgtcctcgcagtgcgaccatcatcactgtcgacatgccctgtgggcgcatggctgaggccatctgcatatgctgcatgaactcaagctccgtctgtctctagtacgggatggatgttgctggtcaaggtagggctgatggtaagggaggttggagccgactgaggtaagtgccagttcacacatatcttgaacttggttttgaaatgaaaaattggatctgaatgctgatatttgggtggttggtttagtaatctaccttgcccatcgttgtcttctacagtcccataagattctattataaagtttaattataagagtgttgaaccagaggtctttccctcgtgataaagtagttgtataacctttaagtttagcaggaaagttgtctacagcctacggatttcatctctaggttctataggctgcgtttagttcagcgcaaagtttggattttagttgaaattggagatgatgtgactgaaaagttgtgtgtgtatgacaggttgatgtgataaaaaatgacggaagtttggatccaaactttggatctaaacacagccataatcattgttgccagttgttaagagcaactctggtctcgtggatagctttcaatggaaatatgtgtttcctatattatagagctgttacgctggcactagagttaagtaatggaaatatgatatgtgcaaaataggagacttaattcatacacttaaatgatacaagcacacagtttttttttatctcaagctttgcatgtatgttcttgccgtgtgttactaattatcttttggtgcatagctgcatataattcctatttggataccgtacctgatggtgctccttcgattaattcacacaagttacttgacatcgaccactgctgcattgatccttacgatctaaacatatgccacaaaaataactccattaacctatatttattcacatttagaaaaagaagattaggagggaggactaatattgttgagttgtttagtgacttaatattgttgactcccagtattgacactaaaattgtatttttgcagctatgtataagatgtagcaaaaaaaatccatttgcacatcaacaagaaggccttgctgtaattcaatcctctatttgctatgagtggaggacgagaagcaaggagtgattccattgaatgtttgaaagatttgttttggttttctgttttcagatttcctgtaactaggttgaatctaggatgaactattgtttgaattctgttgtattcttattgtatatgttattagttaaatctgcgatggtatctgtaattaggtttgaatctgaaatggtatgagaaattggattgaatttggtaggctcaaatttaatgggtctgtttagtgggctttgatttgatagttggttgacaaaatgggccagttctgaaatgggcctagctttgaaatgggcctattttaaaatgggccagtttaaaaaaattaatgggccgctgttaaaaaattaatgggccgttaaaaaaataatggggccatataaaaaaatttgctgacgtcagctgccacgtcatcacacacgtgtcaacgaccacgtcacctgccatgttggccgccacgcggcaaccatctatgacgttaaatttcgtcacaaaggttgggcctgggctagactacacgagcccaaaagcgtttaatgacggttaaaaaatgtcatagattgtgctgatccatgacgatttcggagaaaacgtcggcagatttaatctgtgatgctcaatagatgacgataagtagaatcgtcacagacaaattcctgtgacgaattttctgtgatccatgacgaatttttttgtcatagattaaatagattcttgtagtgcaatgatggcgttgtacgcgttgtcgaattctgcgacaccaaaggtgatatgctctgttcggaagttattggcctatccaaaggtgacgggtaacgtgacgttacccaacggtttagacgatcattctggagtgattacatggaagggctgatatgtgggcgtcagctcgcttcgaggtatccccataacgtccaaagtgctggcgaagagcaagttgattggactcccgccatcaatgagaacctgtgccaccttgatattccgaatagtgggttcgactacgatcggatatctacctggtgtggttgcgatcttggggtggtctgccttcgtgaactcgatcttatgctgagaccatttcatcttggcagtagccgcctgcgatgtggaccagacttcgtgttctacctttttgtactccctctttgaggtgtacgatgtagaaccgccgaagatatgagagacatggaggtcgtactctgggaaagcggagtcagagtcaagagtggcggcttccttagccgtttcgacgacacgaactggcttccctctctagatcgctagttgtctcgcgagctccattttgaaaacataacaatcctccgtggcgtgattgttagtcttgtgtatcgggcaccattacttgcgtgagtcgtcgttctgggggtttgggcgcctgggtgggtccgtttgctcagcagcgaggacctctcccgagagtttgcgcttcccacttttgcgacttctctttttgctcgactctggtgcgtctcttttggttgacttcttctcctcacccaccttgctctttccctccttttctcttaaagcatcatctgcatgggcacatctgtcgataatctcgaacaacttccgagcagatatgattcgtcgcgtcgccaactcctaggtggtgttatcgatctcggacgcctgacttgaatgcgcggataacagaagcatcggtgatctcgaggatcgtattcctgcactcattgaatcgccgaatgtagtccctcaatgattctcctaggttctgagttagggcatgtaggacatccttaatcgcgtggcgcttgtaagttccctagaagttagcaacgaactgctgccacaagtcttcccatgaggagattgtgcgggacgggatgtggaatagccatgagcgagcagatccttttaatgcagctggtaaataatttgccagtgcattgtcgtctgcaccagcagcgtagagaattgtggagtagacttgcaaaaatttttctgggtttgtacttccatcatatttctcgatttctcttggtcggaacttctcgggccatcgcacatttcggagtgagggtgtgaatgctctacacctgcctcctgggacggaaggcggcccatggttatgacgtcgtaggggaggtatatctgatgaagaaaatgacgaagacgaggatgaggggtcgcttggtttaggagcccggcttctcgaacaatgattgtgtccccgatctcgactaggcgcgggagattgcgaattgtgatctcgttggtcgttgccgtctcgctcctgatcttgggcatcgtcctgaactcagcgattggcccccctgatcttgctggttgttgtagttggtgtcattgcggcggtcgctgtgggcccgccggccttggtcttcgttaggtccacctcctcggtcgtcgttccttcctcgttcgcgaaggagagcagtgacgatgtcgtcaatgaacaatattctctccgcggcgagaaggggaatggtgtcgatgacgatcattattgttccgatctcttctgtctctccgtcagtcatccaagtgttcgcggagatcgcgattctcgcgatgcggttcaataggttcacgtgtcgcccgaggtgatcgattaccggagggatgttctctgttggcgttttttgcctccgcattctcggcggttggctcgccgttccctcagggctgatctcgtggtgatggctcattggccgacgtctggatttgttacgggatcaaagggactttccctcaatatcgcatctaggtttcacaactgttgacaggcgttctcgctgctgcggacggacttgtctcgatgttgtcgaccacgttcacatcccgtggtgactccgaagagaattcatagtcttccagcaggtgtaacacatatggctcgtttggattagtgccaacatatcctacaaaccgatctggagccggctccacatctcgttccttggcaacacacagagcttgaactcgtggctgttggacacgatgatgcggcactttgaaggtcctgaggaagatcttgcagcttgtgagatcgtgagatctggatttgtgaattggacagtagatggcgcccgttggtgaagtgcgttgaattccacgttcccaacaagcgtagagtttagccttcacatggactatcagtgggtagtcctcgagagtatgtttggatgtcttatgaacaggacaccaagatctcggtttttgtgttgtcatccttgtcggctctgatctcttgtatagagaacataattcggccgcttgaggattcctcccaggtgttggggccctcgatgttccgttctccacttgcatgggaggaatcgtcggcggggtgtcgtttctcggagtcgtagccgtgcctttctcgttcccggtaatgattgggccattcgagattggcgtaatggtatagatcggaaacacaatagatccgacttgagtccacaccaacgatgtcgaggtagaggctccttgattgacactggtgttggtactgctgtcgtgaaggcttgaagtcatactggcagaaccttaagcaccaagtccctctacctggcacgccactatcgacgagtaatactcgtggaccgaatgagctgaatattggggtacgttggaacgagggtctacgtagtacgacatcaagcagacaaaagacaaggattatacgggttcaggccccttgtcaggtaatagccctagtccagtttatatgagattgatgatgaggaatcacatattacaaaggaagtagacgaaacagacggtaccgacgagatcgtagttgatgaatccgatgagatctcccggcgactaggctccacgtactctggcttcgtaactatggtgtgtgtgttggcgatgaaatttgatgccttgcacccctccctgggggtcccttttctaccgtggatcatcttgacccttaagtaaggcctgttaatatctgatctggtacggtataacagaaactctacccttccgagtaggactttagaaatcacttgactcgtagagatattttccgtaattttgaacgaattccaaacggtatacatgggaacgatccgtgtgcgtaaaggtataccttattagtgtattccataagtcgtagggtaggaggtatgctttatccataaccctgacaataagtgaataaaatgagggagttaatttggaccatatattaatcatctaatgactaaaagtaattaaggtgacatggcttaattagaaaaaagagaaataacattaaacctataggacggactttatttatatataggatatattggatttcacctgttatcctgttcttttgttgattatttttctcactcgcatcctgtatgtataacgaaaatcaagctttaattagtagtataatggagaggcagcgtggcagcgctggctttgttccctgccatcatgctataaactaataatatataagcgtgtcacatcaatgaaaacataatgttgtacgaagtattcactactctactatacgagcaactagtaccaagatgaatctcgatgagatattatgttcctttttttttaaaaaaaaaacactgtaccagctattagtaccatgaagccatgcatgaatcaagggcaaaatgtacttatctactctctctgttcgaaagaaaaaaaagacaaaccctaaattttcgtatctaacgtttgactgtccgtcttatatgaattttttttataattagtatttttattattgttagataataaaacatgattaatactttatacctgacttgtctttttttttcataattttttcaaataaaacggacggtcaaacgttggacatgtaaattcagggtttgcctttttttttatgagggagtacgtaagtatcgtgcttcctaattattggtgatattactcaaacacgcgattcaggcatggaaagtttaatcgatcgagcatattctccgtgttaatcattaaattaatttagtgtgttcaaccctgacaaagttggatccgatcaccgctgttgagcccatatcgttacctctgacaggtttgatcctcatcaggtaacagtggttagtcatgattgcacctcatctctaatcggtggaagccctttagtgatgattaacatctttaatgagccatgtagtctagtggttacagtgacctgagtaatactctaaggttttgagtttaaatcttttatagagcgaattttagattgggttgtttacggggttaagtaccttatttcaatggtcgtatatatccggttagatatagaggctgatacttttttttaaaaaaaaaatctctaatgggccattttgaaatatcccgttgcaggtgagattcacctgtatgacatatggctctttcttgcctgtcacagatgacagattgtcattcatcaactgtcataggtgtgaaaattaaaaaaaaaaagcctcgcccccctagctcacgatatggaggaaaaactgtaggataaatatcaagatgcacgacacatcaactttctattttaatggcagatccaataacatcagagaaaaattaatggtttttgccaaattaactaatttgggcaacatatcctaattactcccttagtacctttcaaacacagtcactatccaactttgaacatccgtcctaattaaatttttttaaattagtatttttattgttcttaaatggtaaaacacgaatagtattttatgcgtgatctgtgtttttttaatttattaaataaaatggacgatcaaagtttgagacgaaaactgcaaaactacacttaaaatgagatagagggagtattatccttgcatggctagctagctactcccttcgtcctaaaatattagagattttggacggatgagacacttcctagcacagcggatggctctctagattcgttgtgctaggaagtatcccatccgtttaaaatctcttatattttagaacggagaaagtagctagcagaagtagtatgtccattgctctatatataggatgggtggcagcagggtggttaacttaactggctataagcattaattagcagaagctagctagatgatatactcgatctatatgtactactacaccagatcgatgcatatggatcaccgcttagcatgtgctttcaccatttcgcagccaccgccgcctgcatgtgcctgcatgtgcctgcaggtttcgcacaacgccaccaccactgctgcagctaggaataatagaagcactatcatcgtgtgcagcccaaacgcaagcagcaagcatcacagcagcagcaagcgtttacgatcatcgcgtgtggtgtcttgtcatgcagcaccatcgtctgctccagctgctgcccaggctcccggtttcgagccctcggtgtggggtgattttttcgtccaccatgaacctcggccaacgcaggaaagtttatactgtattatccgtacctcagtgtgtgtgaaattttctcaaccacagacaatatactccctctgtccaaaaagataattcttaggttttcgtgtccaacgtttgaccgtccgtcttatatgaatttttttataattagtgttttcattattgttagatgataaaacatgaacaatactttatacacgacttatctttttaatttttttcataattttttcaaataagacggacggtcaaatgttaaacacggaaacccaggaatcgagtcattttggggcggagggagtactacataaatatatatcattgtcatgcatgcatggatcgagttatgcattgagtgtcggttcaagttttacagaggttaataattttaaccgattaccatcgaatttgcattcctgcatgaaggttactacctctgtactcacttgactagagaacattttaattttttgtattgtagaaaaatcagcaaaatacacattttttctcgttcaatttttttaatattttctttaataaatattaaattagtatgctttaaaacataaaaatatattttatacataagagctctgtatggcaaattaacctatacaactgaaatatatttttcaatgtaaacttattctattgaaatattaaccattagattaatttgcatctagattggatctagaaaaagccttaaaaattggcatattggtcaacaacttagctagcgtgaacatttaggatccatatgtcacacatgagtcttttagccatggaagctggccatctcaacaaaggtctgcaggttttgcttttgattgctagttttcatcgttgcatccaggctagcatgtgcaaggaaagaaaccacagtgctacactccataacaatatattaaatgttatcgtctctcgacaatgcagttttgtcatgattcatatctccagtccttgcctaagtctcgtgattcacaacttattgttttaagactgagaacatgcaaactaacataatttccaaccaattcgactcctcaaacatatcttctatctccaataatgaacactgcaaaatacaaaacaatctagctgatatgtttagaatgcagaaaaagaaaacagaatgaatcatcagtaacactatctttgacaaacgcgggtgattgccatgtccatgtaccggcatgcttatttttcaagttgttgtactagatgaccactgcctactatattcttgtactgagggtataatttactcaaattgttatgtttctctttgtcatatatagcttctaaactattgctactgcttttgacgaatctcttcaagtctatctttttttttcctgcaatccaaactaacaaatcagtacattcatgcagcaatcgacagaatggatgagggatagggccgacaaattgaaagaggatgtatgcacactatttacacccactaaggacatcttaaggaggatgtacttagtagatgaaatagtgcatctaggaatcgatcacctctttgaaaaagagattgaaactgcattaaaagacatacatgaaaccgaattcactagctctaaccttcacgaggttgctctacggtttcgtttgcttagggagcgtgggttttgggtatctccaggtatttctctacttagttaatggattgtgcatagttattttggaactgttcattactacgacgattgaggaccatatatatataaatgttcaaaagagattgcgaataacgtgcctagctaaaccttggaacttcacaaacatttttatatcaaatctcacatgcagatatattcaacaaattcaaaggagatgatggtaatttcttaaatgaatttgctgaagacccaaggagcctactatctttatacaacgcagcccacctcttcatacatggtgagccagaactcgaggaagctatttcttttgcaaggaaccatctcgaatcaatgagttcgcatagtgttttgaaggcccctttagctgatcaagtgaagcggcatcttcgcttgccactgccaaggactcacaagagagtggagatgctacattatatgtttgagtatgaccaagagaatgagcacaatccggttcttcttgaactagcaaagttggatttcaacctactgcagcaggttcacttgaaagagctcaaggaaatttctaggtactaatatgaatgctaactttaatttgttattttgaataaaataaaatcaaaggctaagacaattcatggtgtacgaaattaatgaaagaaatatgcaataattaaaatcaataaaaatggtaatctataatatagtctagaacaaaagatttgatgaccattactgcaaatagctataactgtcagttgatttagaaaagacatactccttaattactacttacgtgcaccgtatagagtgtgttgcagtttttatagaataaatgatctaataacacaagcataagtttcgcggaacatgaattatgttttctatatagaaaaagaaaataacctgaacattaatataacttttattatatgatacatgtaccgtgctatgctacgacctttaactgtttgtgtgtatatatttaagaacctgaaagtaataactagtattaatttttttctcaggtggtggaaagatgttttggcatatatgggtctagaccatatccgagaccgtgtgatcgagtgctacacctggtcctatgctgtataccacgagaaagacttggcacttgcacgaatgatctttgctaagctagtcgcgctaacttccgtattggatgacacatacgatgtccatgcgtatacctccatcgaagagtgccggatgctaaacgtagccattcaagggttggacacttcattaatttttatgcatccaattaatcttaagttttggataattaattaaatttcccctgacgtaactgctagattatttaatcctgccctgactaataatgttataccgttccagatgggatgacagcgctgccttgcttgtaccagagtacctgagaaagttttatgaaataatcttgaggacctttagggagtttgaggatcaaataccaagaaatcagaggtaccttgctgctttctccaaggcagaggtatgactcactccctctttacttctgacccagaaaaaaacttagaccgtccttgtttatttactctcacctttgatgaccaatattttaactttgaccgttactccctccatcccataatataagggattttgggtggatgtgaggacagatggagtaattaataaccttcaaacaatcaatatatgattaatcaaaattaatcatatattttaatttgatgaatgacgtatcgtagggtggtgtatactttaggaaaaagtatgaattaccccgtgaacaatcgtggtagaccgaattataccctgaactcgaaaattggacattcgataccctcaactattgttttgaatggttttgacttgaaattacacacgtggcaccaacgtggcagcccagtcagcaaaacaaaaaaaactgggcccacttgtcatacttctccctcaatcccctcaacccagtcccttcacattcccccctgctctctcttgccacgtgctcggttggccggtggtggaggagaaccacgcccgagcgggtggaggaggcggaccgggcagccggcgacggatgcggacctcgcctgggcagtgggcaactaaggtggagctcgcccgggcagctggtggcggaggcggacccgacgaccgacagtgaatgcggatcaggctattgacgacggaggcggactaggcagccagcggcggaggtgtagctcagctggtgccttagatccagagcccgccgtgggccggtgggggacgagggtgacggcgatgaggtcagtgctggcataggaggaagcagagccctgggaatcaaggcgacggtcctgacagcaatgacgagtgggctcaagctcctcctctcaagccatggcactaccgagctcctcctcctcgagttccctcccttggttgtgagctccacaactctcctcgctaagctcgagctccgcctagtgcgagtccacgtgcacgtggctccggcaacaagcacccccttctccgagcgacggcaaaccaccaccatggcaccaagccacccctctccttcttcctgcctccactcaggcatgaatcccatccccttttgttgagctcagagaagacggggtcagcagcgagcttgatgtaaccggggcggcatccaactccatggcagcatcgaatcaaagcaatccccttgctgaggtcaaggaagatggagtcgtcggggtggcctcatgcccatgacgagctccacggagacggatccgcataggttgccattggtagagcgccggcggcagcagcaatagctagccgagctcgtggagccccttcctccccctccctgttggattggccctggccaccggtgctctctcctctgctcaccgagagagagaggctgagaaggagggaaaaaaaagagacgctgacaagtgggccccattgttttttatttgttttctgactgtatcgcgacgtgtgtgccatataggctgaaaatcgtatcgaatagagttacaatggtaatttgtccggttttaagagtttggggtgtcaaatgttctgtattgtagtttagggagtaaatcgtactatttcaatatttcgggagataaattatggggtatatatacaatacagtacatatgtccgcgatagaagaagtatttgaaagtgttttaaaccagagggagtagcataaaacctgctgcatatatatactaatttttattgtatattttgtagtaatgaatagtattggagcaattgatatcaattagtagtacgtactatatatttacatatctatctatgcagttagttttgtttcgtgaatacatttgaatccttaatttactagcttgcatgtgtgcatgccagttccaaaagctgaccagtaattacctggaagcagcggaatggtaccaccggaatcacaagccgagcttcaacgatcaggtggctctgggaaccgcaaccacaggcacaagatcgcttgctgccggcctaatgcttggcatgggtgatgctgcaacaacaaaacaagcattccagtgggctgttactagcactgacgccatcatctcctgtggaaaaattgggcgtttaatgaatgacatttctggattcaaggtaacagagagagttgaattaatttaatttactgctggagtagtattttactagttaccaagtaattaattaatctcaatttagaactccatgtcaacgagagagctagcatcaggtttgacagaattttccacttaacataacgctcggagatatcttaggctagtgtgtaaggacatgcatgtttgacacggctagcttcgaatccaatttttttaaaagctagatattttgattgctatctagctctagaaatccatagagctttaactatgtcgatagcatttgaattaattatcctttttcttgccattttcaaatccggtccttattgagaaatatatatagctttcaaaacatggtgtatttgtttctgaaataaaaaaacgcaagtactccctccgtcccaaaatataacaacttttagctctcaagatttgtcccaaaatataacaacttctccactaatccctaaccaatcacaaccccccaccattcaatttttccacttaactccactactcaaccaataataactctccaccattcacttatatatactttcttaataactgtgccaaactctaaaaatacttataatatgggacggagggagtataagggaaggacctaatattaaataaataaaaggggagaggcttcgaacccaggccgtaccaccttatgagaactctggccgtttctctatttctttctgaaatataactgtttaattattaatcactattcatttatacggatgcgcatatgcagcttgggtcgcagaacaaagctgacatggcatgcgcagtcgaggcctacatcgaggagcacaaggtcacagccgacgtcgccatcgccaggataaacgaggtgttggaggacgaatggaaaacaaccaaccaggctcgcgtcgaccaccgggctgttcttcctgtggtgcagcgtatgatcaacatcacgctgggcatccagttgttctacggcaacgactgtgatgctttcacgttcggcaaacagcttcaggaggttcttgaggatctctatgtcaagcccatgtccttattatagaggctgaaactaggtgaaaccccgcgcactgctgcgggaatttagtataaagatatacattgaaacattatgtgagttatgttggatgataatttaacatgtttgtgtttgaaaagctcttaaattataaaaactatgaagatatagcatgtttgcatgatgtttaaatgtgatgattgttagtggatgatgatgtggcatcttgttaattagtgaatgatgatgtggcatctttgcatgaagatatacattaaaacattatgtgaattatgttggatgataatttaacatgtttgtatttgaaaaactcttaaattataaaaactataaagatatagcatgtttgcatgatgtttaaatgtgatgattgttagtggatgatgatgtgacatcttgttaattagtggatgatgatgtggcatcttgttagtggatgatgatgtggcatcttttaatgttaagcttaaggagttagtggggataactttacagtaagataggattagttattgcatgcatgggaatgattaatgccaaatatatccatctgtctcgtagtttgctcaatcagtaccatatatatatttttttatctaattcacatgatgatcgatgtacgtgtccatgaactttttttgggcagcaactttcctctatttatctatatggacaaataatgctagtgttagctgctaatcacccgatcgaacactttgtgcgcacaaggcacacgtccggcacggcaacagacgagaagactgaagaatgctaggagaaattcagaacagataaacagagtatttcagagtttcagagaatcatgggagagagagaatttgtggggtaattttctggtttcttccattcaactgaattgtaaaaacttacaaatggaaaacttagctactgctacttatactccaataacagaaaaaaggaatccaagcctacaattgcgccatcccacgatccagaactcctggatccaatgccgtgcaaaactcacgcccacaacgcacgcctgacgcggtcgtcgactcctgcagcgcaccacatctctcgtgcacgcataacaaactcaaacctgaattattcatccagccgttgcaactgccacagtctggaacaccttggggccatagctgaaataacagtcaacaaattcccccttaattctgctatgacccaaaatcacgaacacctagcaggtgccgtgctgtcgccaatctcgctgttggcaacccagttaacacatccgcccactgctcctcagtccggacgaactcaatctaaatcttcccactttcaacacactcccgaatgaaatggtagcgggtgtctatgtgcttacttctcccatgaaacacaggatttttcatgagtgcaattgctgatttgttatcaacatacaacttcaccggcctagcgtctgcaccaatcatctcaatcatcaatcccctgagccacaaagcgtgacaagctgctgcagtggctgcctcagcctcacaggacgaaagtgccaccgttttctgcttttgtgaacacgaaatcagactattgttgagataaaatgccatatcgctagtactccgacgatcatcactgtcaccagccagatcactatctgtgaatccgatgatctccactgcacctttaccaccagcaaacgtgagccaacagttgattgtacccttgaggtacctgagaattttcttcatcgccttgaaatgcatcacagtccgatgctcgatgaacctgctcactacacccacagcataggacaaatccgaccgtgtatgcaacaagtaacatttttttgaacagtttaaatttgaatttaaaaatatgacaacttcaaacaacattttcaaatactaaatgatttcaattgaaaatgtcatcaacaacaaagttgaataactcatcaagatctaaaacttttatttttgttatttattcatccgatgaaatgttagtaatattattcataaattttacatatatgtgttatagtttataaaaccagataagagatatgtcaattttgtgaacaatgttactatcactttgtcgtatgaagaaatgaccaaaataaaagttgtagatcttgatgagttattcaactttgtttttgatgactttttcagttgatatcatttagtattcgaaaatgttgtttgaagttgtcatattttcaaattcaaatttaaactcaaaaaatgttatatagaaaaatgaccaaaataaaagttatagatttttatgagttatataactttgttgttgatgactttttcagttgaagtcgttcactgatctaaaattctatttgaacttttcaaactttgaatttcaaatttcaaattgtttaaatagagtcaaatggagaaatgaccaaaataaaaattttgcacctcgatgagttctacaactttggttttggtgacttttccatttgaaatcatttagtaaccctaatttgatatcttggcctagggcataataggattaatagaatactcataccaacatgttacaactactttttcggaagccaatcttcaaagaactttgatgtcaagcgtgcttggtctggagcaatttcagaatgggtgaccgatcaggaagttcccgcgtgggtgcacacgagtgagggctagccaaaaaataaaatttttatttttggattatactcatctgtgacgggcattcacccatgctatagctaatgcccgtcacagataagggtcatctgtgacgggtgctagttgtggcccgattgagataggtaatctgtgacgggctatagtttgactggtcgtctggatcaaagttatcggtgacgggctttacttagggcccgattgagatagaatcatccgtgatggccgtttgtccgattgagataactcttcacatcagtgacttctagcctgtgacggacgccatgcccgattgagatggggcttaccgtccgattgagatgagggtatccattctagtggtggtccatacaagtactaaactgaactttcaacttatgtgtgtatgccgacaaccatcaatcataaatgtttggttcgtatgcggaatccattttcgtttatcattgacaagaattaacagtgcttttccccatagactggttgcaatattatgaatgaaatagccaaatcaactttaaagtctgactgcaacaacttgtaaaaacttatttcattacttccttgaggaatatttcatcacaatatgatgcttgttaatgttaaaaataaaagatataattaatttattcatgggtttggtttagttctagacgttctttctctcctctccaattctcaacttatactttgtaggtcgatctgaccaataggtgatggtgagagcatatgagaatggagctggcctaggtgagacctgtgcaattcattcctcaatccaaaacttcttatgttgcttttcttaatcctattcacatgaacggcatatagcatttttatccattaaagggtaaatttaagtatagtagttagcagtcattttgttatacgatttaaagtcagttttgtggttttgttatgcagaagagtacttagcagttctttattaaagttgactgttatgcatagtattaaagtataattgatatatggatggattttgtttgaagttagtaacaaaattagtaaagttcaggggataagagggttgttgacactgaaaaagttgtgtgatgtgcaactaaataggtgtccatttaaattgaaatttatattctgcatactggggcttaattcctcaaattatttttgtctcacagatgcctaggaggactacattcaggttgctgcggagtattttggtttgctgatttcgacattcattttggtgagttacttgtggctcgacatagtgtggacttggccagtgaacctagtttcctcttgtggttgcatttggtcagttaacataggaccttattttgctatctaggatatggtggaattgctaaaaccaaacctagtttgcaattgtagctggatttggtgaagatgtactaaacatgttattattttgctatggtctgtactgatatgaggtcagtgatcacctgtatatgtgaatgggctttgattgtaagtactggtttgataaatggacttgtgctatattgaatgttaattgggcttatatatactctgttaaatggttgttatatctcaagcttatgcaagcttttgtaatgggcttatgagctaaaatagtgtttaaatagctgtcttatatgggtcattccaatatcttattggacctataattgggcttaacacataaacatattgcctcgtacatggaccataaataacaataaataacagcccacaagaaatttcatcacgattaatatcgtcacaattaacatgccatgtcagatgggacattgtactacaattttatgatgtttcttgtcctacatggcaactgcaagcctagtgatttgtgacattttctaggcttcgtaatgacgaacatgagcatcataaagcaatggtgaaagaaggatcgtttctaggttaataacaaattaaatacgttttcgttacaaaacatgattagagaggcatgataggtgacgatcgacttttcgtcacgcgatcatcacaaagtttgaaacgtgacacaattttcattctttgtgacacaaatgaaacgtcacctagctatcataagatctcttgtagtgtgggtgatagtgctcggtaaaaatgtgagccccagttttctaataggtgccctttttttaaaaaaaaatcggcacttatacttattttaaaagaatcgtcacctataatacaagtatatgtgtcggttctatttaaaaaccgggagtattgatgccggtttttctttagaattgacacatatattgcttaaaggtgtcggttctactttttttcatcgtgctgaggtgagaaaatgctatatttgccggttttaaatgaatcggcacctataaggccggtccctatgtgggttttttaagtagccttaacttctataaggcacacaaccataggtttgttcaatgaataaaaacatacggtgatgatggaacaaaccctcaactccatcttatttattaagtagccctaaatcacatagatttagctagcaattttaagagtatagcgccaataaatacagtaatattatttggcgcacatagataaaaaatagagcaacccaccatgataatcattatgagaaagatggatttgcattacccccatttgggcatgcagtaactaattttggcctctatatgggcatgggcttgacatagagattctcaagaatctcccgaagttgctcgccgaaagtgaaagcatcactgtcatagccgtagaacatcgggatggccatcgttaagttgataaggcgctgcgccactggaagaacagcctggttgtcgatccgagcccggttagttgttttccactcatcttccaccagctcatttatcttggcgatggcaacgtcgaccgtgaccttgtgctcgttgatgtaagtctccaccgcgcatggcatatcggctttgttctgcgacccgatcgagctgcaagcaattcatatgcacgcatccgcgatatgtaagaggctataattaatttagaggagggatataacaaaagtaaacttcagagaggaaaaacgcacaccatgttttttgttttgtttgaaatagaaacagagaggaaatctatatagttttagtttctagagctagaaacagacaatcctaagaaatcttagatctgaacctatggtaaaatatggtccagtgaagattaattttgtcaaacctattgcatggttatatatgttacattattactctcaaaacatgcatggtgatttctgaaatttacttcctaactaaaatactacaggtgaatcaattcgagcctatgcatcgatcgattaattaccttatatccggaaatgtcattcatgaaacgcccgatttttgcacacgaaatgatggcgtcggtgctagtgacagcctactcgaaagcctctcttgttgttgctgcatcgctcatgccgagcattacacccgcagctagtaatcgcgcgcctgtggtctcggtcgcgagagccacctgctcactgaagcttggcttgtaattccggtgggaccattccgctgcctccagataataactagacaacttttggaactatgcatatgcatatatgcacagaacatattaaattaattaacgatcggaatgtagctatccatgaaacaaatgaactccctcagttttaggttataagatgttttgactttggtcaaagtcaagatgctttaactttgaccaagtttatagtgaaaagtactaacattttcaacccaaaacaaatttattatgaaaatatattcaattattaatttaatgaaactaatttaatattataaatattattatatttgtctataaacttagtcaaacttaaaatagtttgactttgaccaaagttaaaatgtcttataacctgaaacggagggagtactagctagctagtaattgatattgttccaatatatactatatattaattacgccaaatatacaacaaaatatagtgtgtgtgtatatatatataggtaggtaggttttatgcgtttacctctgccttgttgaaagcaactaggtacctcttattgcttagcatttgatcctcaaactccctaaaggtgctcaacattatttcataaaactttctcaggtattctggtacaagggagacagcgctgtcatcccatctgcatgatattatatatattagtcagaacggtattaattataagttaatctgtgtggattatattttcaaatgtaaacttaacaaataagttcaaacaaatggtctaggtaatacaatactagaagaattttcttgtagaaaatatgtttcttgaagctagcgtggaataaaccattacacaataacatatactgcgaataagttaaattgaagaatagaacatatgcccttaattaactagcgcgaggtgttaaccagttaatacatatccatgctcaaatatcatacaataatgagtatattaagattatattgagatcgatgtgagacgtagaaataccccacccttgaatggctgcgtttagtgtccggcactcctcgatggaggtaaacgcatagacatcatatgtgtcatctaatagggtaattatcacaactatcttagcaaagagcatccgtgcaaacgacaattcttcctcatggtacactgcgtaggaccaggtgtagcactcgatcacacggtctcggatgtggtttagacccatatatccagaaacatctttccaccacctgaaaaatagttattccaagttttcttatatacataattaagctgacgaactaattaaataggacgataattaacaacatatatatagggaatctatctagcttggacaataattgcaaactaaaacctttattaattgttgtcatcataatttactaagcggtcagtatgatatatagcacggtacatacatgtatcccataatgcttaaaaaatatatttgtcatatcagatcgatttctataaaatgtgcaacacattctctccatagtgcgattattttctatatctttccgactattctggagctacctatgatctatcgatgatatacatatttgaatccattggcagttgtaacaatttataataaaagattgtcatttgtattgattttattgcatatttctttgagttttgtacagctagccatgaactgtcattacctatccttagatattatccttatacaaaataacaaagttattatgcatattagtacctagaaatttccttaagctctttcaagtgaacatgttgcaggaggttgaaatccaactttgctagttcaagaagaaccggattgtgcccattgtcttggtcatactcaaacatataatgtaacatttccactctcttgagagtccttggcagtggcaagcgaatcgcatgcttcacttgatcagctaaagggcccttcaaaacactatcccaaatcattgattcgagatggttccttgcaaaagaaatagtttcctcgaattctgctcaccatgtatgaagagatgggctgcgttgtataacgagattagaccccttgggtcatcagctaattcatttaagaaattaccatcatctcccttgaatttctggaatacatctgcatgtgagatttgatataaaagtgtttgtgaagttccaacatttagcttggcatgttatgctcaatctctttaatttgaacatttttatatatatggtccttgtgattgtaatcaacagttccaaaacaactatactcaatccattaactaagtagagaaatacctggagatacccaaaaaccacgctccctgagcaaacgaaaccgaagagcaacctcgtggaggttagagctagcgaattcgctttcatggatgtcttttagtgcagtttcaatctctttttcaaagaggtgatcgattcccagatgcactatttcatccactaagtacatccttcttaacatgtccttagagggtgtaaatagtgtgcatacctcctctttcaatttgttggtcctctccctcatccattccgccgattgctgcatgaatgtgtattgatttgttagtttggattgcaggacaaaaaaaaagatagacttgaagattcatcaaaagcagtaacaatagtttagatgcaatatatgaacaagggaaacataacaattagagtaaattgtattctcgtacaagaacttagcaggcagttgtcatatagtacaacaacttgaaaaataagcatgctagtacatggacttggcaatcacgcgcgtttgtcaaaaataatgttaccgacgattcattctgttttctttttctatattctaaacatatcagctagattgtttgtattttgcagtgttcattcttaagatatctttgaggagttgaattacttggaaattatgttagtttgcatgttctgagtcttaaaacaatagtaagttgtgaatcatgacttaggcaactggactggagatatgaatcaatgaatcatgagaaaactgcattgtcgatacgataaaatttaatatattgttatgcaggagtgtagcacgctgtgctttctttccttgcacatgctagcctcgttgcaatgatgaacactaccaatcaaaagcaaaagctgcagaccttcgtcgacatggcgtgcttccatggctaaaagactcttatgtgtgacatatcgatcctaaatgttcgtgctagctcagttgctgaccaatatgctaatttttaaagttttcactggatcgcatcatatccaccaatcaagttcatgtaatctagatgcaaattactctaatggttaatattgcatgcaataggataagtttacattgaaaaatatatttcagttgtgtaagttaattaatttgccatacagagctcttatgtatgatactcaacgtattgttatactcatctctgtttcatttaggtcataacatgttcctaaaattctgttccatgccatcttatctgttaattagcgcttcattgttttcgaaaatgatgaaattggtaatatcttgcacaccgataaaatggaacatgccacacatttttcgtagtgttaaccacgagatgctactttgatcacaatatatttattagagaagtttaaaaaatgattcaattttacgagagtaatttgcatttatgtatgacaaatttattagaaaagtttagaacatttatgcattcatttgtaatatataaatgcatttgaaacatacaaatggtgtatacatttgaaagattttttaaacttttataacaaaaaataagaatggtgtgtattgtgtatgtacatcacgtacacaagataaatgtatatatatatacgtacacaccatttttatgtttaaagcatactaatttatattaaagcaaatattaaaattattgaacgagaaaaaatgagtcttttgctgatttgcctacaatacaaaaaatgaaaatgttctctagtcaagtgagtactccctccatcccaaaatataagcatttttggctatgaatctggacaactgtgtatctatattcatagctaaaagttgttatattttaggacggagatagtatatatgtatataggtagtaatctagattactacctattcaatggtaattggttacttcctccgtttcatattataagactttctagttttgcccacattcatatagatattaatgaatctagacatatatgtgtgcctcgattcattaacatctatactaatgtgggcaatgctagaaagtttttataaccttaacggaggttgtggagattatgcatttcttctcaacagtttgatggattattgtcactgacatcatcaccagcacccctacttcatcggccctgacgtctccgccgttgctaaggggtgactacatcctcgctgtcggttgcttttgtcatcatagactttcatcgctgacttgttatttcgtcttcatggttggcctactacgcaactgccgatgggagacctcatcgttatcattgactgctacactgctattgactgaatcaatgatatgatcatcttcatcaacatcctaccatgcctatttgcctatgcctactctgctgctgttgatggtcaacttcgtcatcacagccggctatcttggttgccgccaattgtcattatcgccgattgcatttgccatcgccaattgttttcttcttttgcatgattgatggatttcgccattgctattgatgagcgtctacgtcttcaccaccggcttgcctctgccaccgcccatggtgtcatcgctttcaccgctggcttattatgcctctactgatgggcgtcttcgtcttcttcaccgggcacctcgtctgttatctactgtttatttcactgccatggctgcataactctgtcgccgttgctgggcgccttcgtcttcactgctggctgacttgactgttgccaactggtttcttcgtctccatggcaatgtgacttcatcacctttgattggtgtcattgtctttaccaccaccaacatcattgtcagctttgatgggtgatatcatctttgtcgacgggtggtaccgcgactagggtatttggatagtttggggatcgttggtaccagggtatatgcgagattaaggtaaaaaacatggggacgaggatttttatacaggttcgggcccctgaattgtcaggtaataaccctactcctgttggccgaagtcggtcgttgctcttattcactataatcacactagtacaatatttggggtagcctatctaactgttgtcgacttggcggtctgaagtgctgactcgtagtcgacaacagggtagccttcctcctcgaatctgcatccgacgagatcaaagataacgctatgtctctcctgacagtatccgtagacaccgtaggggactagccatgcttatctctgaaatcgatatccgccgtcttgtcttggcgcatgtttgcttgtatgttgatcttgtgtcttgatctattgttccgtgtcccctctcctcctagggggccttgtatttatacccataggtgtccccttgtcgaagtagaactagggaaaccaatatggatacaatccgagtagtccttgtcgtttccatgtagaactctattcatccttccttatgcgaaactcctcctatatccgaaagttgtttccgtataagacatggtatgtggtgggtcttattgagatttagtcaactaatattaggtatgtggtatccataaccctgacagtagccctcgacttcaatgcaaatgaatgagttcatattctccatccgaagacctcggaataactgttatcgatctcacgtgacctttctcggtgagttcagagataacgttagacttcccttatcatccttgtgcgggcaccgtatagggtttgtctgagtcaatctctgacgtcaactaggaatgtacagagcatacgactaagtctcccgtcttgctgtaatcgagaatttggattgaagtcaagaaattttatctcggcggatacaccatctcttcattccgtattccttgtcgagatccaccaaccattctcgagtgatcgatgttggtatttcttaacgacgttactagaaatataattctcagcaatgacgtagaaatactccaggtatattatggtcacagagtttatccgcaagcgcacggatataccattgtagcatttcacccgagagtattccaagggtattgtatttattttatcccgtgggaagatcatgtagagagaactcaattaataatttatatattacttgtgatatttatattctaagcaggggttaagataatcaaagggtagagtgacacacaagcattactactcattctcataatatattatctgagttaagtggaaagaaaagagaaagaaaatctattcctatacttctaatatacatagtatacatacattctagttaactgatatactagctaataccctctatccgatgccctcctagtacttcgagaagccacccctgactgccgagttacttacgacagcccgtcatgaccatacaaccggggctaaatatggaggaataccctccccagggaattaactttggattataaaccggcgtggaggaatatccgtacagagctgtcaccatcagcggcccacctctcatccgcaatatataaccctaaataatgatatcccgtaatctagacaccacgtctaaactaccagatactactctaatatcatagtcatgacatagagtaattgcataagcaaacattatacccacaccaaagcatctcccagataagctagccatatattcagtataacatgaacataatgtaaagtaggtactcatatacttggaaagtatttcaataccataaatgtatttagaagagtattctaataaaagtacaaatcttacaaaagagaaaagaaaagctactagagccatacccgaattcttccgaaggcttccggactcctgatttctactctattcctattccaccagctagatactactaaactaaacttgagagaaatgagagagctattgcttgaggtgtgtgagtgaagtgagaaggtgaagtccttttatagctgaactatgacggttgtgacggttggaatggtcggtaataccctccaaccgtcattggggcttcatctcaaccgtccagccaaaacctggatccaacagaggcgaggaaggttcggccgaaccaccaggttcggccgaacctggtgctggcccgatccagcccaatttcggctggtggccttctccgttgttcttctccgcagacttgtgaattttggcccaatttgttgtgtcaattctgagttcttggcccattcatacataagtctggttttcgacatcgtccgattgatttatcgtttgagttgatgtcgattctcctccactttattgtcattctctgcaaaaggttagtatacctaatactagtggaatattattattctaacaaacatatgcattgcaagcatcactagttctcctctattttggtaatattaacggtcgaaactgatcgataacgaccgtcaacaatcgagaaggggcagagtctgcgacggagccttgtcaacatttgtcgtactcgccttagtcgatcttggtatagaaccatagagacatggagtctttgacaatgtcgaatagaattttcctgaaatcaattcttagaaaagaatattagatagaaatagcccccgagtgaacgctcaaagggtgacatgttataatatgtatggaaaactgaaaatgaattaaatttacagaccaatgttttgtatatgagcgtcttctcttttaccgacttcgataagtcagtttgttgagtcatacactctccctagcccccagccttgtcatcagagataagttctcgaaggataaggctcttggacccttgaccggccttggttgaaaaagcgcttaccctagcccccagccgtgaagttggaaaacccaatttccgattaatggcttggttaatacgcacggtgagaactcttacatgaccagatcttacatggtcattcgtctctgcattacctgacaaggccttatccgctctgggcgtccccagtcgaagttcccttaggttcctcggagtccttgctagggcggcgtaaagggacagtaggattggtttcaactctaggtgttgtcgtggtaagggatctctgggtaaaacacttggcgatattgtgtacctgatatcaactttgttggagtagaggtaatgggaggatcgctacaccgctggttgaaaaccagttgtagccccaactcgaccacttgaagtaaaggtagtgggagaatcgctataccactggtcgaggaccatgtagtagttgtaactcaaccactagaagtcgatgtagtgggaggaattgctacaccgctggtggagaaccaggtgtagccttaactcgaccacgagaagtaaagctagtgggagtatcgctacaccgcttggtcgaaaaccagatgtagccttaactcgaccacgagaagtaaagctagtgggagtatcgctacaccgcttggtcggaaactaggtgtagccttaactcgaccacgagaagtaaagctagtgggagtatccctacatagctggtcgaaaaccaggtgtagccttaactcgaccactagaagtagaggtgcgagagatcgctacagcctactggtccgagaaccaggagtagcctcatccgtttgccgattgatgtcgaggtacgagagatcgctacggcctactggtctgagaaccaggagtagccttatttctcgaccaattgaagtggtgcgaggaccactacgctactggtcgaagaccactcatagtcgtacctcgaccatctgaagtcgtggtgcgaggaccgctacgctattgccgtagtcgtacctcgaccatctgaagttaaggtgcgagagattgctatgatttactggttcgagaaccagcgagtagaattatctctcgaacaccaatgggggcactagagttggtttattacatgtgcatctcatgtggccagcatgactcacatacccaacttgtagcatatccggatgtccgtccgcaatcatgtcgggtgatcaagccgacatcgttcgcgagcaattatccgttaacaacccttttctcaaatagcccagccatagccggtgctatgagatagatcattggtcttcgttggtaggttgggtgcgacaactctgcatttgtcgagaacgttctcgataatggggtgtgctcgaccacaaactactcgagtgctcaattgttcctgaaaaatattgtctagaagacaagatatatagcaaaaaatatcgagtatgtactcaaaagactgcatgaatcttctagtattatcagggtataacgagcagattaaatattagacattatgtaaaccgtaaaaaagcatgatttatacagaagaaaatagaatgagcccccagcattaaaccgtagtcggcctaatatagggaatgcccacataatagatattgtataaagaacatgttctaggtaaacataataaattattgatctgataatattgtatgatctcgaaaataggtacgataaaatgtaaataaaatattgcgtacctttttagatatatgccggatatatctacggaattagtaaattaatttaaaaaatcaatttagtaaatacctatgtatttatatggtggcttggtggacagctgtatcagtagaactccattgtggcctcgtgtattgcctctgtccatgtctcggaacgcctgctagttggggagtaccaatgcatcaatgcatctgggcttgctggtagtcttgccggggtctgttggtaacaatggacggacaggaccaggcaaacgtagcagaatccaactcccatgaaactaacatgcgtagtcggatggctctactcatgaactgataccacgtcacatactttgtgatcgggcattgggatatgcttttatccgattggtcgaagagattgctggcctggtatgtttgcattaacccagatgaaaacatgcatggttaaggctccgcgcacggctccccgatgaccacaagcacatcatcattgcttctctgcggcgtcggcatcttgaattttgttgatctccataggtcaaattattgacggcgatagctccgatcttgttggaagacatactccggttgggttagatctccccacaaccgaagtcgtcgagtagcttgttgttggagaattcatctcttaaacccatctcgtcgtaaccttgaagcaccaagaccccctacctagcgcgccactgtcgacgcgtggtaccgcgactagggtatttggatagtatggggatcgttggtaccagggtatatgcgagattaaggtaaaaaagatggggacgaggatttttatacaggttcgggccactgaattgtcagataataaccctactcctgttggccgaagccggtcgttgctcttattcaccataatacaccagtacaatatttggggtagcctatctaactgttgtcgacttggcggtctgaagtgctgactcgtagtcgacaacagggtagcgttcctcctcgaatccgcatctggcgagatcaaagacagcgctatgtctctccagactatatccgtagacattgtaggggactagccatgcttatgtctgaaatcgatatccggcgtcttgtcttggcgcatgttggcttgtatgttgatcttgtgtcttgatctattgtttcgtgtcccctctcctcctagagggccttgtatttatacccataggtgtctccttgtccaagtagaactagggaaaacaatatggatacaatccgagtagtccttgtcgtttccatgtagaactctattcatccttccttctgcagaactcctcctatattcgaaggttatttctatataagacatggtatgtggtgggtcctaccgagatttagtcaactacaattaggcatgtggtatccataaccctgaccatcttcatgttggtcatttcgtctccatgccgactgcgtcagctaacatcaatggacaattgtgactacaatagaaggataagctacatgcttaggggcacatcaacacaagcgcgaggattatatcttcaatttggacttgttccagatacattcaacatggattcatggtcatgagtcgatttctcatgctcaaacgattagactattcattattccccacgagggacatcagctgagtgcttgcactagtcgggattcaattatcacatctactttggtattcttcatgagggataattacgcgatctacatcacccaggatatttatcacttgggatcatattaattggtgtgttctatacgtcatattttaagggtatcggtagatatattttaggtctaggcctaatatgtctgcagcccatattttcaggtgtggcctgtcacgtttttttagggactaaggcatttttttgcttaggcaaaagtgcgcgtgattaagtgcccaataccttaaaatccttttataccgcagttactcaactttttagaagttggtacaatgcattttaaaaggtgccgaacagtgaagctttatatagctaccccgctgactttttatatagtcaaggcattgtttggttttataaagcaattgattggatacaatatcgttggtttttcgccacgtaagtgtgtatttttattaaccaatattatggcttaggctgattatatattatggtcattttccaggcggttggtaaatcctttatgagtttatttactcggatttttcaccacatgtgccatacatttccaggtgtggtaaaaccatgtgtcttttagggacttaagcacatcttttaaagcagtgtgcgtatggtgtgtgcccgatactttggaaatttctttattcacaacatacaagcttctttatagctgttctgctatgtgaatcttcaatgatgaagtcaactttagcttgcacgcatcatattttacaaagcagtcggtatatcacttgtatcatgttattcggggattcacactacatatgccatatattaatatcaagtcacttggttgactataattatcgaaaaccactcagttggttggattatttactccttaaatatatgttcagtttgttcaactaaccacatagtcgggggctacacctattaggtgcatctaatcgatgcacctaagattacatttaattatttctcagccctccacagtcttcagatttggtaaaagtacttgggagatcttggcggagatgattgaagcactcggctttggagtaatctagtttgagagaagattatcttttcaacagtaaaggtctcaggggtactgtggagattatgggtaccccatacacatacggcatggttatccgactggttataggagataacttatatctatgaaatatgtaacggatcatgacttgggtattatgttttcttgtatattatggaatggcctaaagtcctggtttgataatattgtaaagtagatttaggaaaccgataccgtattggttaaggtttctatcttgtaatcttgccccccatcttatataaggtggacaggaggccctctagagtgcatgtgacataaacagttcatcagatcaatatacacccagcggattcaaatccccaaacaggagtagggtattacctctcatcgagagggcttgaacctgtctaaatgcttgtctccgcatccatccacttttaggtctcgtgcgctaccccttttattattgccgaattcttgtttcggcagttggcgcgccaggtgggggtgcgtcgagtttaccgtcgacgagtgcgatggaacaaatctcagaagttgtcggcctcatcgttgctttaggccgggaagatcaatcccgacgggttcgatgaatgcaatctctctcgctgccgagttctttccttgatcagtttccatgaagagcactgcagcgatcagcatccagtttaatttgtctggcgagatcaaactatcaagcaacagatccattcccaagaatcggcgtcttttctcatcaacatcaaaactcctggcgatatccaatttttagcgtgtttgcttgaatcggagtcgacgtggaatcagccgacccaattgattgagcaattatcttgaagtgttgcactgtcccgtatgcatgtatggctcgtgcatgtacatgtatgcatactcgccaagaagtcatcaccgagcaacaggagcgctcaaacaaatatgcatgcattggttgatatgctacaagagtaataatataatcgtgcaacgatgcatgagctggatactacgaactattccgaatagctaagtcgctttattttctcattaattttatattctcatctgagttatattttatatgctcttgtctttttgacaagattattctacttattgctttctttggcatgtaagtatacgacaatcaagatcaatcggtcatccgtggctaggcgagatggtcgttaacctactgtcatgcacatgtatcacctacgtgggattcacagtagcatgtatggatcaacacacatgatcatccatgccgtcaggatttttgcatgaatttgtcaagggctgtgtgctgccaccatcgctattgatgggtgtcctcatcgtcaccaccggctcgcctcgtccgtaaccgattggtgttctcgccatcacggttgaatggtcacaccaccgttgataggtgtcatcatcttcaccgaccggccatctcgtccggtgtcaactggtgtgtttgcctatacggttggttggtcacaccgccattcatgggcgtccacgtcttcaccgaccggcttgccttcgccgccaccgactgctgtctccatctacatggctggcctattatgccgtcgttgttgggcgtctacgacttcaccgccggcctgcctccgtcgccgccgactggtgtcctcgtctatacggttggttggtcacaccaccgttcatgggcgttcacgtcttcaccgaccggcttgccttcgctgccgccgactggtgtctccgtctacacggctggcgtattatgccgccgttgttgggcgtctatgacttcatcgccggcctgcctctatcaccgccgactggtgtcctcgcctatacggttggttggtcacaccatcgtccatgggcgtccacgtcttctgcaaccggcttgccttcgttgccgccgattggtatctccacctatacggttggcctattatactgccgttgttgggcgtctacgacttcaccaccagcttgccttcgccgccgtcgactggtgtcctcgcctacacagttggttggtcacaccaccgttgatgggcatttatttacctacatcgctggttgcctcagccgcttacacggttggtgctttcattgccattgatggacgactttgttctcacatcgactacctccgccgtcaccagcgggaatactaaaaagctaagtctttgttagttctattctttatatgtattttccttttcctctgcctcactacatcaactggttcgccttgactagtgagtcgggggctaaagatgttatatcatattttttctacaattttcatatatctatcttgattgcttgcgacataatctgagtaaaataaagtgcctatcgagttatggagctctttttccctatgctttccgttttgtttgtcgatggatagttgcctttggaccgattcctagcacccggggctcgttggatggacgaagtaacgcaaggtgctaagtattaatcggaagaaatcaaaagcatagagataagataatttattttctggtcttaacaattgcaaaagtatccaagtagtaaattctgatccgtgaaactttgttccattaatgacgaactcatgtcactcatttgcatgtctgggaagtgcctccgccgactcccgatgcgtgggagcaatgactagtcgggcaaagtgtttaaacgtaaggagtcatcggttcggggagatcaaaattgacaagagaagaaatacatatttataaacattttaaaattcttgaattttaaacattttaaaattcttgaatttttctcgagtattatatttacatcagatactactcatcctatatgtttgttctgtaggatccagatccagatatacataaaagggattcatggctttaagcttatctcctacgctctaggaatggatcagtcagaatcaccaccggcttgccgtcgtcgccgccgactggtgtcctcacctatacggttgggtggtcacaccgccattgttgggcgtcgttgtcttcactgaccggccgctgactggtgtcttcgcctatacggttggttggtcacaccactgttgttgagcgtctacttcttcaccgccggcttgccttctccatcgccgactagtgtctctgcctacagggctggcctattatgccgccgttgttgggcgtccacgccttcaccgaccggccgcctcgtccgtcgccgactggtgttttcgcctatacgattggttggtcacaccaccgttattaagcgtctacgtcttcaccactggcttgccttcgccgccgccgactggtgtcttcgcctgcacggctggcctattatgccgccgttgttgggtgtctacgtcttcaccaccggtttgccttcgccaccgccggctggtgtgctcgccttcacggttggttggtcacaccactgttgttgggtgtctatgtcttcaccattggcttgcctttgtcgccaccgactggcgtctctgcctgcacgcctggcctatcatgccaccgttgttggacgtttacatcttcaccgaccggccgcctcgtatgatgccaactggtgctatcgtcttcacggctggccacgtcgccgccaccgctaataggcgtgatcatcttcaacacaagctatctatttcttctgccgacgagtttcttcacttaaatggctgcatgattctgccagtgttgattggccttatcgtcttcaccgccggtcgtctcatctgctgctgactagtgccctcgcctctacggctggtttataccgctaccataactgatggacgtcatcgtcttctttgctggccgccttatctgacgccgactagcttgttcgcctccacggttgcacgtcttcgtcaccattgactagcgtcatcgtcatcgccggtttgccttcgccgccgcccatggtgtcttccctttcatggctggcctattttgccgccattcaaggacgtcttcgttttcgtcatcattctacttcttccatcgccgactggttatgccgccgtcgactggtgtttttatcttcacaactacgcgtcttcactaccggtttgcttatcttaccgccgacttgtattcacttcatcacggctatgcaactttgtcaccatggtggagcgacttcatctttattatcttcggcaccggcaaactctattgcctctacttcgcaagctttgctacttcaccatccacgacatctacaggagcttcgacatcttggcatgcatcaccaaatatgatgccgtgttattttattacaacaagtggtgttttaatcttcaatatttctactcggacatcttcaacatgcatcttcactcaagcaatgactactcgacgacaagaagctacagttctcgactctatgttcagttgtttcccaactaatcaaagagtcgggggctacacaaatacaagactttcaaaattcgacaaattttatgtcaagacaaaacaatcgactaatcagccaacgagttctatgcaatctacttcgggaatcaaaagttttgctccagagcaggctttccacttcagcaactccaattatttcactggcaattttggcttctccaaagtttctcaagtatcaagtccaagatttaatctacatgacctgtcagggagtttggagttatcgaccaatcagctcagtttcaacgagttggacaacagtttctactttcttccaagtgaagcatctgcaatagctacaacactaatttttactgctacctttataaatcaagaggcgttgcatcaatcttcgtcacgcacatgccaacattaagaaaatacttgagcatggttttcttctcaacagtttgatggattattatcactgacatcatcatcagcacctctacttcatcggccctggcgtcttgctaaggggtgactacgtcctcgtcgtcggttgcttttatcatcatagactttcatcgccgacttgttatttcgtcttcatggttggcctactatgcaactgtcgatgggacacctcattgttatcattgactgctacactactattcactggatcaacgatatcatcaacttcatcaacatcctaccttgcctctttgcctatgcctactctgctactgttgatggtcaacttcgtcatcatagctggctatctttattgctgccaatggtcattatcgccgattgcatttgccatcgccaattgttttcttcttttgcatgattgatggatttcgctattgctattgatgagcgtctacgtcttcaccaccggcttgcgtccaccgccgcccatggtttcttcgctttcacggctggcttattatgcctctactgatgggcatcttcgtcttcttcaccgggcgcctcgtctgttatcgactgattatttcgctgccatggctgcacaactctatcgccgttgctgggcgccttcgtcttcactactggctgacatgactgctgccaactagtttcttcgcctccatggctatgtgacttcatcacctttgattggtgtcattatctttaccaccaccatcatctttgtcagctttgatgggtgatatcatgttcatgttggtcatttcgtctccatactgactgcgtcaactaccatcaatggacaattgtgactacaacagaagaataagctacatgcttaggggcgatcaacacaagcgcgaggattatatcttcaatttggacttgttccagatacattcaacatggattcatggtcatgagtcgatttctcatgctcaaacgactggacaattcattattccccacgagggacatcagctgagtgtttgcgccagtcgggattcaattatcacatctactttggtattctttatgagggataattacgcttgatctacatcatgcatgatattcatcacttggagtcatattaattggtgtgttctatacgtcatattttaagggtatcggtatacataatttaggtctaggcctaatacgtctgcagctcatattttcaggtgtggcctgtcacgttcttttagggacttaggcatttttttttgcttaggcaaaggtgcgggagattaagtgcccaataccttaaaatccttttataccgcagttactcaactttttaggagttggtacaatgcattttaaaaggtgtcgaacagtgaagctttatatagctgccccgttgactttttattagtcaaggcactgtttggttttataaagcaattgattggatacaatatcgttgttttttttgccatgtaagtgtgcatttttattgaccaatattatggcttaggctgattatatattatggtacgtcattttccaggcggttggtaaatcctttatgagtttatttagtcggatttttcatcacatgtgccatacatttccagtggtaaaaccatgtgtcttttaagttcttaagtacatctgttaaagcagtgtgcgcatggtgtgtgtgcccgatactctggaaatttctttattcacaacatacaagcttctttatagctgttctgctatttgaatcttcaatgatgaagtcaactttaggttgcacgcatcatattttacaaagcagtcggtatatcacttggatcatgttattcggagattcacactgcatatgctatatattaatatcaagccacttggttgactataattatcaaaaaccactcagttggttgcattatttactccttgactatatgttcagtttgttcaactaaccacataatcgggggctacacctattaggtgcatctagtcgatgcacctaagattacatttaattatttctcagccctccacagtcttcagatttgataaaagtactcgggagatcttggcaaagatgattgaagcactcggctttggagtaatctagtttgagagaagattattttttcgactgtaaaggtctcaggggctactgtggagattatgggtaccccgtacacatacgacatggttatccgactggttataggggataacttatatctatgaaatatgtaacggatcatggtttgggtattacgtttccttgtatattatggaacggtctaaagtcctgatttgataatattgtaaagtagatttaggaaaccgatactgtattggttaaggtttctatcttgtaatcctgcccccatcttatataaggtgagcagaaggccctctagagggcatgtgacacaaccagatcgtcagatcaatatacacccggcggattcaaatcctccaacaagagtaggatattacctctcatcaagagagcctgaatctgtctaaaaccttgtctccgtatctatccacttttaggtctcgtgcgctattctcttttattatttgccgaattcttgtttcgacagaggtagtaattattaacctccataaaacttaaccgactcaatgcatgacaattatctataaatatttaagcagtacgttgtttgtggttgagaaaaattcacacacacacacatacggtatagataatataaactttcctgcgttggccgaggttcataatggacgaaaaaatcaccccacacggagggcttgaaactgggagcctgggcagcagccggggcagatgacggtgctgcatgacaagacaccacacgcttgctgctgctgcgatgcttaatgcacgcgatgttgttatttccagctgccgcggtagtgctggtggtgttcatccgcacgcaggcagatgcaggcggcggtggctgcgaaatggtgaaagcacacgctaagcggtgagccataatatcggtcgagtatatgatctagatagctctgctaattaatgcttatagcaagttaagttaaccaccctgccacccagcctatatatatagagcaattaatggacatactacttctgctagctagctagctatgcaaggataatactccctctccgtcccatttgaagtagttttcgtatctaattttaatcgtttgtattatttaaaattgttttaaaaaaatgagacactttaagtcacacataaagtaatattcatgttttatgatctaataataataaaagtattaatcataaaatagtttaaaataagacgggcgatcaaagttgacatcgaaacttatgactgcgcttaaaatttgacgaagggagtgattagaatatgttgcccaatttagttaattcggcatagaaacattaatttttgtggtctcaagccggttacgtacgttacgtctcattttttttgtggggtttgaaattaaattctagtcgtaattagcacatagtacttaacctgcagtacgattgcatgcattttacacaactttcctttgtttttctcttcacgtgtttgattttttagcggtcgtacgctgccgtaagttagccctgcaactgcaaacatgcgatgaaccaccaaatcgcagcatgcgtgccaaacctttcgaagttatccaattattgatctttctagtacagcatttggtcagtgatcattgatctggttttacttcagcagagataatttgcgaggacagatagaaaacgtgttaataaacaaatggcaagatatatacaaacacagcacgacaagagtttgtaattggcgtacgtacgtacgttgttgaaccggcaccactgcagaaaccacctttgtcggtgtcggccaaatcccacgatagccccgattttttaataaaccaggacgactaaaaagcacttttattcccggtttataagtgcaacggaactatatgatatttagtcgcggttcacctcatgtcagaggatattaggccgcctgggatctttagtcctggttagtattaccaaccgacactgaatgtacgttggcacaccgactcagcctcccatccgcagtggcacggcatttagcgccagttgacgtggtgttaaggtgtctaagtttagcgccatacgatttgaccctgaacaaaagggtcatttctgaaataagttttggccatggttcgtttgtaaaattattttttgcaaagggtcaaatcatcaaaatttgtgtagaaccggcaccttttaggtttgccgaataaaaaaaaaagccggctcgatgcgtcagctcgatcgagccgagcagtccctccaaccacatccgcaagaaaagaatgaacacatcacacaatcacaaaatttggcaacattcatgcatcacacaatcaaatattcatcaacaagtttacatcactgaatcaaacatcaaacatcattggatcatcaaatcaaacatcaacaatgaaggagacgattgggggtgctcacctgtggcagaagagacaagggagcccgtggggagcccgatgtcgtcgttgccgctgcctgccccctaccggatctggtggcggagagggctccgctgccgccgctgcctcccctcccgccggatatagcggaggggaggttgccgccgccgcggcccgtgagccacgccacttactactgctgcccctcctgccgccgagccgtcaccgactccactcctggccagatctagcggagcggaggcgctacctcccctcccgctggatctattggaggggagggcgtcgccgccgccttccctctggcggccgggccgccgcgggctcccctccagcagccgggccgcagtgggctcccctccagcagtcgggccgccgcgggctcccctccagctccccgctgccacttcccctccagccgccgccgtcagccctctcaccggatctagcggagggaaaggcgcggtcgccgctgccgcctccgccggccagcagctggcagcgctcgggagagaagggagggagagagagagaagatcgtcatggtggggcccatcggtcggctcatccgatgctggctcggctcgatttctacaggtgtcggtgttttaaaaaaaaaacggcacctataatatattataggtgtcggtttttaattaaccggcacctataatatactataggtgtcgtttttaaaaaaccaacacaaaatataataggtgtcagtttttatttagaaccgacacctatacttagttaaaggagccggttttttacgatttcaacccgcaaaggtgggaaaaggcctataggtgccggttttagcactaccggcacctatagtggcaacacctatttgatattttgtagtagtgtgtcacgtctagaaattcatgaaccagaatttttaagctaaatgtgcattaaaacccctttccaggaccaaccagggtacacaaacgataatttttgacgtacagatccacgacttacaaaaatataaaagattataaatgcagcggaaaagataaaggcgagataaacttgaaagcttgactcctgcaacgggtcgactccactctacaggcaatccttgacggcagtgacgataccaacttctctgagaaggctccaactgagaaggactctagctctggtgtggggaagagagagcaagactgagtactacccactgtactcagcaagtcataccgggagagaaggcacgatgcaagatatatccaaagaaggctaaaggctcatttgcataaagcaggcatttaaaagcagtagttgaaagcagtaaaactgttgtagtaaattaagcaatactgatcatcacagtccaacactacaccacattgcaacaggcccaaccaaccacctgaactacaccagtccattaagccaattattaaggatgagactagtcacggtgaatctggttgatcgcccataaccgcgggcacggctattcgaatagttttactctggccagaggtgtacaactgtacccataagacatgattccacacatgtcgtcatgccccaaagtaccaccatggcactgcaaatggtggaatcatgacaagaccctttgcataaccctcctctaaccatccacaccacgctaaggtttcacccccacccctcaacaggcagtgggcagccccctcgtgcgccgcggtgaacccagcagttggacaaccggacacccagccgacctaactccatcatgccctcccttgccaccggtgcctaggaaagggtcgagctatattacaagtcaaacagttacccactcccgcttatggtaataagcacgataagtctcctagggtttcccgtgaaccggtccttaattgccatgggtgcgaccagcaaagccatgcatccacagcccaccattcaatcgcattttaattggataattacggccaatgaaacatggccggatgtctcgagcacgcagctcgtcatgaagctaaatgtctaataatataattatctaattatgtgagctagtggatctaagcatggctaagcattttctaaaccaacatcttatccgattaatacccaaattatcaatggcataaggtgaacaacatatggctgagtaataggacccatcccatatgatattgtaaaataatataacatttaatagaaaacggaacatttgtaaattgagtacatcatgatcatttgtaatgcatgacttgccttgctctcgcactgataggacctcagcaacgtcttcgaagaaccgcagatcgacgaaacggccgaaatctatgcgactaacattggacaataccatgcgatcgccagacaactaccaggtaaacgttctgaaatccggtttgtacgcacaagatatcatattaaatccttagttttcataacccactaccagtgaaccacagcgcagctatcctttgctgcagggtcacagtaccagcgtatgcatgcaccgtgcgatctcgccatctcggttccatccgaccatccatcagcacgttgtggctccgaaagattctctctcccattccccatttccccacccatgctactctcaaatccccaatccccatcccaaaatcctcaccacctccgccccaagaatcctcgctgccgaccggcgccgccgtcttctcgcagagcaagcagtgagcgctacaaccgccgtgttgccgagccagccagcattgtcgccttcttgccttacttgccagcgacccggtgccgcttcgtcatcgtcgagccagcggtgccgctcccttcccttggagccactattctgcgccacctccctgtggagccgactgccgctgtcgtcttctcgtggagccaatataatggtcagcactgccaccaaccatctcgtccatggccatctcctcgcttcttgtggctgctgctcatcggctcctccacacctctccaattggtactgccatcctctactactttgtatacactgatgcttattaggttcattttgttttcctcatattgttgatctatatacctattcctttctgtagtaggtattttactgctcagattagctttgctttgctctctatacaggtatgattcctactaatccataaatatttcttctgatatgcttgctacccgtacaattggcctaaagtgcaaacaacaatcaagttttcctatttctttcaaaatacatgattccccattgtttcagggatgcatgatagttttatatatcttgctgggattccatttgtttagcagccatttgttgttatagcacatattttcattttttacacacagcaaaatatcatgtacaaagagatattggcctgattttttccctatataattgtacgatgtgaccatatgcctatggttagtgcaggatgccacaaaacaatgcaccatgaaaggtcaacctataaaaaaatcagtgtgctacttgtccgcttgcacatgttctatttgtgcatgcacaggaataattagttactgctttggtgtacataagatgattgttttttgctacctccttcagtgttcctaattggcttcatggcgatacaaatgagaagaataaagtgttgattcaagctggaagataatttattatttcatagataatattgatgtttagtacaaaaggcacacaattcaacttgatcgcaaccgcttgctgcagtatgatgccatgattgcttacattacgaggcctatgtatggactgtcaggttcatggtcttcaatcagtgatatatttgttgaactgcatgtgtaacacctagcttttataggttccatggctttgcatatgcttttgtagcatttatgggatgatgagggccttcatttgagtgaatacacataagttgatggcatttcttcattttgtatagtacaaactctgctgttatgtgcaaatgaggccatatgaacagttcatcaccatgaggcttcaattcataataaccatcaaggtaataataaaatttgttctaacatttctgcattttctttcagtaaccgatgtttatgaccaagggagtaaactaccacaagtcttccaggttcttctctctgaagaaaataacacatttatctgtggtaacaccatttgtaattatgagcacaaattatattcaaagtattttagcaatcgtttaatttctttgggatagctcagttattaattttgaaaaaggatgaatgtcatgtgtgcatcctcgccatttatccagtggttggtcataatgcatatgttgactgtgcagaaagatccttaacactgttattggcgctcatcattatttagattcctgcagtcttaatagttccctttgtcaggctatagagtatagtattattctaatttacatatactcatttagttgcaagcgtacaatacgttttgtgtaccaactattctattggatttgtagagctacttttgaaatagaggatttctacagctacatatgcacattctcctatactcttgcagattgatttcaaccgtttctagaaacaaattgccgcaatctaaccattttaggtcagtttggtttcctcaaagttaaaacaaaaaggcagcttagttaaacaccgtgttagcctatgggctactccataccataactatacatgtaaatatcacttacaagatagtcaagattatgttaatattttacaattagttgtcaatccttcacaatcaagtgcatatggaagtaacaaaagttccatatcggtggtggcctttggttaagaaactttcagcctcatctatggatggttttcagaaggccaatttgtatgcaaaatagctttgtttggtttatccgctggccaattgataacaaaatggtttggggtggattgaccagagccttcaacacggttgtatgtggttgtaaatggcgtaacgggcatatgtgtgctacagagcttgtggttgcaaatgatataatcgtttaaaagtttggtaaattaactatggccaaaatctttgtgatggcattcaatgatgttattcggtataagtttgatggaaatattttgaaagcttgaagcttaatatgaatcgtgggaaccttctcctcttacctcacagttttaaatatatatatatttgttatgcccgcggcaacccgcggggtcccggctagtatagcttatttgtaggacaaatgagcagtctctgagtacagatgcggataggtgtccgatgtcactagctgccgacttccgaaaaaaaaaaaaaggtcactagctgcctgcctaatttctctcaggtgaccttgaccggccgtttgactagtaggtagcagaattgtatactagtaaaacctttggtacctaatatactaattactccctcaatttcgaaatgtataacgctattaatttttcgtacaatattttaccattcgtcttattaaaaaatttatataaatatcatttatttcattataacttgttttatcatcaaataaaatataatgttaacttttacttttgcatattatactaattttttaataaaacgaatgattaattattatgtgaaaagttaacgatgtcatacattttaaaacggataaaatactatctattttgtttggtaccaccaataccttctaaaattatccttcactatcagtagaacgtgcagagaacgtccaaggaaatgaaatgtgtgtgggaggcaagcagccgtcgctccatcccggtgagctccagtttgtcccatttccatctgtccactccaattagggactatactccttcggtcctaaaatataataaattttaaatggatgggatattttctagtacaacaaatcatgtactaagaaatgccccatctgtccaagaaatatctacatactgtgttagttaccaatatcaatatttaacctttctctgcctaatatatacggcgtactacatattgagttccaaagtcactctcattactgctagaaagttagaaaagtctaaatctagagtatctcatagtcgtgctgttaagccacataaaattatacaaaaacaaacaaaaaaagttataaatttaatttttatttctctattatttgaggcttaaaaacaggtcacgaagatgataagaaagcggcaagatatttatcttagaaagtaattaaaacagtaagagtaggtacaataagttgcaataacagacattaggagctccacttacggttttggatgacccagaggagagagaagggaatagcgaaaatgagtgggcgacaaattagtcgaccggctcgccccacgcgtggcctgaggttgtgggcctaccatggcaatagtgcacctgcgctagccgcgtcgcaagccatcgtcaccgcggccattgcatgccatcatcgcctgcgtgagccatgcctacctccctcctccactgtggccgccgccgtcacctacatatgtcagaccttttccctcatgctcgttcacgcggctggtgcgatcacttgtgtctgccttgcccacgaccgttatccgcctgcgaccacactcattgcccttgtctatctcggctactccttgttcgccgtagcttcttccatcatcaccatcgcttgcatctgcctcggctgttgctgttgtgcgcctcgccctgtctacctcgtccaccttggctaccgctacactggtggagaaactatctttggtcggtcgaccagatttcacaatagttccggtcgtattaaaaaccgggactaaaaacatctttagtcccggtttaaaagctccagggcacttttcaatctttagttaccaaccgatactaaagatctatttgtagtcccggttgataacatcaaccgggataaaagatcgccatacgctttactcacggttaccaaccgagactaaagatctatttatagtcccggttggtaacaccaaccgggaaaaaagatcgacgtggagatcagagaggcgtgcgcgatcggatcgaggtatctcctcctctcctcctctccttttaactcctctcctcaaccttatctattcctctccttctcctcctactgccaggccgaaggccaggccggcgcgacgacggcggggcgcggtgggccggccggccggcgtggctgtggcgcggcgcgcggtgaggcggcggcctacggcggcggccagcacgagggcggcagggcacggagggctgcgtggcggcggggcgcggagggccagcgggccggcgcggcggcggctggtggcctcgcggcgggcggggcggcgcgcggcgagggagcggcctgcggcggcggtttttttctttttttttttgagaatctgagattgttgtgcgatgtatttgattggatctgagattgttgtgtgatgtatttgatttgtgtgtgatgcgaatatgtgatgaattttgtagaagttgtgatgtaatttttttaatattttgtgatgtatctgagtatttgagatgatcgatttgtggatttagaggcaatttgaggatgattgatttgggattttggggatgggatgggggtgaaatcaatttattaaaaacaatgaagaaaagaaaagaataaagagcaaccggatctggcctctttagtaccgggactaaagatgctttatctttagtcccagttggtaacaactccaaatgggcccaactatcatgccaatgggctgagggcctcaaaattagtgtccacgatgaaaaacgggccaaatggagccgtcccgggttcggccgaaccattttggtggccgttgatcgccaaatttcatgtggatggtcctgatcacatcctaatggcggttccggggtagtttggtcatttcgcataggctgtaaccgtcatacctgcctataaaaggaggagctcactctcattttcaatacacaactttgagctgaattacaagagactgtattgtatcttttgtacattagaataaggtagagagctctggaggagtgcccagaagtttggcgctcatccgacttctacctcgacgagtgtagcttcctaggaggaattctagaggagtactggagctgtcggtacaatctgctccgggttcggagaaacttcttctattaagtaagcattcgtgtttctttcttatgttatttaattactttgtttaagtaagatatgtttccatctttgcggattaattgtttagtatttatactaagtactctagtactaggactccggatagagaaggaagttcttgcgcaagtattagagtagtaattaataacttagacgtggtgtctaagttagagattacctttgtttgttgtgtatgccacggatttgtcagaggtaggcggcatgtggtgacagccctgaatcccgtcctagtaatcctccacgttcggatacatcaaagagctatagcaggaaccacgctggtagaccagcgggggtcggttcccgaagcaacagatagggaattacctttgcttagcttagataattaaaccacatagaaagtcctctctagcctagtctacctatcatcagttgttgtccttggatcgtcttacgcttaggtagattacatacgttccctgagtttgatatccttttggggtcaaccgaagatgaagtgctacagcggtattccgtgcgcttgcggatttctctgtggtcgtaagaaataccaacaccacccgccgccggtcatcccctccgccttcgtcttagccttcgactcagccgccgtgctagtgagatggtgagcggagggatttgagagagagggggggttgagatagaggagagagatagagaggggtggggaactgacagtgggtcccactaatttttttaataaaattactgactggactgccacgcatatgccacgtaggaccaaaaccaccgcggattgagccgggggggttatttgtcctgtttcaatagttggggggtgtagaatgtccggttttcgagttcgggggtgtaatttggtcgacctcgatagttcaggggggtaattcgtactttttctgaaactttatatgtgaattgtagatagtgtccatattcaattttgtagtgtaacgttttttcattccagattgtttatgtggctataaattcgttacaaactttcactattttgataaaatgaatttttgaatttttaaaatgagctcaaatggagacatgctctgtagagctcgacgctgcaagtttatagttgataactttttaatttgatggcccttggagtaaaaaatatatgttacaagttttatgaaggatgaagtcaaatgaatagcatctatgggatagtcaccaaagatcctgggttggaattctatgccatagtaacgaaagctatatgccatagtcccgtgttggaattctatgccatagtaaggaaagctatgccatatatacagtccatgggttggaatattctatgccatgcatagtcgtccccggtcatagtcctttcgttagtgactatggcatagcaaggaaactatggcactgagtgagaggccctgggttcgaattctatataccgcccgtgcgcatatttcacatctaaaattatgtacttgtgattaaaaaaaataaaaaactggaaatcccgtgtaatagaaaatttttcacacgcccaaggttgcgggtgggatcgtaaaatacctatgtaaatgggttatggaccatccgcaaaaatattaatttgctgtagtagcgtcggagatatatttaattcactacaaaatacaaaattgttaaaatttttagtgtgcaatgggagtgttgtaattggatgttaaaataactagctgaatatataccccaccgcgttgctgcgggaaattaaattatgtaatgtgtacaaataagatgcaatataattattaaaacccaaacaaattaatacttataaattttgagccaaaaataattcagattgcatggtgttatgagagaagaaagaatagacaatttgaaccatagatctattatctaaaagctataaataattaggatgatatggtttgatgagagaagagagaaataacattaaccgacacttggtggacgaaggatctcggagcccatgcatcgctatatatagtacacctgctgtagtacttggcaactggagactggagtagtagctattgctagtgcgtacagcacatcgtacggacatggaggacaaggtggtgctcgccatgggcgcatccatcctgttggttgtcgtcgtctccaagctgatgatatcatttgcggcaaagccgaggctcaacctgccgccggggccatggacgctgccgctgatcggcagcatccaccacgtcgtgtcctccagggagagcgtccacagcgcgatgcggaggctggcccggaggcacggcgccccgctgatgcagctctggttcggcgaggtgggcacggtggtcgcgtcgtcgccggaggcggcgcgggaggtcctccggagccacgacctcgcgttcgccgaccgccacctgaccgccgccgccgcggcgttcagcttcggcggccgggacgtcgtgctgtccccgtacggcgagcggtggcgccagctccgcaagctgctcacccaggagctcctcaccgcgtcgcgggtgcgctcgttccgccgcgtccgcgaggaggaggtggcgcggctcatgcgcgacctgtccgccgccgccaccgccggcgccgccgtcaacctcagcgagatggtcaccaggatggtcaacgacaccgtgctccggtgctccgtggggagccggtgcgagcacagcggcgagtacctcgccgcgctgcacgccgtggtgcgcctcacgtcggggctcagcgtcgccgacctgttcccgtcgtcgaggctcgcggcgatggtgtccgcggcgccgcgcgccgcgatcgccaaccgcgacaagatggtgcgcatcatagagcagatcatccgagaacgcaaggcccaaatcgaggcggatgatcgcgcggccgacagcaagtcatgcgcatgctctctggacgacctgctcaggctccagaaggaaggcggctcgccgatcccaatcacaaatgaggttatagtcgtgcttttgatggtaagcaagcctcacaacactgtctttatgttctacttacctccgtttttctaattattcgtcttatttaatttttttgtgcaaatataaaatatttgtgtcatgcttaaacaatatttgatgataaatcaagttacagtaaaatagatgtataattacataatttcgaatgagacgaatggtcaaatatatcttaaaaaatcaatggcgttatacgttaaacaaacaacaaacggagggagtagttacacggacgacgtaccaaagtaccgacaaaaacatctttaatttttataatagtagagatgaagatagacacaaaacctaccatataaacaaattataataatattttttctctcacaaggaacatgattacatcctaattaacctctatacctagctaggatatatacactactacaaacaaaatttttcatgcgggtaatgcgtgcaggtgcacacacccaggggtctgcgaaaattggattttcacgtgcggacgcttatgttgcccgcacgggaaaaaaactgaaaaaaaaaaaccttgaatcggcggcgccgcctcctcctccccgtcgtcggcggcggcctccgcgcaagctcgcctccgcgcagcccacctaccgctggcctccgcgccgcccgcctccacaccgcccgccttccgctggcctccacgccgccggccgccggatccgcgctcccctccggtcagaccaccgccgacgcccctcctctccgccggatcaggggaggggaggggagtggttcccgcgtggggggagggcggccggccgctggatccgtgcggacggctgccgccgccggtccgtgtggggacggccactgcccgccggatcctgcgccttcaccgccgtggagctgagttcgccgcacgccaacgccgactgccgccgtcagcgaagcgcggacccgcaaagtcgttggagagaagagaggcatgagagagagagagagaggggtgaggcgtgggagagaagagaggtctcgcagataaagataagaaaaagagaggagggaggggtgaggagagaaagaggggaaattttgaagtgggtgagagggaaagagggagtactattttcgcatgcggctctcttaataggcctgcacgggaaaactgacttattttcgcgtgcggtccatttaagattttcccatgcggtccttttaaatagaccgcacgtgaaaatgagccgattttcccatgcaggctgagttaccacccgcacgcaatctaaaagtgtccctgtctaggaaaatcattcatatagtagtgatacccaatcatcataaagttttagttcaagaaaacagtctatatatgtagttttagttaagtattctcgaacaaatggcatacttcttagtaatgaattaagtttaggctatatatgtaggcacgtattatgtgcattaggtggtatggataaaaaaattattcaggatgattagtaattgattaaaaaatcattattccaggatatgtttgcggggggcaccgatacatcgtcaacaacactaatatgggccatggcagagctgatccgttccccaagagtaatggcaaaggtgcaatcagagatgcggcaaatcttcgatggaaaaaacaccatcactgaagatgaccttgtccaactgagctatctcaagatggtaataaaggagaccttgagactgcattgtccattgcccctcttagcccctcgcaaatgccgtgagacatgtaagattatgggctatgatgtacccaagggtacatctgcattcgtgaatgtgtgggcaatatgcagggatagtaagtattgggaggatgccgaagaattcaagccagagaggtttgaaaacaacgatatagaattcaaagggagcaactttgagtttctccctttcggctctggccgcagagtatgccctggaataaatcttgggctagctaacatggagtttgccttggctaaccttctctaccattttgattggaagctgcccaatggaatgttgcacaaggatcttgacatgagggaggcacctggactactggtttataaacacactagcctaaatgtgtgtccggtcactcacattgcttccagctgtgcgtaaataccagtgtaacagataatgcatcttccaaaagaccataacagcacaaggtaaaatatgtgctgtcagagacatgtggtcttcgtgatttcaaaataacttatgtgcctgagcagaaaagcatagtgaacctacttatgtactcatgcgtaatatttttttctgccaaagaaattataagtgtgtatttttgtgcccataaatactaggtgcaccatgaaattacatcctatagtaattaaagagctcattgtacttgtatatttgtcgtcctcccagaaatatagttaagcgtgtacgtatatattttcacggacaacatatgctttctttcctatatatcattcattttggtccagctccgaatacatgcgaactccaaggcgcctacgcacgtacggctttcgtttgattgatcactccaagtttctactccgtatcagattgttggtacggactatgtgttatatcgatcactggcctgttgctgaagttaattttgcaccggctatttaattcatatgtatccggccatcaccatcagtttctgtgttctccacggaaggggcggagctagaatgaaatggagggtgatgccacttaaattattttactttagatcgaatttaaactgacgcgggtgcctaagtttgtattgagggggtgcatacatggtgaaaatagatgagtatagcttaaaaaattttcttgaccgggttcctgggcaccccctagtatactctagctccgcccctgctccacagctggcgcctatgctaatgctaccgcgtctcttgctcggcctactctggtttcaagactgtgggatcctcctccatattggccacagatacaccaatattggtggtctcatgtacggttccttattggaggtctttttttttcctctttaagaaggggaagctttgccactcttgtattaacagagaaggagtaaattaagccacaacaagtaatatttacagagcctatctcgaaaacaatagacccgcacagaacaaagcgagacgctactctcctgagggggatgatctctggaagtcttgtggctccatatatgttcgcgcttcctccttaaacttggcagcgatcgtggtaggcatggtggctatatgccggaaaattctagcatttcgctcacactagggcaccaggccacaagagtgatcacagattttaatgctcatgaggacatcactagttataatatgaccgtggctaccttatatatttataaaacaaaagtgtaggcttctatgtaagatttacatttatatatttgaacaaacattattgcaatatgtaatagacccaaaaatgtaaaacctggaatacatgatatcattagtgaaatgggttcccttctatcttttgagattattttgctcctttttggatttttcatgcatccgtcatttcattcatatgcattgaaactaggttggaataattttcgtaattgatctatgtgtgcaaaaatcctggaaaaatcacacaactactatacattatgaaataccctcagctaatttggcattattttataaactcatttgatacctcaaattattcagtcaaactagccataatctagaattaaaacgtatcacctagccctcttctaaactttacagtgaactttaccactgtaaaaccataactcttctacttgtgcctttgtaccagagtgttcatcatcactagctctgcacacagtaatttttaccaattttttactccaatttggcagacaaaggcaccaagtgattcaaatttaggacttcaactctctcattttggtgctttctcttcaactcctctcactttcagtgggccttggcacctcatgccccacctgaaagccttatatatccacccaggaaaaactcagccttctcgccttttcctcttctctcccactccttgtagactttttgtcgaacacgtggcgtgcgtcttcttttggagtagagaacaacaccatacagctttccaagccgagccttctccacgaagcctagctaatagcagtcgctgctggtgggcctagacaccgtgtctccgtacccatcgtccacctcacaccattctccccaatcgttgcacgagtatggctccgctgcgagcctgcgagtagacgaagccgttctgtccaaatctccgtgcccagactaaatcatctcctccattactctttctggacaggaagcaaagcccctgacatgtccagtcatcccgttccatcggcgtgctgcccgagaatggagagacagaggcaaggccatagaccgagctaacgagcaccgtgtccaaactccaccattcggccaagtactataatgcttgatgtgttgccccttaaaatgccacataggatcggaaagagaaggtcagtcacctctcatgcaaggggcaacctccacacaaactctaagaaaaaaggagatgaaagaaagaggatattggacaaacaaataaaataaaattatttcgatcagtatgctagagaggtggtgtttgaatcttctgaagatgaagatgaagataaagattaagtgtttcatgcaaaactaggtggtaataacatgtgattaatttagttttaattattacaaacttgaaaaatggattaatctgatattttagcgcaactttcatagagaaagctttcgcatgaaatgttccgttcagcagtttgaaaagcgtgttacgagaatccaaaattttatcctacccttacagaagaaacgaacggggcctagtgtagatgtgatcgcaactagtgtgctcacaacacgctcccacgcgtcgcccacgcacaggcgacaagtggggcgaaccctactgccaccacggccacaaccctctcacccctccccctacctcgctgccgccggcaaagtcgattggtgagctgggatggcggtgatggggccttctccatggcggcgcttcctctttggcgcgggggaggtggcgtttgccggtgtcggtgagtggttgcggcgaggtctcctggctaggtggcggcagatccggcaccgccgtcgccggatctggcaaggcccttcggttttaggcggtgtccagtgtgcgcgtgggtggcgaagacggcgtgcgcgtggtgtcgtcaacagagacgagatgggttgcattgcggaccaaacaggcaaaggtgtagggtctcgcatgggctgatgatgcaccacagcatcatgcgcagggtagcagaaacgggttgggggcaggttcttttacctgaaacgatatcaggattgcatcgaataatttgtaatgacccgtcgattctaaaattcggtaataagaaaaggggtagagcacgagatctaaagtggatgatgtcgacgtttgatgtctcgagtacggtatttggatagtatggggatcgtcggtgctaggatatatgcgagactgaggtaaaacagatggagacaaggatttttatacaggttcgggtccctaagttgtcaggtaataaccctacatcctattggccgaagccggtattgctcttattcaccataatcacaccagtacaatatgtgggcagcctatctaactgttttcgacatgtcggtctgatggtctgactcgtagtcgacaacagggtagtcttcctcctcaagtccgtgcccggcgagatcagagatagcgctttcgtatctcctgatagtattcggagacaccgtaggggaatagccatgcctatccctgaagtcgatatccggcggcgtgtctcggcgtatgttggcttgtatgttgtggcttctagtgggtgtatgttaattgtcatgggtgtcttccatggtctcctctcagggtggttccccctctcctcctcgggggccttatatttatacccataggtgtccccttgtccaagtagaactagggaaaccaatatggatacaatccgagtagttcttgtcgtttccatgttgaactctggttgtctttccttatccggaactccctccatatctgaagttagtttccgtataggacatggtatgtggtggatcctgccgagatttagtcaactactattaggtatgtggtatccataaccatgacagtagctcccgacttcaatgcaaatgaacgaattcatattctcaaccgcgcgcagacattggagtaactgttatcgagctcatctgaccgttctcggtgagtttagagataacgttagacttcatttgtcagcctcatgcgggcacccaaagggtttgtctgagtcaatctccgatgtcaaccaaggaagtacatagagtacgactaagtcttccatcttgccgtaatcgagaatttggattgaagtcaagaaattttatctcggcgggtacaccatctcttcatttcgtattccttgtcgagatccagcaactgttctcgagcgatcgagaaggcgtagagtctgcgacggagccttgtcaacattggtcatactcgccttagtcgatcttggtgtagaaccatagagacatggagtcttccacaatgtcgaatagaatttttctgaaatcaatactcagaaaagaatattagatagaaatagcccccgagcgaatgctcaaagggtgacatgttataatatgtatggtaaactgaaaatgaatcaaatttaccgaccaatgttttgtgtaagagtgtcttctcagttcacgactttggtcagtcgtttgagttgtacactctccctagcccccagccttgtcgtcggagaatcgttctcggaggagaaggctcttggacccttgacctgccttggttgaataagcattgatcctagcccctagccgtgaagttggaaagcttagtttccgattacacggcttggttaatgcgcacggcgagaactcttacacgaccagatcttacatgttctttcgtctctgaaggatccgacaaggccttatcggctctgggcgtccccagccgaagatcccttaggttcctcggaggccttgtcaagactgcgtaaagggacagtaggataggtttcaacgctaggtgtcgtcgtgataagggatctctgggtaaaacacttggcgattttgtgtacatgctaccaactttgttgaagtagaggtaatgggagaatcgctacatcgctggtcgaggaccaggcagtagtcgtaactcgaccactagaagtggaaatagtgagagaaacgctgtatcgctggtcgagaaccaggcagtagtcgtaactcgaccacttgaagtggaagtggtgggagaaacgctacgtcgctggtcgagaaccaggcagtagtcgtaactcgaccacttgaagtggaagtggtgggagagacgctacgtcgctggtcgatcactggtcgagaaccaggcagtagtcgtaactcgaccacttgaagtggaagtggtgggagaaatgctacgtcgctggtcgaggaccaggtagtagtcgtaactcgaccacttgaagttaaggtgcgagagattgctatgtactggtgcaagaaccagtgagcgagcagaattatctctcgaacaccaatggaagttgcggtgtgagagattgctgcgtactggtgcgagaaccagtgagcgagcggaattatctctcgaacaccaatagaagttgcggtgtgagagattgctgcgtactgatgcgagaaccagtgagcgagcggaattatctctcgaacaccaatggaagttgcggtgtgagagattgctgcgtactggtgcgagaaccagtgagcgagcggaattatctctcgaacaccaatagaagttgcggtgtgagagattgctgcgtactggtgcgagaaccagtgagcgagcggaatcatctctcaaacaccaatggacgttgcggtgtgatagattgctgcgtactggtgcgagaaccagtgagcgagcggaatgatctctcgaacaccaatggacgttgcggtgtgggagattgctgcgtactggtgcgagaaccagtgagcgagcggaatcttctctcgaacaccaatggaagtgctagagttggtttattgcaagtgtatctcatgtggccagcatgactcacgtacccaacttatagcatatccggatgtccgttcgcaatcatgtcgggtgatcaagccgacgacgttagcgaggaattatccgttaacaaccttttctcgagtagtccagccatggctggtgctatgagataggtcgtcggtctttgttggtaggttgggtgcgataactccgcatttgtcgagaatattctcgataatggagtgtactcgaccacaacctactcgagtgctcaattgttcctgaaaaatattttttagaaagcaagatatatagcagatgatatcgagtatgtactcaaaaactgcgtggatcttctagtattatcaggatataacgagcagattaattaaatatcaggcattatgtaaaccgtaaacaagcatgatttatacggaaaaaaatagagcgagcccccagcattaaaccgtagtcgatttaacatcggggacactcgcgcaatagatattgtataaaaaacatgctctagataaatataatataaatctgacaatgctgtatgatctgaaaagtaggtacggtaaattgtatataaaatactgcgtacctttgtagatacatgccggatgtatctgcgtacctttaaattaatcttgctaaatacctttgttgatttgtttgaatattatgcagtcgtgctgtgtagacatgtgttgatgtgcatataccgaataggttttggaaaccgatcagcatatgtacgtacgtcaacatgtaggcctgtggatggatatctcctgagtcctgattggtcggcacggttgtcatgcatgcacgtattccgtttgccaaattccagtcctaaccggacacaagaacgaagcaaatacagattgatctgccaccaagtcgggcttggcattccttggatgggcgtcgcactcgtgtcagcagctgcacggccgggtggaggtcggcgtctccttctcggcggcgatggtcccgatctcgtcgggggatatattccggtcggattagacctccccacagccgaagtcgtcgagtagcttgttgttggagaatccatctcttaaacccatctcgtcgaaatccaagaagcaccaaaatccccctacctggcgcgccactgtcgacgtttgatatcgcaattctggtatttgtacagtatggggatcgttgatgctaggatatatgcgagactgaggtaaaagagatggagacagggatttttatacaggttcgggtccctgagcggtcaggtaatagccctacatcctgttggccagagccgatgttgctttttattcaccataatcacaccaatacaatatgtgggcagcctatctaactgttgtcgacatgtcggtctgaaggtctgactcgtagtcgacaactgggtagtcttcctcctcgagtccgtacccggcgagatcaaagatagcgctttcgtatctcctgacggtatccggagacaccgtaggggaatagccatgcctatctgtgaagtcgatatccggcggcgtgtcttggcgtatgttggcttgtatgttgtggcttctggtgggtgtatgttgataatcatgggtgtcttccatggtctcctctcagggtggttccccctctcctcctcgggggccttatatttatacccataggtgtccctttgtccaagtagaactagggaaaccaatatggatacaatccgagtagtccttgtcgtttccatgtagaactctggttgtctttccttatccggaactccctccatatctgaagttagtttccgtataggacatggtatgtggtggatcctgccgagatttagtcaactactattaggtatgtggtatgcataaccatgacagatgagtaaagaggataaggtttagacaggttcaaaacttctcaatgagaactaatatcttactcctgttttgaggactagatccgccgagtattgtattgatgacacgatcaagttgtgattatgcctttgagaggcccctgccctccttatatgtgcgaggggtagggttacaaagataggaatccaaccggacacggtatatgtttccttatctattacataattgtacttatctaagattcatgagattttaccctaaaaaacaaggcaattaacagtcacaagctctaatctcttacataatccctcactcggtctacctcctatctctagtcggatatccaggccacgtgagtatgagtgtccataatatccattgaagccccgagaccttcacaatcgaggaaaatcttctcccaagctatatcaatcaaaatcgaagtgcttcaacatcctcatctgtgatgaattttgtaaatattatgtgatgtgttgatggattatgtgactccgttcatcctatggatttttgttggctatttgtttcattattttagggattttaattgtgggctccttgtctcgagctagcctcgatgattttttttgcctcccggagggtcctttttgccggttgtcaagactgcctttgtttcatcacgaggtgaattattagcatgcaattaattatgtattaattatttcaagtttataaaacatattaatatgattttttaaactaactttttcatagaacattttaaaatacagaccaattaatagttcgggaaatgtgcgaaaagtttgaaaatcttctctcttgcttgtaggatcaaatgcagacaagatccaatacaaaatcactactacagaaaagggttttagtgccggttggaaaacccccttcggtgccggttttcccaaccggcacaggggaggcgacactgatttgaaaataaaaaggtgtcggttccgtataaccagcaccttttaggtcgagaatgctctgtattggtcgacaggggggagggggggtgtgggaaa

SEQ ID NO: 4462 - DNA, 1920 bp, Oryza sativa
caaatcttttagtttaaccaagtttatagaaaatttagaaatatccacagcaccaaattagtttcattgaatatattttgatagtatgtctcttttgtgttgaaatgttgatacatctttttataaacttaaaatgtttgactagaaaaaagtcaaagcatcttataacactcttttgtgtcgaaaatgttgctgaatcttttataaacttaaaatgtttgactagaaaaaaatcaaagcgtcttataacatgaaacggaaagaaatacataccccaaaagcccatgtatgtaaaaaaggaaaaaaactcttgggaaacgggggaaaaacattattaatatatcatgatgcgcgtttgatcagttttatatttctatggaatatcgtcttgttatatttgtggtatttaaaaaaattatgtaagttggttacccatatctaaaatcctcgatattccactagacttcattccattttccctatgatttaggatgtgttcgttccacctcgttgggaacatatctcttgcgcacgtaaaacggaaacggagcagtacattagcacgtgattaatttagcattagtttttttttgaaaactagatcagtatgatttgttaaagcaactttcgtatagaattttttttgcaaaaacacaccgtttagctgtttgaaaagcgtgcgcgcgaaaaacgagggagatgagttgagaaagttttggaaagaactcagcttagtctcatttcagttagtagttctttagtttgtaagcccagctcaacagaaagtaattagaatgtttagtctttcagggactagttgatttagaatttttcagccaatcgtagttggttattttgcacgcagattaagggagactataagcccaaaaaagctgatgaagtttgcagcgcaaaacctctgccccagctcttcttgttctgctttcatctttcgtcaagtactgtagctgttcgacaacattcacaacagagctatggtagaaagagtgagttcaggatttaggtggtgtttggatccaaggacttaactttagtccctatatttagacactaatttaaagtattaaatatagactacttacaaaactaattatataaatgaaaactaattcgcgagacaaattttttaatcctagttaatccataattagagaatgtttactgtagcatcacatagactaataataaattaattaggctcaatagattcgtcttgcgaattagtctaatattatagatgggttttattaatagtctacgtttaatatttataattagtgcccaaacatccgatgagataggaatttaaaaagttttagtcccctctaaacagggtctaaagtctgaagggcgatttcggacacactacacaactgcaccagtacaaacatatatatatatatatatatatatatatatatatatatatatatatatatatatatatatatatatatatatacacacacacaccaacgtggatctatgcatcatatgcatttagggtacttgctctaataagctccatacttgacaaaaaatagcaagagtgcgagtggatggactccagatgcacaatatatcttaatagaaactctttgcatttagcaaaagatgtttaacctgagtgacctatagaaaaggggggacaagaattaagcgaaaagcaacgtgtttcgatctagatccataagggcactgggcccgggaactggaaaggccaaatgaagcttcaaggacaaccctgtttatgagggcgaaaataccggacaatttttttgcactgggagaaaaaggctcttcatggaggattaggcacgcctaatctataaaactctggaggagaagctgaaaactcctcgcttgaaaagtatggcagcttccgcttggttaaaaaat

SEQ ID NO: 4463 - DNA, 788 bp, Oryza sativa
  unsure (1)..(788): unsure at all n locations
catgcttcaagaagacanccacatgggcaagggcatcttgttaggcacaaatgncagaggaaagncgaagacacttcacaccaatagcagaaaggttgtggnaggtttgtttttngtcggttatatcgcaagcctggtaccaattctatgtttcatgcctcactatcagacggctcataacatggcagaattatccaatgctgttgttatgactaagagtatattatagttttaaactcggttcatgtcactgctgcgaaactgaagctactagccactgtatacacatcaatttgactttgcatatcactgttgtgactcgtgagagatctggctagcacgtacttatgttcagccaaattcttcaaactggatgcaattgaagcacctggtgtttataagaaactttttgtgctattagcatcaataccctcttattctttactttaaaatttattatcacaaaatattcgttggcaggcacggtgcttcctcaacttagcaaccttacaaagctgcagttccttgacccctctggctgtcatctgatgaaatccgaatcaggaatggcatggctgttcatcttctgatttctctctttatgaatagttaatctaaaagttaatttctcacattcatatatagctttagtttatgctatgtggtggaggcttaaagctcaagagatagtacagaaattgttgggcaggttcatgggtttacccaaaccccaatattatttgatatatacgcgggcaggagtgtggtctggcgagcaacaactaatg

SEQ ID NO: 4464 - DNA, 7976 bp, Oryza sativa
acccaacagcccaactcccacgccgtcatcacgcggcttccttagccacttctgtctcttgaaacgtaaaaagatgaaaaaaaaaagaaaaaggaaaaagaaaaaaggaaaatcttcaccgaaggcaatggcggcggcggcggaggcggaggaggaggtgcggcaggaggtggaggcggtggcgtcggtgtacggcgacgactgccgcgtggtgcgcggcttccctccccacctcgtcgtccacgtccgcccccgcaccgccgacgactcctcgcagcaggttagtgctcgccgtcctagctccacgggcgagccgcttcgcagcatccggatccctcccgatttcggtgttccgttcgtggattcggtcgatcggtcggtcggagacggtggcggcggtgctctgctgcctcctaaccctagctcccagataggaggaggaaggaggggattagtgtggttacctgagcctttgtgtttcgtggttgatgtagtttattactccctccatccacaaaagttagatatatttcacatttaactttttccaaataagttgttcctatttgtagtctttatgcatctaagacttaaataaagagataaattaaatgtttgatgagagcccaaggagtcatctaaatactcattggttgcatgcttgcattcactccttgattttgtaacatccaagatgatttaatttcttcttggtcttggtgacaaaagtaatatgtgcaacttttgtggatggagggagtagtatggctagtaccaattgcgttactgattgattatcccatgatgaaggcatcaattctgggccttgaaggaatcaattgtggggggcttttccttggagcccatcggggcggagcggcgcttcagttcagtagtagaggagtcaatttggtaacataccttttcatttatgagtacaggtatttttttggggatggagaccactgttaaggtgatcagtgaaggggatattagataaggaggcagaatgggagagataagggtaagtgggatattaaagatgtgagaggaggatgggtacttcggggaggcagtgggcattgtgtggtggtgaagggaataagaaggtgggaatgtggtgtaaggaatggcaacttcaaaggacggtacataaattggtggtaaccaagactgtttcttttctgttccatccgatcaagagtgaggcattccacattgcctcccaacatataggtatcccttggtctgtccataataaaatggtagctagtaactgccgacatgaccatgagcaagattgagcatgttagttaaaaggtccttgggtggtatgctctctcagtgacccttgaggtggttgtaattgtcgcatttcctgagtgtgtttcatgtgaccagaagtgtggaaaagaagatataattgtcctttattatcaacttttccatgttttacgtatgattacattattcaagggatccatgtatttttgtaagccaatattgctcttaatttcagttgcttatgttgaaggagttttatcatcatgcatttagatttgctaatgaccattttcacttttgcagttcgtggagctatttcttggaattaaagcatcttctcaggtatgaattacaaacttctacctcctttctagattcagttctatgcatttatttttcatggtgacttgttgttggaaacaatttgtttaactgatcggcttgaaatatctttttacctggttcttacatatggttatttgttttgtttgtgtcttttagaactcctgtcggtttttatctcactgttgatcatgagttcctatattgttattcattatgaacatggaaatacttttacatatacctgaccatcatgttaaagaacatgacaggttaatcataagacataactgtctttgtagtttgtacacttaggctcactctttattcatttacacaactgcagttcttcatggtacatgcctataacttgtattgaaaacttactttgttttgggatgatgtaaattatagctctttgttgggctggctctcaattgtaatgtcttcgaagcagtaatgcagtttcactgcattgaggcaactctctaatatctgtgatatcataaattcggaacaacacaaatttattgtggaggacaagaggcacctctttttgcagcaacccagcagacaacttgtgaatcattttttttttaattcatggccagcctaaatttcacaaccaactctatgctgtaacttacaaacctttccaatttcaatatttgtattaggactggtgctggtttgtaactttactatccttcaccattctgtatgcttctgtcattcacctttgcttacacaccttgattagagcactttatagctggttatgttctagctcagtgttaatgcattagattttttattcttcgaattgcagtatccaaaagcacctcctcatgtttatgccgtggaaagtaagggccttgatgagaatcgacaggtgtatcttattagcagcatccagaacaaggcaagagaactttcctgctacccgatgcttgtgacgctgtgtgaggtactattccattcattgtcttcttatagagtacagagcaaaacttgcttcgtctagtaatgtcttgaggattatgcatacttactacatgtaaattgaaactatctgtgaattgcatagtctatggcagtttttagaagcggtactcaatttacattattgtctaattggcattcatttgggagtgaagggaaattggatagtgccaacaattgacactgactgctgctattcgaactataacagtgtctttgggaagtattagatggtttttttctctgtttgagaaattcttatagatgactccagaaattcaaaattttgtaagacactactatggatttattgcataccacgatcagatccactttatctgtaggtgttatggaattctgtaacaaaaaaaatgctcatatgcattgtagcagtttgctgtctaagagggtggattttgatttacatgaaacctatctgacttctcatgcaggaagctgtggagatgctctcaaatatgaatcatccagctggggattgcccactttgtctatatcctttagtcaaagagaatgatggttctgctttgccatttatgaagttgatgtcgtgctaccactgcttccacaggttgacttctgccacatactgatatgtgcaattgcaagaaatactctgtagtagtgtcttattattttggaatttcagtgactgcattatgagatggtgggaatggctacagaatgatgatactgactcgaagaagagtagtacagcagcaactactgaaggtgctagaaatatttcattttgcctttttttttttcacttctgtaaaatgtgttttttaatccttttcaactgcctacaattatttcatgcacttttgggtcaaagatgcttacaaatacaaacataatttaggttgattgacagttatttatgttaaagatgcttgtatgctgtccctttttaatttccccaaggttccagtctgtgcgaaggaaacaaggatagtcacattctggtagaatcatgtataaacttgctgtcgtaatgaagctagtaaaatagcagcttacctgtttaaaacttctggtgtcaatttactttcttaatagcctcatgttggcaacatgattaccattgtttcacatagatattgccttatgttctttgatgactttcacatctaaatttccatcctaacaaatgaaagcgtctgaagtccttatcgaccagcctctgcccttaagagtaatgagcttcaatcttgtattttgtttttgaaccttaagagtatgaatttaagcttttgtgtgcatcagtgcttgacattatgctgattttattttttttcattaaacatatattttaaaggatgcaagtgcagtttatatcatcagtataccaattatcgacaatgtaaatatgatcgtttatgtagttaacatttttgttggttggtgtgttaatcagtgttaatcttgactactgctactagttattcatgcttctgaaggattggatttgtccagctcagctaagcatcacaatgtaagtcagcacaaaggactatgtccagtttgccgcaaagtgtttgatgagaaggatattgagcatgttcgtgatctgctaggtgcaaatacttctcaactggtatgtatcagtacaagttaacagctttcaactttttcatgcactgtcagttttgatatgcctgtaccgtattcattggttcacaattatcttctatcatcactggtgttcggttttcctcacaaacttttatagagttatttaaagtacaattacatcctcgtacgtttttcagttcacattatatatttcaagtaaagcctgtcagagatattgtactctgaaaacagctataattgatatttacccttccacctataggcatctttatcgattgatctggacgaagatgaaaaagaagtacttcattctgagtcagagaagatccgtcaagaaaagttcgcatcgctgttcaatctacaacaagaacgaaatggcctgattgaaccaaagaaagacctttccatacagcctggaatgtacatccctcgtcctcccagcgcgcctactgcttccgaaggagacaccgttgatgattcttgtgaagacaccacaacttcaacctcaggaacggagccactcaaccagacaaacagcactggtggtaccaccaagcacaacagcagttcaggtcatcgaaggagacatcgatctcatgcttcaagaagacaaccacatgggcaagggcaacctgctaggcaacaatggcagaggaaaggcggagacacttcacaccaatagcaggaaaggttgtgggaggtttgttttttgtcggttataatcgcaagcctggtaccaattctatgtttcatgcctcactatcagacggctcataacatggcagaattatccaatgctgttgttatgactaagagtatattatagttttaaactcggttcatgtcactgctgcgaaactgaagctactagccactgtatacacatcaatttgactttgcatatcactgttgtgactcgtgagagatctggctagcacgtacttatgttcagccaaattcttcaaactggatgcaattgaagcacctggtgtttataagaaactttttgtgctattagcatcaataccctcttattctttactttaaaatttattatcacaaaatattcgttggcaggcacggtgcttcctcaacttaacaaccttacaaagctgcagttccttgacccctctggctgtcatctgatgaaatccgaatcaggaatggcatggctgttcatcttctgatttctctctttatgaatagttaatctaaaagttaatttctcacattcatatatagctttagtttatgctatgtggtggaggcttaaagctcaagagatagtacagaaattgttgggcaggttcatgggtttacccaaaccccaatattatttgatatatacgcgggcaggagtgtggtctggcgagcaacaactaatgtgctatcaccttgggtttgttccaagtcaaatttccttgtgcttgaccgacgcatttaaaaccggtgtataccaaaacaaattagtatactacggaaatatgttaatggtccatttaataaaactaattttgtgtcatagacattatgtttttttttacgaacttgatcaaatttaaaagagcaacgtgcgtttgacttaggacaaatccaaaaatgaccgatggaacggacacgcagcgcggatagccacgacccatcctatttgcacccttaagtgcagtacagtacatataatttactctatactctctccgtactcatgaaagaagtcgttttggacagcgacacggtctccaaaatacaactttgactttttgtttctttaaaaatatttattgaaaagtgatatatgtatacttttatgaaagtatttttcaagacaaatctattcgtataatttttatattttcaaacttaacaacttaagagttattcatgatttatattcctaaggtttgacttaaacattgtcctaaatgactttctttacgagtacggagggagtatacggagggagtatgcattgacgggaatgccgctcacgcccatatacctgctgagtacgaagctctaaaagtctctgtgtgtgccgaattgtcaattaaattcacagtcacgtaacgttggtccgactaatcgtgtccatatacgtacgtaacacaagatcagcattaacaatcctcgccgaattaacgtctcgactctggagtacgtagcgacacgatccccgtccatcgtccacacacaagacgcccgggcgcagtgaaatggtgatgtgttgctgctgatgaattccatggaagacacggcacatacgaaattaattagaggctgcaatatatatattagcggatcgatcagcacacactgagcagtgaaattaattaggtcgacttgcccaacgagacaaatataatccagaaacacccggtagctttgctagaatctacataaccttgccgagtagctagcgctccccacggaggtctcggagacggcaaaatccaacgaatcgcatatccggcgcatatgatatggcttgcccactacttacaggtatcgttttctttgtctattttcacttgtacaggcaacattttagagaacaaacacaaacgcacaaacatttactactaggtcatattaagaatgttgtcttgtccaattagcagtataccctcgccatatttatacccggcctagaaatattctgactaggagctgctcgagcctgcttctcatgcagtcctgcctctgaccctagtaccaaatctcaatttctatcctcatatagtttttttgcagattgatgcatgctttcaactcaatttacttgcaattagggagagaatatataagaagatgaccaacttaggacattcataggattttatggttgactaaaatttggatatctgatgtgggagtggatccacatttccaaatgaacttcttgcgatgaatatgttcagaactatagtgttgatgggtcgttaacatatagacacggtaatcgaaagatgaaactaccttttgtaattgcaattttatcttcttgttatgaaatttacttagtattaactttgtttttttatcaacatatttaatatatgattatgtaaatatcttttcctataggcttgaaaggagtaaacccaattttaaaatgtattttacttctatgtcatagtgtgattagttttatgtcttacttttagtcctgcctattgtgatctggggtagacaagcttggatatcggataaatcctgggtctgccacagtttgttatcctgaggtggcctaaaccattttagcaggcgtttacttttttttttcccttttggtcgattgtggaaaagaaagccaaaattctacgaaaatcatttttgtagtagtgatctttttctcagaaaatagtatgtaccactgcttcttgtgttaattacggccttgcaggaaagaagttattatcatcactgctagttgtggtgtcgaccaccctgaccttgaagcataccgctgccagcaccagcagcctagctttcgcggcgttgcccggctgcccagacaagtgcggcaatgtcagcatgccgtatccttttggcaccatagatggctgcttccggggaccacccttccgcgtctactgcgaagacgaccatgcggtttatctccaggagcacaagaagttgaaggtcttgcgattcgagctggcccagggcgaggttctcatccagaagcgcatagcaacaagctgcggcgtcaacctcaccggtaaagccgt

SEQ ID NO: 4465 - DNA, 1116 bp, Oryza sativa
cattgagctcgggctttgtttttcattttcacaggtaggctctcgggcttagtcgtcgtcgttggcggcggcggcgggggtggggggctaggctggggcacgtggagacggtcggcgggtccaaaaaacaagggagaaaaaaagggagaaaaaattccatgtcatcgtccatgtggcgtgccacgtagacaagctcacggtcaaacgcggttttggaccgggatgataccataaaccaagtttagggacctcgacgtgcactttggaagttcgtggacttaagtgaaacctcccgacaagtttaaggaccgctggtgtattttactctttgaagtataatgctagagagcatgtaaaaaagctaatacatcttatatattagaatggagggagtatatatgtatgtggctggaatatttcccctttatgatctatgcattatgtggcaaatgtcattataattgattgttagttttgattcccagccaagggtatgtcatacttcttctgtccttaacaatacacaggctcttaacatggtctgctgctgggtggaagatccaaattcagattcattcaagcggcatcttgcaaggatacctgatttcctgtggctttcagaagatggcatgaaggcacaggttattattaacttttgcatcttttatgcataattaagggactaattccgtgtggaagtgaggctaacatgatcaatctgtttcctgctggtactactctaagttggaaaaatatgtttcatctagaaaaattaaattgtcctataatcctattactccctctagtaaataataattgacattgggagtactaatcctaatactgccaatgtcaaatattttagcggctaaagtacaatctagtgttgttatctatctatctatctattatatactaaaagaaaaagtacgaattacccccccgaactatcacggtcgtccgaattacccccctaaccacaaaaccggacattcttcacccctagctatacaaactggacgaattacccccctcgatccaattcgtggtggttttggtctacgtggcgtacgcgtggcagtccagtcagcatttttatttttaaaacatagtggg

SEQ ID NO: 4466 - DNA, 11070 bp, Oryza sativa
aacgaacgcgaacgaaacgtgtatgaacgcgaacgaacgtgaacgaacgcgaacgaacgtgactgaaacgcgaacgaaacgtgaacgaacgcgaacgaacgcgaatgaacgtgaacgaacgtgactgaaacgtgaatgaatgcgaacgaacgtgaatgaaacgcgaacgaacgtgattgaaacgtgaacgaatgtgaatgcacttttactaaaagtgtgagaacgagcgcgagcgaaacgtgtacgaacgagataattaaactattggtgaacttagcatatatatatatatatatgattatatatacttgaaaacgtgaaatacaatatatgttcctttgcgtttagactaatacattttttttgcatgttgcagagaagacgtcgtcgtcgtcgtccctcaagccgaagtggtagctagccctcgaaggaattcgcgcaggcaagtgatgtaaagatgtgattgttagagatataatataagattgttagatttctaatataagattattagattatcagagttagcatatgtgagtgttagagattatcagattattagacttagcatatttgagtgttagagattgttagagatttaatataagattattagaggtttaatatacgaaacttaattagacttagcatatgcgagtgttagagattgttagagatttaatataagattattagaggtttaatatacgaaacttaattagacttagcatatgtgagtgttagagattgttagagatttaatataagattattagaggtttaatatacgaaacttaattagacttagcatatatgattatctagggttctaatacacgacacttagacttagcatatatgattatttgagttttaatacaagattagtagagttttaatattacgcttagcaaatatttcttctatgaacagttggctgatcgcgatgaggaacagatattgtacgatacaatcgtagagggaagcagccagtactggaatgaagaagaggggaacgaggatccaaaccagtacttgaacgaggaggggaacatggagagggatgcggaggggaacgtggagagggatgcggaggggaacgaggaggaggctagtggaagtcatccctccgctggacagaagagggcacgcggacaacgaggtgccgcgaagaagatagagggtcggcacatcataactgaggtggacacagacggctaacatagtgccccggcagaaagcagccaagaattttgtacgccacagcggttgggttgtgagggataacgtgcctgtcagcaaggtgtactggcacagaacaagggctctcggggataatgacagctttgtcccggaatcaaagaaagagatgctgtggaccacaatgctcgagacattcacgctccctgcgggtacggagaacgtagtgaaaccctggactcgtaagaaaatggccaaacagttccagagcttcaagggagatctgtacaagaaatacatcctgaagggactaacaccgaacttcgacgtattcccaaagctaagggatcattgggacgagttcgttgcttacaagacagggcaacaagggcaagcgatgatggtcaaaaacaaggaaaacgccgccaagaagaagtaccatcaccacttagggtcaagtggttatagaaccggccaccgctaaatggccggatcgatcgaagttctggtactatgctcacggtggaacgcttaacccagttgatggctccctggtcttcagcgatcagatacgcgaagctgccagtcgactaatggacgcagtggaagcctcttctcagggcacgttccgacccgacagagagaaggacgagctgtcactcgccctacagactcccgagcattcaggacgaacacgagggaaatgcatgattccctggaagattggattcaaggaggacatccacacgtacaggagttggatgaggagcaagagagataccgaggcgaagattgcaaatcttgagtacagggtatcgagctacgagctcagcatgcaagaggaggtggcaaggaaggtggatgaatgcatggcagcacatcggtcccaggatccccagccgtacatacctcctccaatggtcagcccatcaggcaatcgtagcagctgcgcctcaacggggcaggtaggatcatagagcatggacgccatgcaaacccaagacaaaaccacctgcccgttgatgagatcactagtggacaccatgtgagctgcatattcccttcaagaacttatcaatcaaggtatgctcgtagttttatgatttttgacttgtacgttccgcaagttgctgcttaggttgattactaatagataacctctcatcacgtgaaggtggcgtcgggaatggccatcccaacggacattttagggacttaccactgcaggccaattctagcaggatactcgagggtcgaagttgagctggtggaagccgcgtacgaggacctcgagttggactacccaggaggagacggtgagacgcatctacgagacataagccacgccattatactatggcgcaagcgctacatcatcctccctgggcgacaagcggcgtctcgtgcaccatctctgccggctccgccgtctcctcctgcaccatctcctccagctcctccgcctcctccacctccacctccaccgtgtccgcctgcacctcccaagacaaggtctcgctaagctccacctcctgccagcacaagggcaatgaagaaggccaaagttgacgccaccaaaaacaaggagccgccatacgattgcagtcaagaggagcttgacgcttatgtggcaggagaagtgaagaggcaactcaagcctcggagtcctgaaaagaagatacctattgacccgagcatgaagaagttcttcaagggaatgttcaccacaaacaaggaggccttaaagctatcggactatgaccgaacacttaggaaagcctattacaagaagtccaaaccagttcctcaacttggagaacaaccaaaccaagaggtcaagccattggtgaccggcgaagactttggcataacggatttcatttcggacaccggtctaactgtggttcagttggttggaggcgcaccaatcccgaaggcggaagtggcatacaagtttgaactcggtaaaccgcttgtcaggcctgagcagctgcagtccctaccgacacaaatgtacaaattccgtgaacggcacatggaaatgagcgccaagggtagagagatgttcggagcgaggatcagaaaccccgacttcttgcaaggagaagatgttctatggatccatttcaaggatgtcttcgatctgtaccatctggatgccctcgatgtctctcttctgagcacatggattttgtaagtatctttgagttcgatttgtttcgttcaataattagctcctggcatatatgtaagcaataataatttcctttcatcgttgtagaatggagattcaaagggcccgacggcggggggtttacgatactgggttcatcgaccctcggaaaatcaacaccgaaatgatcgacaagtacgagaaagacacaaaggacaatctcgtccatctcctaacgcagcagcatttcaagacgttcatactactgccgtgcaacacagagtgagtttttattgtcattcgaacaaatttcattcccatatatataacatgtacattctgatatttatctcatctcacgcatattccagattccactgggtcctattatttttcgacttggacgcatgcagagtcactgtgtacgactcaatgaataaagaggagaaggtttttgacaaggtcttccaactgatagacaggtaatataatgccatctattccaaagtcgcgggactctgttgctattatgttgatcttgggtaataattaattaatcatagcttgcaactgcacatgtagggcttgggatcggttccatcaattggtccgcgggacttggaaagaaaaacttgacggaggttttattttccagtgagtacatgcatgatccaaaattatattgaattgaatctataattatagttaatataaagagtatattaaatctctcatcgtttctcatgtagtgtgcaaagcaggaccagggaactaacttatgcggctactacgtatgcgagtatgcccactgcctatcaaaccaaatatacaccacacgagagctcgatgtacgtatacataaaccattcaaaatttcattgtgtatcgatttgttaagttgtttattaatttcatatattgatatgtcattatttttcgaatgatagcgtattcacatgagggaaaatctcccacacaaggattttatcacgactgttcaagaacaactaatggggttcatcaacgaagaagtctttaatcccgatggtgaattctactacgacggatcgacaattcataacgtcggtccttcctcttctgacgtaacgccggcgtcgaagtcgtagctatagctagtgagaaaatgaattgtacatatatatatttatatatgtacgtacatttactttagtgttaatatatattttggtaacatatatgcacataaaatgttaagtgctttaaattataaatatgtgtgtaatatatgtatttatacatatacacatacgcacatacatatatatatatatatatatatatatatgtattctatatatatgcataatatatatattacaatgcatatatatgtattggaatatatatatatatatatataatcaaccatgcagcaaacagggccatgcaaataaaaaaaatggtacacagatctttagtcccggttggtaacaccaaccggaactaaagatggatcagccggccacgtggctgaccgatctttagtcccggttctgttactaaccgggactaaatatcgatctttagtcccggttatttcacccgagactaaagatcgctatctttaatcccgaattcgtagtcccggttggacaactaggactaaaggggggttacgaaccgggactacaaacggtttctccaccagtgtcagtattctaaattcacaaacaaagagacctgttcagacacaaggacaccaacagtctgatcaaacggcctggcaagctcctggatttaacatttcacagcagcagcaaccttcataaggtttggagcagcatgacggttgtacttatatttatgtaaatgctatatccaggaatttttccacttgttagaggcaacccttgttaaaaaaccagccccgaaatcgacatcgatagctaaacatggaagaaaacgccataggagatccaaaacaatgacgacaccgagacacgatatttggtaacggagttcagtcgtagcctacatctccggagcactgattacgggcgctcctccccgatccagcatatacagcgtatcagagttacaacgactcacggccggtcgccgccggcagccgctccctctcgctatgctaagttgccatgcggttacaacaggcacgtccctctatttatgagagaacctaggatagagtctgactcatactctagtcctaatacctattacaactccaagtcctaaactgtaaccaactacgtacacatattcgatacaatctctaacaaactccaccttggcgaatatgtcatgccaatttgaatctgttacttgcttgaacctccgtgtaccaggacttgagttggttcttccgccgctcacgccgagccgcccgatgagcctacgctaggctcgccgccttcaggattgtgcatagcaataccagcatacccatcttccatgactccacctgcaacagcactctcttgtaacttgtacaaacatgagcttgtcctctcaccagtcataatagtcttgtcgtccttcatgatattcatgatcttcctattagaatccacctgatacaaccaacctgtctcatgtaggctcccaagcgtaatcaaactcttccttagtcccggcacgtgtctcacatttgaaagtagcacttcgtttccatcatacatcttgaacttgacatcacccactccaacaacacgataactcgtgtcattgcccaagtaaacaacaccaaaatcaccagatttgtatgaagagaaccactcccgctttgatgtcacatgataggaactagctgagtccaacatccacgcttctccagacttctcgttagacactgtgagaatctcatgactgttgctatctgaatcattaccatgagctgctaaacttgcaatgccacctttcctcttctttagtaacgggcaattcctccttatgtgtccaaactcatgacacttatagcaccgtgccccttctccttgctcttcggcaccctcgtttcatgatcatgctttgccttgactagcaaactctcagcctgagaagcctccgttgcctcatttttctttgatcttctcaagtctcgtgcaagcaacgacgaaattatctcctcagttttgacagtacccttgccgtgtgtcagggtagtcaccacatgttcataagacggtggaagcgagcacagaagaattatggccttgtctttatcatccagtttcacatctaacttgcttagatccacaacccactgattgaagacatctacgtgcttcctaagatttgactcctcttgcctccgcaaaccatagtaccatacagctgttgtttgagatacaacttactcgtcagcgacttggacatatacaagcttgccaacttgtcccaaatttcctttggtgatttttcatccatgacctggtacatgacaaaatccgagagcctcaaacgtattgttgcagctgcctgcgccttcatctcatcccacttgtcatcatccatcttttccggcatcgtctcctcaagagccttggatatcccctgctgagccaacagatccttcagcctcatctgcgagagaacgaaattcctagtgccatcgaacttcaccacctcaaatttggaaaccaccgtcgccgccatcaacgataatcaacttgatcagctgtcgccctgattaaattgatctaccctgatttaattgacccactgactaaacttgcacagtcaccagccggacaaaaccaaccccttttttctccaaaaaaaccggttcggttttatttttggttgaaaaaaccagtcaaaccgagcggtcaaaggaatcagatcgatttctctccttccttcggccctctctcgctccccttctcccgatgcgccgccacctcctgctcctcatgccgccgctctgcgccaccggccccgcaagaaacaccgcctcctgcctcagaaaccgcctagggcgtcgccgcctcctgccgccgtcacctgcgccgaccccgtgaggagccgcctaagggtggacaaaaagctcgaaattcgtggctcggatcggctcgtagcaagctcggctcggatcgactcgaactcgtagtcttaatgagtcgagtcgagctagccttttagctcgtgagcttaacgagctagctcgcgagctgctcgtttagctcgttagtataaaatatcactaaattttcatgaacttagtatttattgactagtgcttagtcttttagttacatcaaaactattcatattcagtaagtattatattagttagtgtttattattatgttaatatataataaaatgttaaaattgaaattattaatacgatattaataagatatagctcgttaacgagcctaacgagcttaacgagccagctcgcgagccgagccgagctagccttatagctcattaacattaacgagccgagccgagctggctcgttaagataacgagctcaaacgagccgagccttaacgagacgagctggctcgttatccagccctagagccgccgcgtcgccaaagtccggcgccggttccacgccggtaaccgccgccgcaagcccctgctcgagctccgacggacgccgccgagtaccacgccgcctgcaatgatgcctctagccgcccgtgaactcgccgccccaaaccacgctgcccacgaaatcggaggtaagatctcgcccttgccttgtggtttgtttcgattactttgttgcaatcccgtggtgcttttattgggaaaacaacgtgtccgatttccagtccaaatcgaatccgtatcaaactccctcctgtgtcgaacgtggtatccatccagcttgtcttcggtcgtgtccatgccgtgaccgacacatagataactccatggccaagtcttcctctgcatcacgaaacaccaaaccttgcacgtcctggctcagcccgctccttctcggcatcaccctgatctccgccgccggctcggcttcgacgcaaaacgcgcacaccgccacgaccctgaccttctaggcttcttcgtatctccagcggaacctagcaccaccgccaaacaccacttgccgactacagcaatgactagtgccactgatctgttgtcatcgtgattttcttgatctgtgctagaaacagttgaactagacctgtctagggttggaaccagcaccagatgccagtctagacgccctaggcttagtcctgccatccaccgctaatacgccgcctttgaagtgcaaatacctcgtcaacacctccaaaacagcctataggatccaccccctccgacttccgattgaacgccatcaatctagtcacgagccaaagccgacaagtcgcatgtcgtcttccctgccgccgaatgacccgagcgctatgtctagccgtctccctgtcgaacgcaactcatcgaaaggcccgggccaccccgcccagagtgttcgaatccactgatcaagaacgccgatcgcctccagcttcaatcaatccgagcgtgcggccgcacatctccctgtcgagagtagctcatcggaaagtccggaccacccgcccgaagtgtccgacccaccgattggatcgccaatcgcttccgccgccatcaactcgagcaccacgtctagtcatctccctgttgaaagcagccatcgacggttctggccgccgccagaagtgttcaatccaccgatcaagactctgttgatcgccgccgtgctccaccttgcgccaatgcccctccctggacattacaagcaagctacgcagtgtggggcacctccatcgcgcctctaccatggacctcccgcaggctctgataccacttgttataaaaccaaccccaaaatcgacattggtagctaaacgcggaagaaaacaccataggagatccaaaacgatgacgacaccgagacacgatatttggtaacggagttcagccgtagcctacatctccggagcactgattatgggcgctcctcacagatccagcatatacagtatatcagatttacaacgactcacagccggttgacgccggcagccgctccctctcgctatgctaagtcaccatgcggttacaacaggcacgaccctctatttatgagaaatactaagatagagtccgactcatactctagtcataatacctattacaactccaagtcctaaactgtaaccgactacatacacatattcgacacaaactctaacatatacagcaatttttccacttattagtggcatccctcgctatgttttgctggcttgatatttgatgacttccatttctttttgttaaattttgacagccttgctcttgatgcagtatttgtagactccactgctcaaactggacgtccaggtacaggtgactggcaagaggatttatatcaaactgcactctgttggaactttccaatgttcatgttattttagaaacgtcttcctaaagttcattgaaaagatttatttttgaattccagtactcccattcatgtagccttttcgacagattttttttatatacatcaacagattaaaagattgaaggacaagcactttgcagaactcagtcatttgtgcaataaggtatcaatgaagctagaatatgtggatagccaaatgccgtttcaaatgcctatagaacagtatagaaagctgaagaaatttaaagaaattaaatgttggagcctccaggcattggacgtctcaatgaacttcttgtcagggtctttaccttaaaatttggttgtccttatcttataaaacactatgtggaaccccgcgcattgctgcgggaatttaatatgataacaaataaaaaaataacgtgtaagatagctagataacatcagattaagtaaattaatgtggtttatgataatttaaatttaaatagtatgtagaatggtgattcaaatgtaaaaagtaagatggtatgactttatggaagaagaaaagaagggagatagtttggaccgtagattaatcatctaaaggctaaaaacaattgatgtgatatgacttaattagagaaaaaaaaagaagaaagataatttagaccatagattaatcatttaaccactaactaagtgaggataaactatatatgtatataggatatcataaaacataataaagatatacattgaaacattatgtgaattatgttggatcataatttaacatgtttgtatttgaaaagctgttaaattataaaaactataaagatataacatgtttgcatgatgtttaaatgtgataattgttagtggatgatgatgtgtcatcttgttaattagtggattagtggatgatgatgtggcatcttattagtggatgatgatatggtatctttgtatgctaagcttaaggagttagtgaggataactttatagtagtaagataggatttcttgtcagggctcctttgaacctgctcatgatgttgttgttttccctaaaaaagaacccagctgtaatgcacgcaatattactggataatttgtaataatcagccgtgatcagagctagcatatattgttttcttgttccagataaggttatcctcttgatttgttttttctgagcttcatgaactaaaggcaagaggctaacagtgtatattaccataagtctagaagagctctgtgctcatatagtcatatatacatttatt

SEQ ID NO: 4467 - DNA, 11986 bp, Oryza sativa
  unsure (1)..(11986): unsure at all n locations
ctatattggttggggaggagcgcccataatcagagcctcgaggatataggcttcggctgaacctcgttaacaaatatcgtgtattcctgtgtcgtcatctggcatgtcttgggtgatcaatgactgaagcgatcgagaaggttagtcgtcgtttcgctatatcgactaacttttataacatatacgaaagggactctgcagtgcgtgccaccactccttgtgacgtgtgccatcccccacgtcgaagtttaggcacgcacactagtacactacttctacagactcgctagatcactggaacacgacgcccacatcgcgcgcaggcgagtgtgcacgacagactcgacaaaagagaataaacggtgtgcgagaaaagaaatgaaacgctacagatagcttcctaggataactttgagacaccggcactggattacttcaagtctaacagtcgaggctgaacacaccgaggagcttcaccttctcggagagctagctcctccaagaactcgtcacggctctcgaacctctccccaatcatgatgcgtgcgtaccatgcagatagagacgactgctgcgatccgctcggtgaaagaaattgacgtaccgcatccctggatgaagcgacagtggcgagcgcgcccctcctcctccctgacgcggcgtgccctgagcagctcgacaacgcagatctttccgacctgccgccacgctcgtcgtacggcacgacccttgctgccgatcgttcgttcagaggcgccccatcaatatcggttggtcttcacaaagccgttcggcgctaagtaccagcatcagatccttcagctgattctacaccaagccatcggctatcgtctatcggctggtacatgcttttggcacacttgagactcgagcctgcaatcgtcatcaacgtccgggtctccaattctccaacagccgattggttaacctatcggttaatcgctgctacatcgatatcttgtcagttacagtatcagactgactggcacacacgcacttcatcaaaatttaagacatgcactaagctaagcatatttccgcctttatgttgtttatcacgtcaacagacttctaataggaaaaaacatgcatttgaatcattaggaaaacctgcgtatacagaactgctggtgtttctaaaacttattttgagcttttatacgtcacagccggtagccattagcgatgaaaaaaaaaagctcagagatctagaaatgtgtaacatcctcaaattttaaattaaaatttgactgcagcatgctggcttttgattaatttagtgtgttttaaaaatttatttgattttttaattggttcaagtattacttccttagagccctactaatttaccataattattccctttattccaaactttagtgaatttgaacaaattctctcaaatctcaaactatagaatattttcttagtttactccaatattagtgaggatttgctatacttcaaaccctagtgaaactcttccaaattcatagattaaattcattcttttctaggaaaatattcaaaaattcctgaaaacactgttcattgcactgaaggtgctcgacaaaatgcccagcccagctagagcagcccaattaccacccaatcttgtgcaaagtctatgttggatccttggggaccacatcccactcaaaaaccgtggtttagttgaccttctcctccccttgcgcgcgccgccctggcgtccgacttcgccgcgcgccgagccgccgcgcgtcagcctcggggccgcttgcgcgtgcccgatcgtcttggcgcgccgtcacccgtccaacgccttcaagtcgccgttgccacaccaatcttgacgacgacaaagccgggacgacctccgccgcaaggaatcgacactcgacgccgtgcgctcccatccaagccgccgccgagtgcgattttgtttctatccggggtgaatcgcgccaatttttgccgcacggttgaattgaagatagacggtggtttcccctctcacaattcaaaccattcacccctgagccagccattttcaccctcgccgccgccgcgcgtcgcgcctggattggcgccaacacgtcgccagccaatttcaaccgcggtcaagccaatccttcgccggtaagtattcgaacgtggcctcccgccactcaaattgatcttgcccaccctctcacagcctctaccgccccagccgtatccaaagtttgagctcatccatggcgatgacggtgtccgagctcatccgctcctcctagccctataaataggaccccaatcccttccttgtccatcatcgatcatcaacaaccataaccccacaactccgaagctctgcttcgccaatcaatcccatcaaccaccatcgcccgtcggtcgaacactttgtgcgcgatcgactccacacctctccacccattctccgccctaaataccccttagaacaccttatatcaaccatgttctagcatagtgagccctaatcgaagccctgcgtcgagttttacctcgccgcaccaagccgagcaccgccgcccccgcgttgctctgttctttgccgccgcgaagtttttccggccgcaatccgccgtttcaaccgatctcggtgagttcttccgtttcaaccatctacatactacctagagtctatttttgcaatcggtttgcactatcatgccaccctctgggcttccgacgtgagcacggccgccgccaatggaggcgcttgtcggcaagtattctccgcgccttgccaaaggtcggcaagctgttggaatccatctaggcacctcatagatgctctagaatccctcccctaaccatgtctaactctcgtcacctcgatcaccatcacggcctaactgtgccaccgccgccctagccgctaggccgtccacgcatcaaattagctcctccgccgccgctcgccatcgccagagatccctagctccctctagcgccactgcaatcccaaaccctaacgccgccgaccgattttggggaacggccggaggttgaagaagagaagagagagagagagactgacaggtgggacccacacacagtgccatttcacttttatttgattttcaaaatatagatccaattccagtgaaacttggaccaatattcttctaaaatcattctctatctattgagcccctttttgctatttttgtattttattttattttctccatttttggattttatttgaattccttttgaatttgaattttatatgtttaaccctaggtcttgaggattcttctgactcactaaataatattaatcaatctcaagacatcgagcaaggcaagttactatataccttttgatcatttaagcctatattttataaattatttatttatagccttctattcaatattctattttatatgcataattcaatcatagaaacccagataatttagtattgcttattttgcttacaatctggttaaaataccttatacttaggttgggacagtacgtaagatttggttgatttccgggtggctagtactgtctcgatcgatataagttttactaggtacttatgtcgaacgaacgggtacgaccgcagtttctagaatggggacagacctagttattatgttaattagcaatatggcacctctgtatagtggttcttatttttaagtcctcgcgcaggaggcaactatagccgcgaagggcaacttttaaccattaccatgtacaggtaaatggtttgtgatactcgagtataaactatatggtataattctaaaccctgatcgagatgacgtggtgtcatacgatcagtttccccttaaatacctcgggaacgccacaactcctcttgctgctattaacattacgttcagggcatatgaggatacaagttcatggaacaggtgccacaattgttaataacttaatactgggccttgactaaagccgatgattatcagcaagtcgtggactgcaggtaaagcgtacatctgctgcagtagaatatctttgaaactattcgaatagccgtactcatggagttgagtaccaggactcatatggtaccctggttagaaatctaaaatctatatgattataaattcttgctataactcttccagaatatttattattgctttttgcaaagaaccctgctatatgctaatgcataacatatttccatgataacttgctgagtattgtgaatactcattcttgctctcataaccccttttaagatttgggtcaagaggaggacccctatgactattactacgatgaccacgataatttagagaatccctaaaggttttacctccctagtcagaatgtataaaaacttccgctgtatattaattctagttaatcaaataggtgagtacctattattgtaaaacccttagtattataaaactttaacgtatgcaatgaagaactagttatattgtatgtatcaacatctactgatccagggattgatacattaattttagtcggatcaagttgttagttttggacttcgacaaaatgatatccacggtatattcttctgtttatagaaataagtgatcaagcatacatgtgttgtttctttgttttgctgttttattagagtttcactaactcgacccacaagtatctttcagagcacggcagcacatgtgtggccatttttttttcaaagtttagcatcagtatttttatgatgcctagactgaatttatgaagacagtacatgtagatttgttgtgaaaagtacttcatctattataaatttagtaattatctttcagatcgtaaccataattcaattaacaatcattggggtaccattcaagagtaagttcacaagttctatgggtattatgagcaaattcttaatagaccttaaagtagaataacggttcaagattatgtaatcatttaattgagttagcgtctagctttcttaaagaatattgtttttaagattatgtgaattaagagaagtggcacacaaaacgggaccaaccaaaatatgtagattaattgcataccttcattggaataagactgggttgtacgtaggatgctccgagatgtagttgtggtgcagcctatcatatggcccgctcgacgatcacgacgaacaacctgactaccaggaacagcaaaaccatgtcgtggagcattcgaatgctcatattcatcttgtgtaactattgctgctgcagcgatgagttcatcgtcagatgacgatgactcatccaacagaagatgtcttaaaattaaaatgaagctcattgattgatggaagaaggattcacaacaatgtgaatggagaaaaagacagcaagcaatgtagcggtatatgtagggctgaaattttacatgttgcatggtcgttggacacaattttaatgagctagccgttggaaagctagctgttgaacacatcaaattgaaataaaaatatttcattcattgcaaatatatcaattaaaaaactactaattaaaaatatatctgttaaaatttacttattttgaaatattaacgcaataaataacaccattaaaaatttagtcgttcaaaatatagtccttacaaaataatataaatgtatggttagttgaaagatattactgaaatatagaagggtgtgatatggatgatctgtttaataagtgaaaatggatacgaaggagtaatccttttaaacggccatctatttgtgcatatggatgatcaaatttggatgaactgttggggtgctctaatacatatccgggaccgttggacacaaccacctcaatacttgctataattaataccggtagtccaatcactagatatattgtgtctttttattagtgtcacgtctgaaattcacaatcactaggactacatgtctgggaccgttggacacaaccacctcaatatatagtagtacgaagtatttgctagtaattaataccgatagtccaactgctagagatagagatattagtgtacaccacgctgacatgtcaacgtgttgtgccacgttagttaaagtggcagaaaaaaatttaagaaatagtcttatctctcccgtctgctaaatatgtaacaacaaatccaaaagtgttatttgaagagtggcacagtttggtattgtaataaatactgtagttaagccccccacagtagctctaataaaaaggcagccagtatatatactggatatagctggtcgtcgtctttgcattgtctccttgtccggtacgttggttggctctagcttagctggtgctcgatcgcgaacatcatgtggaggctgaaggtggcccagggcggcggcgctttgttgcggtcgacgaacggcttcgccgggcgagcggtgtgggagttcgaccccgaccacggcacgccggaggaccgagccaacgtcgagagggtgcgccgcgacttcaccgaccaccgcctccgccgcccggagtccgccgatctcctcatgcgcatgcaggtatgtgttgtgtgctcctccggcttgataataattgtcgctttggagaaggacacggtcatctacagaaaacaattttgaccaaataattcgcattataatatgtataaaagtgttaacaaatatatgattttatgattttattaaagtacttttcaccgtacttggaaaataaatattttaaaaatgatttataatcaaatattttaaagtttgatctcactctgttttaaaacgataagtattatcagcccggagggagtatatagttaatagtgttaatttgaactgaaatttatgtaatttgaaacaggatcactgttagctagcttcatttgatcgattcgatgttagtttgaccatctgagatatgatcttgttgcagtttgcaagagaaaacaatcaccaacgccgtggtgatcgtattccaccggccgtcaataagcttggcgagaaggagcaggtgactgaagaaactgtgatggcttccttgaggcgagctctcgatgagttctcctctctgcaagcagatgatggccactggcctggcgacctcagtggtgctatattcatcatgcctgtcttggtattaatttgatttttttggctaattaatattaatattcatgttcaattatttcgagattaatttctagtgacctagtttctgtatgcagatattttctttgtatgccactggatcactggacactgtcatatcatcagaacaccggagggagatatgtcgctacatctataaccatcaggtttttatttatttatatatataggtccatcatcttaaaaaaaaatgctatatatatataggcggactcagaaatatacccatgcgcatgccttcatggctttaatagatttttattagaaaagatagttctagctccctccatccagatattgctatagtttggaacgacagttatacttaatttacttaattctacacatgcagaaagtgctaattgatcaactcacgaataatttgctcaaacaaaacaatatgcacatatagttttgatgtacccctctaggcataaatgtttgacgcataggacaagtttcgatcaaaaacttttgaaacttaatttgactaccagttttatgttaaaatgagtttataaaatataataaatttatgatattgtggtataattttctaggtcaatctactcatataattttttttaaactaagtatttgagaaattattgtagtcagttcgaccagatcttattaatattaaatatttataattggaaggagtaataattaaatattgttgtacagaaacattgcattttttatatttacatgtgcagaacgaggacgggggatggggcatgctaatcttgggatcaagcacgatgtttgccacatgcttaaactatgtcaccctgagacttatcggcgaggagccaagcaatgagcaattagctagaggacacgcctggatcatatcacatggtggcgccacccttgttccgcaatggggaaagatatgtctgtcggtatgtatgttagattaattatcagtacatcttgccaaccaattaaggttcttatcgtttgcctatataaaattagccgccgttaaaattcaaattttaaaactagattttgaaattgattttgaagtttttttattaatttttatttttagatatacttttacatcactaatgacatatatataaaagttttacctataaattattaattttttagctaatacgctatacggcttattatatatcagtattggtacctaatatttaacaaaactttcagggcatgctaaggcacagttcgatccagcattttgattggagctgttcgtggattggaaaacgggacagattattaacgcatgattaattatgtattaactattataaatttaaaatttagatttatttgatttagaaaattctatatagaaattttaacataaaacatatcatttaactcttcggaaagcatattaacgaaaaatgaggaagttgatgaaaagaagtaagccaaagtcagttgggtgccagcatagctctacaactatttactacagttgcgtagcacggcggtagccagttcaaaccgttcagagcattatatatatagaaaccgtggcatcttctgagtatgtagtagtaagaagttaaattaattttgatcaacttaagtttggattcatcgcagataattggagtgtatgagtggtcaggaaacaaccccatcttccccgagttatggcttgctccacaattccttccgtttcatccaggcatgtattgcacagttgtactacatttatttttaaatatataacgttaacaacttttaaatataatatttaatctttaaatatgatatttaaccattcatatttttgaaaactatatgtattatttactttgttggaatttagtttatcattagaggtactctaagcatgacctattttttttatatttacacaatttttaagaagtgaataattaaatattatattaaaggtgagcaacgtcatattttaaaaaattgaaggaagcactataccaaacacagcagtatatacaacaatttaatgtcaacatgggactgaaactttaatataatatttcgttatttttgttatgaatctaaagacttgttcactttgctactatttttaaccttaccaagttttagcattactaaattttagtaaggttgtcaaaattttagcaaggttgtcaaattttggtaagattttatatgtacttattaaaatttggcaacaaattaaatgtagccattttttttaactttgtaaaaaaaattagataaggttaaaaatgatagcaaaattaacgagccataattatttatctgcaggcaaattctggggcccgacccgcgtggtgtacgtgccgatggcctatctgtacggcaagaagttcgtggggcccatcacgccaaccatactggcgctgcgagaggagatatacacggacccctaccacaccattgactgggcccaagcctgcaacgcatgctccaaggtaacaaataaatattggccttttttttttttggaagttgagggagtaaatcggactcgggctatagttgaagaatgtaatcagacactcgaacgaggaaaatgaaatgatcccttcaaaagaattgaacctgactttagaaaattttttgggtgtcacatcgaacgtttaactagatatcgaaagaggttttcggacacgaatgaaaaaactagtttcatatctcgtctggaaaccgcgagacgaatttattaagactaattaatccatcattagtacacgtgggttactgtaacacttatagctaatcatggtctaattaggctcaatagattcgtttcacgatttccatgcaaactgtgtaattagtttttcattttatctaaatttaatgctccatatgtccaaagattcaatgtaacgtttttgggaaaaaaaaatttgagaactgaacaaggccttaacaactcatccaaatttgatcctccatatgcctatatagatggccatccaaaaaagattcctcctttatattcctcctcactccaacggatcatttatattacgttctctatatcatatcatcctatattttattatcctatattttattagtatctttcaactaccatccatttatattattttttctttttttcacctttctcttacttctctctttctctttcttctccagtcctctcgagctctcctctttctctcttctccagtcctctcttctccagcggcggagcaacgcgagcggaggggcgaggggcgccgccagcggtcgggggtggagggcggtgggtacaaaaggcggtgggggcggagggcggcgcgggctgcggggcgatgcgagccgccgcgcggaggagaggcgagcagcgcaagcggctggccgacggcgggagcggaggggcggcgcgagcagcggagcgacaggagcggctggatctggccggagcgcggttcgccggcgacgacggcatggcgtgcagcgctgcgcatattctctaccttcgctcctccatgccttgatccggattggggcgggagaaccagatggatgcggcggttacgggatggcgttaggagagagaaactccaaatctgccgattctttctccggaatagcgcatgcgttatctttggaggctcggatggcgcatctactggagcctgattttctcctcccatgtgctatatttgagatggaagattggatagagcatctgctggggatgctcttagtctgtaactaggccttgctttattgggtttcttctctctctgtgtgtctgcctgttgaagtgtgtatactacactattggtgatggcaggaggatttggtctgcccgcgcacgctgctgcagaatgtggtgtggacttcgctctacaagtgggtggagccggtgctaggcagcaggccgatgaacaagctgagggagagagctttggatagactcatggagcatatccattacgaagatgaaaactcacagtacctctgcctatgtcctgtcaacaaggtaaatttgaaatataggcgaccgaccttgctttcagggcaaaaaaaaaaaaaaacaaaaaaaacaacattagaaaattctgactaatgattgaactaacaaaattatgtgtttttaagtattatgcatgtaatatcactatattcttcgtatttgaaaaatactttcatatatatgatgttaattttgtagttttttataatatattatgaaagaaatcaatgatatttaaagtagagtaaaatacaacagcggtccttaaacttattgtcaagttacacttaggtccacgaacttataaaacgcacatcgaggtctctaaacttggtttattgtatcatctcggtccaaagtctcgtttgaccgtggtcttgcctacgtggcacgccacgtggatgatgacatgaaattttttatttttttctccctccttccttctttttctctctcttcttcttttttctcccttctttttttttctctctggcggccgctgtaccgtgagctccacagccacgcctccatctccttctccatcagcctccgctccactcgccgagccgccgtgccggaggcgagcgcacaacgggagggaggacagcggcgctgacgggagggagggggacggcggcgacttggggaggatagtggcgctgacgggagggagggggaccacggcgcatagatgtcctcctcgatctccttcggggtgagcgccaccaagaacggcgcgcgcttccggcgttggtacgaggacggcacgggcaccgccgccgcccatgatatggaggcggttgggcaccgccgcgtccgttgccgcaggttccacggcctcgctgtacagttgcattcggctataagggcagctaganggatcagtaaca

SEQ ID NO: 4468 - DNA, 13897 bp, Oryza sativa
  unsure (1)..(13897): unsure at all n locations
ttttccttttttacatacatgggcttttggggtatgtatttctttccgtttcatgttataagacgctttgatttttttctagtcaaacattttaagtttataaaagattcagcaacattttcgacacaaaagagtgttataagatgctttgacttttttctagtcaaacattttaagtttataaaaagatgtatcaacatttcaacacaaaagagacatactatcaaaatatattcaatgaaactaatttggtgctgtggatatttctaaattttctataaacttggttaaactaaaagatttgttactatggaaaaatgtcttatcgaagggagtactttgcaaaattatgagaagactggtcatctcccggagctaattcttttatattttagccctttaaaaaatttattttacaaataaatctctggaaaaacttaacaaacgacactagcatcgaggacccatatgtaactagaattctaaaaagggttaaaatgtaaatgttttataaaaataagcccccaacactagaggggagccctaatgggcgattgatcgcccgctaatgggggtagcgatcanattngntaccccccctcccccctccctccttggtttccttttttggcaccgtattacttttctattttagtaaatttatacacctcaagtttatacacctcaagtttacacatctgaagtttggagacccaaagtttataagtcaaaagtttatatatcgattcaaatttgaatttgaattcaaatatttttttatatatagtatttctatacatctaaagtttatacacctaaagttttatagacctaaagtttatagacctaaagtttataagttaaaagtttatatatccgattcaaatttcaatttgaattatatccgatttaaatttgaatttgaattcaaatatccgattcaaatttgaatttgaattatattcaaattcaaatttaaatttgaattcaaatattatatatatatatatatatatatatatatatatatatatatatatatatagtatttctatacatctaaagtttatacacctaaagtttatagatccaaagtttataagtcaaaagtttacatgcccaattcaaatttgaatttgaattcaaattttttatatatagtatttctatacatagatttttctaacttttgttttttaaaaaattttgtgtggtgtactgtagtagaaagagaagaaggggaggaggaaggggggagaggagggaggagtatatactataggagaggggaagggggtgatcgatgggagcgatcacccgcccaacaggatttccaaacactagagtcatgggcggaaaaaaaattccattcttgaaataagtttttttaggtaagtttttaaaaaggattaaaatgtaaaaaaaatccagcctcacgcaggatacgttggtgcagcccattggatcaacatcactgaacttacaagccactagcctttccggccgccatctagcatttttaatggaaaagacaggaaccaatacttgtatataataaaatagtagtatagtagcggagcgagaatcctaatgagcgattgctcgcgtgagggagtggatagcgatcggttggtgggcctctctttccagttcccacgttgctttctttttttttcaccgcattgcttttctattttagtaagtttatacattttaagtttacacatctaaagtttttactgttaaagtttatatatgtttatatatataaagtttatactatgaaaatttatatactcgatttaaatttgaattcaaattttaatatattttaagcgatcagttggtgggcctctcttcccagttcccacgttgctttcttttttttttgccaccgtattaatttcctattttagtaagtttatacattttaagtttacacatctaaaatttttgtgcggttaaagtttatactatgaaagtttatatactcgatttaaatttgaattcaaatttaaatatattttatataaaatatttatatacacatagtttatatgtacaaagttagcaatgtatatatgtgtgtgtgtgtgtatatatatatatatatatatatatatatatatatatatatatatatatatatatatatatatatatatatatatatatatatatatatatatatatatatatatatatatatatatatatatatataaagtctatgtacatgaatagtttttagtgtaatatattttttatttttttcacacttatttttaaattgattttaaatttacgaagaacccacgactaattgcgtaacgcagcgttgcttttttttacacgaggaaaccgcgtgcgggcgtgatttctgatcgctggcctccggcgccagcgatcggtcgcgcagcagccacccctgtagcggagcccactggatgtgtttaaaattttcaggggggaagggagggagggacgacccccctcccctgttatcccatcatcatctcccttgttgggttctttagagttcttccttccttccttcatgctccgaactccgaaggaggtgccccagagagttcatccaatctgaccaaatcacgtaagcaatcgatccgggagcgaagttgcacgcatagaaaactacggacggcggctccggcgacttggctccagtccggtatgtggtatccactcctccaagttcttcttctgttcttcatcatcccctccctcttctcactttttctggattaaaaaaaaaatcatggagaactcgcctagtgaatttggtggtggtttcccaacctccatcattcccttgttttccttttttttagaaatgttctatagaaaaagttacggtaaaaaaccatattaactcatttttcaagttttttaagttatatttaattaaccatgctttaatttgttactccgttttgcgtgtggagggttccaacccaaatagcctttgtgtctcatcgatcgcccattcagccaccatctagggaaaaaaaaccgtcaccaagctcgactcgtatctggagctctgtttttttctcttctcaaaaattcattttttttaaaaaaaattactagtgaactgtgacaatggtttacgtgatatagtaccaagttattaactaggaaaccaatccacctataagtttatttcattaagtacaattacaatttctaatcgttttcttttgtattatactactaagtttggttatttactactccctccgtcccaaaatataactacttttagtcctcaagatttgtcccaaaatataacaacttctccaccaatattctattcccaaccaatcacaaccctccaccattcacctttcccaactacctccaccgcctgcttggttggagggagtttttaggagggattgggagtttagagggatgaggctattaactgttttatttggttgggggatatgggaattttggtgggatggggatgggaaattgagaaatgaactccctcctttttaatacctgggtaggggcaggtaattgggaggcaattcctcatttacttcgcctaaacaaatctcagccatccattttcattaatgacctaatctccaactaaactccctatcaattttcaccacctctaccaaataagatactgggatgaaaaatcaaattcccatcttaatctcaccatcaaatccctcgtgtaaactcccaatccccttccttgaagttgccaaacaagccgccactactcaaccaatcacaaccctccatcattcacttctatctacgttcttaataaccgtgtctaactctaaaaatacttatattctgggacagaggtagtataaatttctccaaactcattccaccttcgtcccttcccatgtaccataatataaggctattgtttttcaatgtttttttcgatgatcttttaattaccatgtatcataacgatgcttatgagctcttttctgctaatccaaattattggtcaccttaactagtatttgtctgaaaatgagtagttcacctcctaaattgcttccatatacctgcatttttttacctgttcagaaatggaatagctcacctctgcgtcaattttattggtagcatgatgcttgtagtgcttctctgtgcttgttacgatattcaaaaatagtgttccttcttgtccccgtgatattcaacatacatatggtattctatcttactataaagttatcccccactaactctttaaacttaacatgcaaagatgccacatcatcatccattaacaagatgtcacatcatcatccactaataatcatcacatttaaacatcatgcaaacatgctatatctttatagtttttataatttaagagcttttcaaatataaacatgttaaattatcatccaacataattcatataatgtttcaatgtatatctttattatgttttatgatatcctatatataagtacttatatagttcatcctcacttagttagttcttaaatgattaatctagggtccaaattatctttctcctttttttctctaattaagtcatatcacatcaattgtttttagcctttagatattaatctatggtccaaactatctctctacttttcttcttccataaagtcataccaccttactctttacgtttgaatcaccattctacatactatttaaatttaaattatcataaaccacattaatttacttaatctgatgttatctagctattttacgtgttattttttttattgttatcatactaaattcctgcagcaatgcacggggtttcacctagtattttcagaagcagtaccttggacaccctttaccaggcattaatcaagaacagtcattagctatcctctttatgtctcggtaactcactcagcagctatcctagtcattccagtcattcctagtctctgtcagagcttgcctggtgtcagccagagatatctgtggtactgaacatgtgcaattcttgggttttctttatggcaactaaggacgaaacttttcaacgctttcgtggtttgtttcttcgatcggatcttgaatttcctggttctttgaaaagaattcgaagtgataatggtggtgaatttaaaaatgcttcttttaaacaattttgcaatgaaagaggtcttgaacatgaattttcttctcctcgtgttcctcaacaaaacggtgttgttgaaaggaaaaaccgtgttttggttgagatagctagaacgatgttggatgaatataaaactcctagaaaattttgggctgaggctattaacactgcatgttatatttcaaatcgagttttcttgcgatctaaacttggaaaaacttcttatgaacttcgatttggtcatcaacccaaagtttaacatttgcgtgtttttggttgcaaatgctttgtcttgaaatctggaaatttggataagtttgaggcacgttctaccgacggatttgttcttggttaccccgcacatactcgtggctatcgtgtacttattttggatactaacaaaatcgttgagacttgcgaagtttcttttgatgaggctagtccaggcactagacccgatattgcaggtacactgtcacaggttcagggggaggatggtcgtatttttgaagacgagagcgacgacgacaacgacgacggcgacgaggttggctcggccggtcagaccgggcgccaggccggtcagaccgccggcacacctccggtcagactggcgcaggacgtgcggtcagaccggccagggtcgtcggctgagggttctgttgatgctgatcgagatggtcctccggagattactacttcgaccagtactggtacagaacgtggatcaacttcagaagtcactgctcctttgcacattcaacgacgacatccaccagaacaaatcattggtaatataggtgagcggactacaaggtctaaggtaacgactcatgatgtttatgcaaattccgcatttgttgcttcttttgaacccaaagatgtttcacatgcattaactgatgaatcgtggattaatgccatgcatgaagaacttgaaaattttgagagaaacaaagtttggactttagttgaaccaccttctggacataatattattggaaccaagtgggttttcaaaaataaacaaaatgaggatggtttgattgtgagaaataaagctagacttgttgctcaaggttttactcaggtggagggtttggattttgatgaaacttttgctcctattgctagaattgaggcaattagacttttgttggctcttgctgcttcaaaaggttttaaattgtatcaaatggatgttaaaagtgcttttctaaattgttttatacaggaggaagtttatgccaaagaaccaccaggttttaaaaatcctgattttcccaaccatgtttttaaattgtctaaagctttgtatggtttgaaacaagctcctagggcatggtatgataggcttaagaactttttgcttgcgaaaggttttataatgggaaaggttgacaaaacgctttttgttcttaagcatggtgataatcaactgttcgtttagatttatgtggatgatatcatctttggttgttcaactcacgctttagttgtagattttgctgagactatgtgtggggaatttgagatgagcatgatggatgagttatcgtactttttgggattgcaaattaagcaaacacctcaaggtacttttgtgcatcaaatgaagtatacgaaggatcttttgagacggtttaagatggagaattgcaagccaatttcaacaccaattggttctacagctgtgttggatccagatgaagatggtgaagctgttgatcaaaaggaatatagaagtatgattggatctttgttgtatctaactgcttctaggccaaacatacaatttgctgtgtgtttgtgcgcacgctttcaagcttctcctcgtgcttcacattgtcaagcggtcaaccgaataatgagtatttgaatcatacacttgagtttggaatttggtattctacttcatcttctatatgcttaagtggatattccgatgctgattttggtggttgtagaattgataggaaaagtactagtggaacatgttattttcttggtacatcattgattgcatggtcttctaggaaacaatctagtgttgctcaatcaactgctgaatttgaatgtgttgctgctgctagttgttgttcacagattctttggcttttatctactttgaaatattatggtcttacttttgagaaagtacctctctttttttataacacaagtgctactaacattgctaagaatcctgttcaacactcacgcacaaagcacattgatattcgctttcactttttgagagatcatgttgagaagggatatgttgaattgcagtttttggacacaaagttgcaacttgctgatattttcactaagcctttggattctaatcgctttgcttttcttcgtggtgaattgggcatagttcatccttttggcatggtttgagggggagtttgtacctcatggttttatcaagcgataatatgacaatgagaaaaattgagaaaatagagctttgtttatgcaaatggtattttcttgtgcatgctagcaatactttgaaggtttatttgtctctagcatagcttgtatgtattctagtcttttcatgagatttagattttgcttttaagggagatgatgcatgacacttaaattctatacttgaattaagaaaatatgcaatgttgatgctagcatatggtttgatttataaatgctctatatatatatgctttgttgaattgttattcctcaaatagctttaattgctcattgtgaaaagagaataaaaaaatatgaaaaaaatgaataccgaatccttggaaacagtcttgacgacaatgatgtattcgatgtgagcaaaataatggatgccgaatccctggaaacagtcttgatgacagggacgtacccggaataaaaaaaagagaaaaatatgagcaaaaaggctcaagaaaagaaaaggttcaaaaattctctttgtttttttgtgctaaaacgttatttgagaaagagtgataaatgcaataggtatatgtgtttagtgtttattcttcaacctatgtacttgttaagatgttgcattataaatcatataaaatcatgaattttgattgttgattcaagcttaattgtaaaatctttggttcatggttatactttaatgcatgcttgttatgttatagatgggttcatctcctttttattgcaacacatgacttgatatgcaatatgtatgctaagctcttatacattaatgaacataattcttatgcttgatgaaatcattgtcaaaagggggagaagagatgagttttggaggaagcaagatggatttttggagttgttgagaagagcatgttgtttttggttcaattgggaatttctttcttttaaaaagggggcgaagttttcttttggatttttgagcacgatgtgtacatttgtacgaagtgtgctttttatcacttttgtttatatttttccaaacatcaaaacattttaaaagggtttgccaatgtgttcatcaagggggagattgtaaaatcaaaggtgtttttgattattattttgtgatgaacaattgggcattggagattattggttttattgtttggaatttatttacgaagtggttttggagatgattggatttacaggtgaatcacaggtactgttatttcatgcgaccggtcagaccgggcagtgtgtgccggtcagaccggcgtgtatcgcgcggtcagaccggcgcagcccgtggtctgaccggccgacgctgtgtcagtttcggtttcgggttgtttatttggatatccgtgattatttcatgattatggcatctagatggatactatacgtatgtaatactgttgtttactactaatgaatcaagttggagatagcttggtctcggaatatggtttctttgattatttcatgtgtaggtgactcgatgtctcgggtgagtatttgcggtgatggaccgggagtcggcttggggataagacgacgtccgtggtggtcagagatcatgcgggatactaaggctagagttgatgcacgtggttgatggagattccataagacatatgatggagttattgtgtgcgtatgggatgcggagttgaatttggaaggagtccaaatttggtacgattgattatgtaaagtttctttcttgtactagagggtttcctaaggtgtttaggactcctagtatgagtttggttcgtggctttaggctgcctacctcgggtataaatagagggggagcgtgaggcttcccggtatcgcttttgagagcaattgagttgagttttgagttagggtttcgagtttagtcgaaatttttgtaaggagtgctgttggtgcactttgtaacacagagagaagtaataaagtcgtcatccactttaagagttcttcgatttgtgttttactgggtttcggtggtctaaccgacgacacaccggcggtcagactagcggcatcgcggcggtcagaccggcggcggcgacaggtgcggcagggattctagggcggtccaaccggaatatctataccggtcagaccggcagctacgctttggtcagaccggctaatctactacggtcagaccgatctccgtcgaagtcgacagtaacttttatttccgctaaaagtttttggtttttgggtataccaaccattcacccctcctctagttggtttagttcttgctattcgatccttcaaggcatgccacagaacactatgatcaatggcttcacacaagaagcttcacaaaatgcttatgctgcatcatggcgaatgacaggatcgcagcaacatccatcggcagcttccaccgcgacaggtttaggtgttcagccgatacagcagcccaacatttcattcaaacaggagcaacaagagttacttggccacaagccaaatgtacaagagtgtcagttaattggtcaacatgatgcttctgtgaacacactgtagagaattatgagacgcctcacgacacaacgtgggagggcgattgtatttatatatccaatacaatagagattacaacaaactcttaaataagagttatatacggatacaatcgatacaaatctaatctaactctaatacccgcccgcagtcaaagtgggaggaacatcacgaacgcaaagactggacctaaactcagtgaataactgaactggcaagcctttggtcatgatatctgcgaactgatgtgaggacggaacgtgtaaaacatgaacttgtcctaaagcaactttctctcgaacaaaatgaatatcaatctcaatatgcttcgtctgacgatgatgaacaggattagcggtcatgtagacggcgctaacattatcacaataaacggtagtggccgaagcaagtggaatatgtagttcaagaagaagttgtcgaagccagcaacattcggcaacagcatgtgctactgcacggtactcagcttcagcactagatcgagagacagtggtctgtcgcttggaggaccatgagaccaagttttcaccgaggaaaacacaataccctgatgtggaacgacgagaatcaggacaacccgcctagtcagcatcagaataagctatcaaagagtcaactggtgcagttccgatgtgaagaccaatgtgtagagtacccttgatgtaacgcaaaatccgtttaactagagcaagatgaggctcacgggaatcatgcataaacaagcatacctgctgaactgcataagctatctcaggccgtgtgagagtaaggtactgaagagccccagctagactcctgtactccgtaggatctgaaacgggagctccatctatagcagaaagtttacatcgagcatcaaccggtgttgcagtaggatgacactccgacataccagctcgccgcaataagtcaacagcatattgccgctgagaaagaaataaaccgtctgcagatcgagtgacagaaattcccaaaaagaagtgtaagtcaccaagatcagtcatagcaaactccgagtgtaggcgagcagtaatatgctgaagaagtgaagtggacgaggcagtcagcaggatgtcatcaacatacaaaagtaaatatgcaatattatctccatctttataaatgaagagagaagtgtcagatgctgaagatgtgaaacccaactgacaaatatatgttgcaaaccgttggtaccaagcacgaggagcctgcttcaaaccatagagcgatttttggagcaaacatacagcagtaggcgcagaaggatcaacaaaaccagatggttgctgacaatacactgtctcctctagattgccatggagaaatgcgttcttgacatcaagctgatggataggccaagaccgagaggcagcaatactgagaacaacacgaatagtagcaggtttaacaactggactaaaagtctcatcatagtcaatcccatgctgttgagaatagtcacgaacaacccatcgtgccttgtgtcgagcaagagtcccatcggaatgaaacttatgtcgaaagatccattttccggatacaacattagctccaggaggtcgaggaaccaaacgccaagtgttgttatcaacaagagccttgtactcatcagccatagctgcacgccagttagggtcagccaaagcactacgataattggaaggaactggcgaaacagaagtctgcatagcagtataattgaagcgatggacaggacgaagattgccggtctgagagcgagttaccatagcatgacgctgttgatcctgtgtatgttgtgcagctcgaaaagctctggtggtgcgtataggaccatgaaccgccacaggctgaatacgacgcacatacgtatggcgatatggagagatcagcggccgagcagaaggaacactatgcaaggcaggcggctgagcaatagaagaattcgatatagtttgcactggtgatgaagaagacatgctcccccccgtagtactagcatcggcaccagaggatgcactggaaggcgccaatatagctggttctagagcttgcgatgattgtagccttctattatggagaagaagccgatacatatcagggccggccaagtcatccggcggctcgacctcaggagagggagcgaccggtagagaaagcggatgctcgacgtccaaggaggacggagctaccgctttagaaacaccctatagaagaaaatcaaaagaagaagcagtttcgggaatagctgcaaacgggaatgtctgttcataaaaaaccacatgacgagagatgaaaacacgacgggtagaaatgtccaaacaacgatagcccttgtgagaagccgggtaaccaagaaaaacacaggcagcggattgaggagagagtttatgaggagtcgtggcactaagattaggataacagaggcaaccaaaaacccgaagattagaataatcaggaactttgtgatgcaggatttgaaacggaatagagttgtggacggaagttgagggtcttcgattgagtaagtatgtggctgtggctagagcttcggcccagtaagaaggaggcatggatgcttgtatgagtagggtgcgaatggaattgttgattgtgcgaagcatgcgttcagctttgccgttttgaggagaagtgtaaggacaggataagcgaagcaaggttccacggctagcgagaaacgaggtagtggcttggttaacaaattcggtaccattatccgcctggaaacacttaatggaagagccgaactgggtcgtaacataagcaacaaactcaacaatatgctggtgaacatcagacttatggcgaagaggaaaagtccaacagaagtgactaaaatcatccagcaccactaaataatacttaaagccagaagtactcaagacaggagaggtccacacatcacagtgaacaagctcaaaaggagaagatgtactagactgagaccgagaaaaaggtagacgcgtgtgtttctctaactgacacgcatgacagaaactatgatctatcttagtacatggaagaatagctaatttgtggagactctaaatagcagctgaactgggatgaccaagacgacgatgccacagggtagaggattgggccaggaagctgtgggcagcaatagtaggtgcagcagtaggtagagtgtagaggtcaccacgactattgcagcgaagaatcatgcgccgggtacggaggcccttaacagaaaaaccaaactcatcaaactcaatggaacagttattgtcacgagtgaattgacgaacggaaagtagattgcgaaccaaagagggggcgacaaggatgtttttaagatcaaatttagtggttcctataggtagaaaagaagtgccacgacaaataacaggaatagtatgagcattgccaacggtaatgaaggtatgggaattgggaagacgagtaacgagaataccgtcggtagaggacatgtgtgaagtggcttctgtgtcaagcacccaaggacttggactttgcacggacaactgattgagggcagcaatcagacctgcctgatcccaattgggctgagattgctgtattggtggcaagcccggcattggtggagagacatatgggcctgcaaatgtcgtgtgtgcttgaggatatgggcccaggaggccggcactgttgctgggacgccagggagactgctgctgctgcacagcccatggattgaaacagacccatgggccggtaggtcgtggcccagcctggtgctgctgctgctacaaattgttcccgaagttg

SEQ ID NO: 4469 - DNA, 9784 bp, Oryza sativa
gaagacgagtaacgagaataccgtcggtagaggacatgtgtgaagtggcttctgtgtcaagcacccaaggacttggactttgcacggacaactgattgagggcagcaatcagacctgcctgatcccaattgggctgagattgctgtattggtggcaagcccggcattggtggagagacatatgggcctgcaaatgtcgtgtgtgcttgaggatatgggcccaggaggccggcactgttgctgggacgccagggagactgctgctgctgcacagcccatggattgaaacagacccatgggccggtaggtcgtggcccagcctggtgctgctgctgctggaaattgttcccgaagttgccatagccgccgccgttgctgttgttctgtcgtccgccattgccgccaccactgctgttgttctggccaccattgtagcgtcgctggttgcggcgaccaccgttgttggagccaccgccacgagactatgatgaagaagaggacgcacaggtgccggaagtgcaggcattggcagaggagacagccaccaccatggttgtctcagcctggaccttgtgtgcattggcaactcgcagctctttgagcaacaaggtgttgcgcgccgaggtgaaggagggcagaacaggggcgctggtgatgttgtcggcggtgctcgaaaaacgagagttgaggccactcagcaagttgaggacaagctgagattcggtgacggggtggccgacgtcgcggagggcatcggcagcagtcttcaccttctgacaataaatggcaatgggcatgtcaccttgcgtcattgagtggaactcgtgactgagatagatggcgcggggttccttgtttgcttgaaagagatcgtcgatggcgagccataggtcgcgggcggtctggtcgggttccataacgacgtcgaggatagcatcggaaacggagccgaacagccagccccgaacacaacaatcggcttgtgcacaagtcgagtcgtcgggacgagggggtgcagtgccatcaatgtgaggaaggagcccaaacatgcaacacatagaagtgaagaaggtcttccacttgttgaaattggggtgcttgagctccagggtaattggtatgtgagtcttgacgttgacggtggcatacgggttgacgaagatcgagccggtagaatccccggtgctggcagcagaagatggagtagagccggatgatgtagatgccattgttcccgaggttgtggaagaggaggtggactcggtagacatggcagagaggcagaataatcacgacgcggcgaagatagaaggcggcgcagcatgagcagagcagggcagggcgcggcgtggcgcgatgggggcagagcgcggaggcagggcgcggcgcggaacgagcgagggcgcggcgcggtgcgtcgtggcgcggtggggacgcggaaggcgcggtggggctggggcgcggcgagatcgtgaggggaaatcgctggggcgcggcgcggtggtggggacgcggaagtcgcgtgggcagtggaagagaagcgaacgcggaaaaagcgaaggccagaggaagcggcgaattagggtagaaggaaaccggtatctgataccatgtagagaattatgagacgcctcacgacccaacgtgggagggcgattgtatttatatatccaatacaatagagattacaacaaactcttaaataagattccatggttcagtcaaatggttccatgtccctgcatcagtcacaacaattggactcccagggttatcttattatgacaactctacagcagcagcttcttgaaactgtgccaattgtttctgacattccacggatgcatatgcgaaaacaagtaaagatggaggaggttcagcacccactgcatgatcaccagcaatggatgggtttgatgcaacctcagtctcagcacaaccagcaacatcaatcacagcggcatattatggcagcgttccagtctcagtcgaatcaactgcagcaagaattggggatggaacagaagccttcagtgcaacaaagctttcaaacttcagccgggatgttcttgcaacaaaataacattgatgaacaaatgcaatatactcaggcacagtgcggccttcaagaagttccattcagtagtaagttgatctgtgcctacgtttcatcaaacgtgctttcgaatttcgatccgtgtaaagtcgcagtaattttgtaaaggctactctgcataacttttgcaatctgacctttagttcattgttgtggttttagtttttcgatagcaggcacaaaaaagtccacatgctaccggcatccattctatgttgtactagcctgctattgatgccttcttttttttcatcaaagtatcttgtttcaggttttgacaatctttttctttttatgcagcaactatgcacattactactcaaactgatcatccaggtcaatgttatttgcaagatgagatatatgacatggtaaggtatgttataatcccttaagcactctgaagctttcaattcacatggatctagattgttgatagaagaactagagaatgttaagtattcttttttcaaaaaaaaaaaacttcctgtttcccctcatttacttttcccttcctttccttttgatctgtttgccacctaactctacgctttttgtttaattttgcatgtaaagttggaactgaaaatttgtacaaatttatgtgtgtttctctttatttatccacagattaagagcttgaaggaccaatactttactgaactcactgatttatgcaatgagatgagatgtttcaaaagctacagagacacatgccacctcagattccaatagatcattatgaagagatgaaaaaatttaaattattcttggagcgcgcattgcatttcctggaaattaaaaaggagaacattcagcctactatttgggaaaaaaatcccagaatacgagaggcaaattatcaatgccataagttcacaaagaaggcagcctgtgcgcaaacaagaacaacagtttcaccaatcatctacgcaaattactaactcgaacattccacagcaaccgcaggcctctccaggtgtgcagtaaattttttgcaatctttcctttggtcacttctctctgtaattttttccagttataagcatgagcagatttcactcgccgatgccatcccttttcatgccgtttgtagcttgctacttcctctggattgataatacttgtcattttggataatggtgaggtcaaagtttaaaatctttgactatgaataatttctaaaatatgattacttttaaaaaatatttcaattgttgatatttttatatatgacgacaagtactatcgaccccgaagggagtatttgataacatcgccactaatgtatctttttgtgtgctgacaaccttgacatttatgtgccatctacgtactccactactcaaacaacacattcaggttcaggtgattggcaagagtagttgtatcaaatggtaaggcatgctaaaatcactttggctctcccaagcttctaattcatcatgacttctctagagttcataataaacaagctccaaaataaagaagctgagatcatcctgatctagattaaaagaaaacgaaacaagacataaacttgagctttcttttcctcgaatatgaaggagcgtacacaatatctaaaatatcaaatatactaacactaaacactcgcaccacaaacttaataaacagcctaagcatggtgaaaactaaggcaacaactatttggcacgattttgagttttagaatagttttactcgttttccaatccccattgtccctcggttcctttttccttcctttttcttttttggtcgtttctccaccaactcctgtgttttcttgttatagaaacaaataaagttgtatcgaatttttggtacattgatgcactactagtatgacatgtagatgtgctgtactctagcagtatttaagatatagatggggaatctctatgtgcggggactggagcacatggtataaaatttcttttgcagcattttccttgatcattaaactaattaaattgaacgaatataccatgattcatttaacaaatgtcgatttatttttgaatcctatgtatgtactacctctgtcctaaaatacagcaacctaaggaccggatgtgacatatcctagtactatgagtcacatccgatcctaggttgctatattttgtgacggatggggtaattgctaatgagaaatcttatcactgtcatatttctcaacttaacgataacgaaaatactgctgctcgggcgaccggcgcaggggggggggggatcgggcgatttaaacaacgcccgatttaaacgattgaaacattttcgatctacttagtgaaacaatttcaatatacttggtggaacatcgtgcaacatttaaaaataattcaataataagctaaaaaaaattttcgtcgaaatatatccatgtgttgtcttgttttaaagatttaattacaacgaatttaatggtgcaatcgaatcatgatttggataaataatttaagagaaaacgtagtttaaagtggttttgccgacatacgtcatgctgacgtcaacgctcgatttttccccctccctatcgggcgcccgattctaagtcgttccctaaggatacataattcatcgattattttccttttctgtgttcatgtccatataagcttcgaataaatttgttgatgttatgttttatgcactggcaggtgaggaacttgaaggaccagcactttacagaactctatcatctgtacaataagatatctaggaagcaagaatatgtggatagccaaatgccatctcaaatgcctatagaacagtatggaaagatgaagaaatttaaagaaatgttggagcgcatactgcggttcctgcaaatttacaagggcgacattctgcctgctctcgcagaaaaaatccctaaatacaagaggcagattatcacactagtggagaaaccatctttcgtcggtcgggctattttcacaatagtcccggttgcaataaaaaccgggactaaagatctttagtcctggttaaaaagggtaacaggcatatttgatctttagtcccggttggtctttagtcccggttcaaatactgtcagggcttatcagcccccccccgggataccaaccgggactaaagatcccgtcgatctttagccccggttggtaacaccaaccgggactaaagtcccacccctttatatatgtcttcttcctcctccagcccgagcaagcttcaaaatttcttcaaaaaagagaggaggtcatgccaaaatttctagtgaatttactttggtgattatatacaaatcggaggtgcctaaaaggttagcaacttcatcctccaatgtttttttggtcatattacatctggagctatgttttgcacacttttttgtctccaaaattttgttgtaagttgatgagagagaaaatttgtgtgggaaaagaaagaatatatagaaattttgtttatttgataaagaaggttttataaaatagttgagtaggaaaatatagtgaaagttaatcttaaataaaagaaaacaaactaaattgaaaattaaaagaatttaaaacttcaaaaaaataaataagaattatttggtggactattttataatttttgtatgaataatgatatgtcattattgtatgactattgaaagagtttgtgattattttatcattattgtatgactgtcattattgtacgaatgattatttgtgtatgattttttttcatttcatgtagatgaatcggcaatggatgtacgttgaccggcggtccaaagagtttattgacggcgtgcattattttttgagagtggccgaagctaacaagcataagggttttatttgttgtccatgcaataagtgtaagaatcagaaggagtattctgcaataagggtattcatttccacttgtttgagtcggggttcatgctaagctataattgttggacatcccacagagagcaaggggttgaaatggaagaagatgaagtggaagaggacaatattccagactttgctcagtacgctggatttgaaggaaatcaaacaggcgaggaggacagagatgctgattataacgacgttgcggaagatcttggtcagatgttgcaggattccaaggaggactacgaaagtgaaaagggggcctataaattggacaagatgttagaggaccatagaacgtcgttgtacccaggttgcgagcaggggcacaaaaagttggataccactctggagttcttgcaatggaaggcaaaaaatggtgttagtgacaaggcatttggcgatttattgaaactcgtcaagaacattcttccggaggaaaacaaattgcccgagacaacgtacgaggctaagaagatagtctgccctctaggactggaagttcagaagattcacgcatgtccgaatgattgtatcctatatcgcggtgaggagtacgagaacctagaagcatgccctatttgtaaagcactacgatacaacattagacgatatgatccaggtgaggttgacgggcagctaacgaagaagagaattcctgctaaggtgatgtggtatttccctataataacacggctaaggcgtttgttcaggaataaggggaatgctagaatgatgcgttggcacgctgaagaacgtcaacaggacgggatgctgagacaccccgccgatggttcgcagtggcgaaacatcgacagaaaatttaaagactttggaaaggacgcacgaaccatacggtttggtttaagtacggatggcatgaatccttttggagagatgagcagcggccatagcgcttggcccgttacgatgtgtatctacaacctcctcccttggctatgcatgaagaggaagtacataatgatgccgattattattcaaggccccaagcaacctggtaacgacatcaatgtgttcctacgaccactggtcgaagatcttaaactgttgtggaagaaggaaggtgtccccgtgtgggacgaggacaaacaggaggagtttaacctacgagcgctgctgttcataaccatcaacgattggcctgcacttagcaacctatccggacagtccaacaaggggtacaaggcttgcactcactgtatggatgaaacagaaagtacgtatcttaagcactgtaggaaggttgtgtacatgggttatcgtcgatttcttgctgcaaaccacccaatacggaagaaaggcaagcactttgaacataaggcggaccaccgtacaaagcctaaacatcgcagcgggaaaacaatgtttgctatggtgaaagatcttaaagtagtgtttggaaaggggcctggcagccagcctatagagagcgaagatggtcacgcgacgatgtggaaaaaaactccatattttgggagttaccctattgggaattcttggacgtccgccacgcaatcgacgtgatgcacctcactaagaacctttgcgtaaaccttcttggcttcctaggtgtatatggaaagtcgaaagatacactggaagcacgtaatgatctgaagcatatggaacaacgcggcgaccttcacccggaaccaaagaagaaaggcagccattacttgagtctagccagctacactcttagcaaggcagagaagaaaattatgtttcaatgcttggagagcatcaacataccatctggatactccacgaatataaagcgaataataagcacgaaggagaaaaagttcacaaacctaaagtctcataactgtcacgtgttgatgacacaactgctaccagttataataaggggtatcctcccagacaatgtccaggcaacaataacaaagctatgttctttcttgaatgcaatttcgcagaaggtcatcgatccggataggttagaagccctttagaatgatgtggtgcaatgtcttgtcagctttgagttgatattttcaccttcattttttaatataatgacgcatctgctttgtcaccttgtcaaagagatcggtattctgggcctgtgttcctacacaacatgtttcctttcgagaggtacatgggcgttctgaagaagtatgttcgtaaccgtgctcgtccagaggcaagcatcgcgaaggggtatggaacagaggaggtcattgaattcagcatagaatttattgaatatcttcacccaatcagggtacctgaatcacgccatgaagggagactacggggaaaggggactctcggaaggaaagcaataatgacggtagacaacaatttatttcgtaaagcccatttcacggttctgcaacaatcttcattggtggctccttacatcgaggagcacttggctctagttcacgccagaaacatcggtaagtccgatgcatggattacacggcatcacattgatactttccccgcgtggctgcgacaacatctcatgggtaacgagacgattaaccaacaactggccttcctggcgagggatccatctggttcgattgcgacattccagggatatgatatcaatgggtacacattctacacaagagcccaagacatgaagagcacgaactagaacagtgttgttcgtatcgatgccatgggacacgatggtaccactggtacgtattacggtgccatcgaggagatatgggaacttgactatggacctctcaaggtccctctgttccggtgccaatgggttaggttgactggtggaggcgtaatgattgatgacagtgggatgacaacggttgaccttaacaaggttggatactcagacgaaccttttgtccttgccaatgatgtaacgcaagttttttacgtgaaggacatgtctagcaaaggaaagaagggcaaagggcctgacgagccgaagcgccacgtggttctcccaggcaaaagaaaaatcgtcggagtagatgacaagactgacgaggattacgatcagtttgatgggcaatcccctttcacggtgacgattgactctagtatcctcctatcaaatgaagacaccccttacacatgtagcgatcacaaggaaggaacaatagtgaggagaaagtacatgcggacaaccgtcaccgccgatgtattgccgtaattgttttgtacacgatgtaaactattttggatgtattgaatatgctagttatatatgattattaacaaatttaaatcatgcatatgctaggtatatatgattattagaatttttaaaagttttaaatcatgcatgtggtatttacatatgttaattagaatttttaacaatataatatcatgcatatgctaattatatatgattattagaatttttaaaagttttaaatcatgcatgtgggatttacatatgttaattagaatttttaataatttaatatcatgcatatgctaattatatatgattattagaatttttattaattttaaatcatgcatgtggtatttacatatgtttattagaatttttaacaatttaatatcatgcatatgctaattatatatgattattagaatttttaacaattttaaatcattcacgtgcttattatatattatccacttaatttactatagacaacgataatttttcgaaggttttgtcattaatttttcgactttaaataattttaatgcattatttactattttagaaacacatatgcaacgaaattcaatattcagtgctattatctttagtcccggttcttaaccct

SEQ ID NO: 4470 - DNA, 21552 bp, Oryza sativa
  unsure (1)..(21552): unsure at all n locations
gtttactttatttacttaccatttactttgattttctaactttattcaaattaatccaaaaacttgcgctattaattggataaatgtcttgactccctcctttcacttgtctttagatgccgcgctacaagcctgagtacttgtttggtgttgagggttttgtccaggagttgcgtacgatgtcctttgtcattggatttgggactgcccctttttatgcccagattcctcatgatcgtcatgaagagaagtgccgagtcaaagtcaccttgaacagtaatagtgaagatatcccctcagtgatgttcgaagctggaggaagaaactgcatccatgcatgtcaggaggtggcaaggattgccataggagagctccgcgatcgctacagtgatcagttggccgacactgagtatcgctatcatcctcgtcaaccccagggaagtgaccgtggcaactatcttgagactgaaggaattgagaatgatgctaccacaaggcatttggttgagatgctgtgggctatggatgaaagtcgtgcggagactgtgttagcggctcaagatcatgaagatcggaatcgtggtaagatttgcaagttagaggacaaggtggatcgtttggaaaaggagttagctgcgttgaagggagaagcaccgctgcagaaggccaggattcgtctcaccgcaaggaagagagctctatttgtccctcgctatcaattggcgccaaaggtccgtgtggtggagaaagaagttgccccaaccctagcagatcctccggtcatcatcataagtgaggatgaagaagaagaatccaagcgcaaccattccaaggttgagtgggtagcaactcaagatgatgaagacgagccgaatgagccttcaatcgacctccgatgctcggaagaactagagtgacttgttaagtcgttgtcttagatcgttgtgttagtttgcttgctttaagtttgcttgtgtgtgtctcgcatgtgatttacatcagtggtgggaggtaagtgcatgcgtttgtttgcttttgagtgttaggaagttggtgagtttagtggtgtgagagttttcagtttgtaataatgaaactcagttaagatcaataaaagttcaagtaattctctgtcctaagtagtttcccccggtttctcttcttgtgccctgtccatgccagatggtgaacactcgcagcaacgggaatggcccaagtaaccataacaatgaaggaaacccaacccttgctcaagttcttgctcaacagactcagcttatgaacatgatgatgcaacaacttcagaatcagcagaaccagggaaataaccatgcacctccccagaacaagttagcagaatttcttcatgtgaggccgcctattttctctagtaccactaatcctgttgaagctggtgattggctgcatgccatagagaagaagttggatttgcttcagtgcactgatcaggagaaggtctcatttgcatcacatcagttgcatggccctgcctctgaatggtgggatcacttccgtttgaataggactaccgctgaacctatcacttggcttgagttcaccgctgcttttcggaagacgcatatatcatcgggagtggtgtctctcaagaagaaggaattcaggtcgctcacccagggatctcgctctgttacggagtacctgcacgagttcaatcgtctggctcgttatgctccggaagatgtgcgcaatgttgaagagcgccaagagaagttcttggaaggacttaatgaggagctttcttacccactcatgactggagattattctgatttccagaagttggtggataaggctattcgtcaggaagacaagtacaatcgcatggagcagaagaaacgtcggattgctcaattcaagacacaacaggggaataatcagaagccgcgtcttactttaggaccccagtccatgccacatggaggttcttcgtctgttgttcgtccgcagcgtcagttcttcaacaacaatgctggcaacaacatccgtaatcaagctccacgtccagttgcagctccagcacagcaacaacctgccaagagggagcaaggcagcaagcccgtggtgtgtttcaactgtggagatccaggacattacgctgacaagtgtccgaagccccgacgcgtgaaggttgtccctgctcagagcaacnnnnnnnnnnnnnnnnnnnnnnnnnnnnnnnnnnatgttgctgctgcagaagctcaagatgctccagatgtgattttgggtacgttccttgttaacttagttcctgcaacagtgcttttcgattcaggtgctacacattcattcttatctatgagttttgcgggaaatcatgggatggaagtagaagatcttagacgtcctttgatggttagtactccaagtaatcaagcactctctttgcaacgtagcccctctgtcagaatagaaattcaaggggtaccatttctggccaatcttatcctgttagaatccaaagaccttgatgtcatcctagggatggactggttagccagacataaaggtgtgatagactgtgccaacagaaaagtaactctcaccagcaatgatggtcgagttgtaactgttcatgcattgtcttctgcgtctttaaggtcaagactgaaccaaataactttggaagagattcctatagtccgggagtatcccgatgtgttcccagatgatttacctggtatgccgcctaaaagggatatagaattcagaatagatttggcaccaggaacaactccgatccataagagaccttatcgaatggcagccaatgagttggcagaagttaagaggcaagtagatgatttgcttcagaaaggatacatcagaccgagttcatcaccatggggagctccggttatttttgtggaaaagaaagaccatacccagaggatgtgtgtggactatcgtgcactaaatgatgtgactatcaaaaataagtatccgctacccagaattgatgatttgtttgatcagcttaaaggtgctactgttttctccaagatagatcttcgatcaggatatcaccagttgaggatcaaagaggaagatatacctaagacagtttttaccactaggtatgggttgttcgaatgtactgttatgtcttttggacttaccaatgcccctgctttcttcatgaacttgatgaataaggtgtttatggaatacctagacaagttcgtggtggtctttattgatgatattcttatctactcccgaaccaaagaggagcatgaagaacatcttcgccttgcattagagaagctacgagaacatcaactgtatgctaagtttagcaagtgtgaattttggttgtctgaagtgaagttccttggtcacgtcatctcagccggaggagttgccgttgatcctagtaatgtggaatccgtaaccaactggaagcaaccgaagacagttttagagatccgcagtttcttaggcctcgcaggttattatcggaggtttatagagaatttttccaagattgctaagcccatgacacgactgcttcagaaagatgtgaagtacaagtggtcggaagaatgtgagcagagttttcaagagttgaagaatcgcttgatatcagctcctattttgattttacctgaaccaaagaagggtttccaagtgtattgcgatgcatccaaacttgggttaggttgtgtactgatgcaagatgggaagatggttgcctatgcatctcgtcagttacgtccgcatgagaagaactaccctactcatgatcttgaattagctgcagtagttcatgcgttgaaaatttggcgtcattatcttttcggtactcgtacagaggtgtacaccgatcacaagagtttaaagtatatctttactcagccggatctaaacatgagacaacggagatggttggaattaattaaggattatgacatgggaattcattatcacccaggaaaggctaatgttgtagcagacgctcttagcagaaaaggctattgcaatgctacggaaggacgacagttgccattggaattatgcaaggaatttgaaagattaaatttgggaattgtcagtagaggttttgttgcagccttagaagcgaagcccactctaattgatcaagttagagaagcccaaattaatgatcctgatattcaagaaatcaagaagaatatgagaagaggaaaagctattggtttcttggaggatgagcacggaactgtatggttgggtgagagaatctgtgtccccgacaacaaagatttaaaagatgcaattctgaaagaagctcatgacaccttatattccattcaccctggtagtaccaagatgtaccaggatctcaaggaaagattttggtgggcaagtatgaagcgtgaaatcgcagaatacgtagcagtatgtgatgtttgtcagcgagtcaaggtagaacatcagaaacctgccggtttgttgcgattcctgaatggaaatgggaagaaatcggtttggattttatcactggtttacccagaacgtcatcaggccatgattctatttgggtgatagtcgacagacttaccaaagtggctcattttattccggtaaaaacaacctattccggaagtcgcttagcggaattgtatatggcaaggattgtgtgtttgcacggtgtccctaagaaaatagtgtctgatcaaggcagtcaatttacctcaaatttttggaagaagcttcaggaagagatgggttctaagctgaactttagtactgcttatcatccgcagacagacggacaaaccgaaagggtgaataagattttggaagacatgttgagagcttgtgctttagatttcggtggaagttgggataagaatctaccttatgcagaattttcgtacaacaacagttgtcaagctagtcttcaaatggctccttacgaagcactgtatggtcgaaagtgccgtactccgcttttgtgggatcaaacaggagaacatcaggttttcgggacggatatcctaagggaagcagaagaaaaggtgaaaatcattcaagaaagattgcgtgtggcccagtcgcgtcataagagttatgccgacaatcgcctagagatttgagttttgaagaaggagattatgtgtatcttcgtgtcacgccgtttcgaggagttcatcgttttcataccaaaggaaaattggcaccgcgttttgtgggaccttataagattgtcagtagaagaggagaggttgcttatcagttggagttacctcaatctttggcaggagtccataatgtgttccatgtgtcgcaattgaagaagtgtttaagggtacctaccgaagaagctaatcttgaacagatagaggtccaagaggatctgacctatgttgagaaaccaatccgtatcttggaaatagatgagagaagaaccagaaatcgagttatccgtttttgcaaagtccagtggagtaatcactcggaagaagagtcaacttgggaacgagaagatgaattgaagtcagctcatccgcatctgttcgccagttcttccgaatctcgaggacgagattttgtttaaggggggtaggtttgtcacaccctgacaatcctaaatatataaattgttgtttaattggaatttttagaattgattttaaaagcctagaagtgaagatctaattttaattaataaattccaatataaaatgggaccagataaaatttcattaaatactttgcttaattctataattcctagatttttctgggatttatttgagctaaggaagtatttttaataaatggaattgcatttaagaaataatttaaattgaaaaaggttttaaaaagtctcttttggctttgggccgaaagtcggcccaaaaccgctctctctctcctcggcccaagttggcccagtccgccgccgcgcgcgcgcgcgtccgcccgctgacaggtggggcccacctgtcaggcccgtcgtctacctccggccgccgccgcccgaaaccctagtttcgcgccgccgccgttcccttccaaatccggccgttcctttccttctccggccgaatcaaaagaggggaaatgatctccgggatctcctctaccttttctcttttggaatcatcggccaaatcggcttggaaagtgtttgattcgaggtcgaatcggatcggcttttctctctccgagcccgacctttccttctcgtcgccggtcgtcgtgggccttcgccgccgcctccgagcccctttaaaagcttccccggtgtctcctctacccgccgccaccctcgccttcgcctttcgtcgccggaagagccctagcgccgtgtgccctagcgccgccgtcgccgccgtcgctccagccgtgcgccgccgccgttccaaacgtcgccgtcgctcgggaagaccgccgtcgtggtcgccaagtcaccgccgtcctcgtccgccccttcgccgtcgccgaagatcaccggagcaccgtcgccgccgtcgacccgatctccgccgccgtttcaatctcgtcgccgtcgccgtccgttcctcttccgccgtcgctttggtcaccggtgagttcgccgcgtcgcgctctacccgatggtgccttccgttcgcgccgccgtgccgtcgttcgccggcgagcatgcaagcccgagccgcccgagccgccgccgccggtgatgacgtcaccgctgacgtcatcgtcgccctctcccgtgagccggtcgtggaccgatcgatctcggccgtccgttttggatggattgatctcggccgtccgttcgcgtgaaccgccgccgtgcgcccggtccaccgaaaccctagcccgctgacgcaataatccttcttttccttttcaaaaataattcattattgcgtcataattcaattaaaatcaatataagtgttttaatccgatttaatcttcaaaaattcataactaattcatcttagctccgatttagttggttcaagtctctaaatttttctaaaattgagatctacatgttaaaaatatccacatatactgttcatgcttgtttatgtgctgttttggtgtttttgcttcttttcgtttagattccgtcgtttccggagagtccgttttcgccggagaagagtttgaagagttccaaggccagcaaggcaagtcacacagatcccaaacaaccctttgagcatgttgatcctatttaaagctattgtttcttttcaactattgcatttattttcgaatgtcattgggtggaattaacctattgtttgttatagcccttttgttcttgattactttattccttgataccttgggttattataatttgactagttgagctttatgtatattggttcaactagatattagatataattgcttagccctgcttagaaacattagctcactattgggattacttatgactcactattatttaatgatggcttaatgatagttcacgatggtcaatcgtgattagttaattaattaatgtgccaactaaaacctgataatggtgggttgtgagcacatggttttgagagtcgtgctcatgacaattaaggaccggttcacgagtttcagttgtgaaacattaaccgtgccagccacaagccagcgtgggcaacgactttatcttttgtatagcatggttcattgcggggcaccagactgagaagtggcggagataagcccacgggggtcgctggggagtccatgccttgtttttaagggggtgattatgatccaggaaggtgcactgcagtggattgtgttatgcaaggggtattgtcacaactcctttccgagataccgtggtggtattgaggcacatggtgacatgatgtggggttgtgtcttgtgggtacagtggtacacctctgatcagagtaaaactattcgaatagccatgcccgcggttatgggcgggtcgaacaatgtctttcgtgattagtctcacacttctcaccatagtaaatgatgctataattggtaataatttgattagctcctggtttggaatggtacattcctggtttggagatagaactgtgcagccgggatggttgttcagaatggttgggcctatacaacagggtatgttgtatagcgttggattaatattgtttaattacttaactgtttttttaaattctaaaatatttgctaaatgctgcttttgcaaatgaaaccctactatgccatcctttggtatccttgtgcacttgcatatttgctgcgtggcttgctgagtatgtcatatactcaccttgcaatcattcatcagaggaagagttctacagtgaagctgatggtgtggaggattaggtgtagccttggtcaagctgcctgtggagtggagccgtctgcgccgtttatcttattttccgctgcttagatctttattgattgagaggaactatctacctctgtaatgacattttatacgcttattaattagagtaataattgtactctattatcaatttgttattgtgtgcctcggctgattcctggacgagggttcacacacatgtaagcgtttggaattttggatagaaattccgggcgtgacagatacggactagcatacagcaaggctgaaccgtagatgggtgagactttgcatcgaggagacatcacagagtttaaatactgtgcaaaagtttatgagtcagacttgatgtcgaaacaagatttcggcaatactaaaaggggtggctatcaagctgaaaaagtagattggttcagagacaaggaattttatacaggttcaggccttcttaaccaagaagtaataccctactcctgtccggggattgatccgccgagtgtattattgatcgtatgatctgggagaaaaatcgtgtccctaaaggcacccggaccccttcccatcttaaccaagaagtaataccctactcctgtccggggattgatccgccgagtgtattattgatcgtatgatctgggagaaaaatcgtgtccctaaaggcacccggacccctccttatataggggaaggggttcgtattacaaagtacagaccatatccctaacggaataggtaattacagataaaatacaatcgtaaccgactaggatcctgggtgtttccttgacatacaagtttggtacttaacccgagtcctcttaaagatattctatccatacatggcaccccatacccagtcggactatacatgccgtgtaggtatagggtatccataatctccacagtagcccctgagacctttatagtcgacgaaacagccttctctcggaacgtaaagtgataatccgagtgcttcaatttctttcgtactgatctcccgagtaccaaaatcaaagactgtgaagggctgaaagtaaataattaggtgcatcgactagatgcacctaattaggtgtagcctccgactatgtgagtagctaaaagctaaacatattgtcaaagtacatcaaaacgtccattcgagtggtttttaaccaaatatcccaaggccaagcatatgcagcatctgataaacctcccgccgactgctttaatgtgccaaagaaatataaagaaaaacccgagtgagaagcactccaaaggtttataaatcaacacaggtgataaaagtccaagtaaaaactttcaaaagacctatcaaatgtggcataaaatttgataaaagacgagtcaaaatagcctaggctatgactcatcccataatcaaaatatgcatataacatgccgagtggatgactgtattaaaaccagtcatctcaagaaaacccaaacaacctttgcagcctaaaaaggcctacaaaattagcatcaatctcccattcattcccagctgcagttcagaccaaaatacataatccagttcacatccatggcggaagagagagaaagctttgagagccagtgggcgccctccgatgttatggaggagaacctgaaggagatggtggcgcacggcgttattccggcgaaagaaatcatcgggtggcgtccagcattcggcgaagcatttccaacccccgacacacatgaggtcgtagtattctctcatttcttctatggcgggttttcccttccgacctcaagcttcttccgaggaattttggatttctatgggatcagtttgcaccacctaaaccccaattccatagtccacatcaccaattttatccacgcttgcgaagctttcctagggattaggccatatttcgctctattccgtcgcatcttcttcctcaagccccagccaaacaaaagcaaaccatgtgtagttgggggagccggatttcaactgagggggaccttgagccaaaaatacttctccatgccattcaagacctcgaacaaaggttggcacgcaaactggttctatgtgcaaaaccctgagccagcacttctcggatactcctgtcttcccccaatatatcgcgacacctggaactcaatgcctatgggagaagaggccgcccaagcactcaacttgttggatcgcatgctaaagctaaaagaacagggtctgtagggggcgcaaatcacccggcatttcatcaagagccgactggcaccaatcaaagaaagatccagaacagcctttgagtttgatagagcatgacctgaatcgtgaagatccagactctcttgattttaaggttatgaaggagagaatgtacaaaatcttctcgaatgccatcgtggtcagctattcacacttactgccagttgtgccatacaatgccttcaacccccctccaccggtaagcgttatacaactcagcttttctcaatgcatgcttttatcttctgtaaagttgactgaaaacttggaataccatgcccaggagtttgctttgatgaagtccgatactccaattgctcaacgccgctcacctcgccggcacacctgccaagccagtggagggccgaagattcagtcggatgtccaacccaacgcttcaagaacaactaaccagccagattctcgtaagagggaatcggtgctgaccgacgatgagggccatgacgccaaaaaacccagcaaccaaaaggaaggagccgagagacagccaaagcaagctaacttaaggaagaaaacatccagtcgtccaacactaaaaataaggaagtcagccaggtatgtgtcatatcacagttgccgtcatccatcattcttcattgtagcagagctgagaacatatatcgaatttgcagaaagccatctgacatagatccttctggaaaagaacccacgctgactggctcggagactggtccttcagcggaaactgggcagctgccgaagactgcccagataataatcaaccggcgaccggcaatgtagataccagcaatgagcccctgactggaaaccagtcggcggaagctgaagccggcgctgatgaggaacctccgactagaaaccagtcgggtgcagaacataatgaagatattcctaaagtagaagctcaagctgacagccctcctaaaaaggatgcaagcgtcgatccagggaccagctctcctgttaaagtacaagggcccgctcatccccgaccggaaataatcataggtaaacacatcctccgaactcatcttgatctgacagacttttttcaattgtttcacttttattcataaatgcctaaggcccaatgatcggcgatgaagaagaagtcctccggatacagtcagctgagaattctcgcccacccattttagtcaagtggtggaatcacgacatgcaacctcaaggaatcgtgataaacaagcaaaaagaagatgaggaagtatgcttgctgaaaaaggcactcagccaggctacttgcatcgtgaatgtaagtctccttattcacagcttcaactatcctgtttcccactttgctcaaatgccgacaaattcgcattgcagagaatccatctcaggaacgaggcgaagaccgcgactcttgagaagttagttcctcatcttggaacccttgaagccaccagaaaccagctgcacgaggcaaaggagcttgccaggaaaactgagtatgatctgagggatcggatcgccgagcttcaagaatccagctttgaactgagcggttcgtcaaaaggtaaatacaatctctgtctaacttacttatgctgccatccttgtaatttcaattaacaagaagcaatacagtgcaagccgccaagatatctgaactagaaaagcagatccaaactctggagaacgacaaggctgaattggcgagacagaggaactcggctctgaaagatgttgaaggtactggtgactaatacctcttatctttatgaccactcgttgatataaatctatttatgcagatcgcaaaatcaagtctcaggctcaattcgatatcttggtcaataaaatcaaaaggcttgaaggggctagggatgaagtcgccaacactgctaccccactcgtccaagccatgttcttcaataataatggtccgagtacatttgatgcctccgaaatcttcgacaagctgaggatcgctccggacacatactttaagaatatcaaggacgctggaaatatgggagcaagcctggcgttggcaatgtccaagcctttatacccgaagattgacattgacgccattgatggatttgcagacgggacgagcgaagaagccgcccttgacctcatcaacgatgcgcagaaagcagccgataagatagccgttgatgtagttgagagattccaggacaacgacctccggccgactggatctaataattccgatgatgagaaaactgatactgattgatgttatattgtaacaataactctgatggtgatgatgatggaggcacaatttgtacaatactgatgaatttatgctgtgcttgatatttcaaacttagctcctgatttcttaaaagtttttgtcaaacctttttgagcctaaaagccgcaaaagttattaaaaaactttcagtcctcattgactaagccagaaaataaaacaaggcaatgataaatcaagtaagcaaattgaattgataaaaatcacactccattattattatagtagcccctgactgataactcaaggaaaagtttgatgttagcagtcaaagaggaagatacaaaagtaatgcctaagcataaaaacgacgaagatgttcaatattccaagagttgtcgatagtaataccgtcttcacgtttgagtcggtaagaacctggccgagtgacttcaaaaattatgaattgtccttcccacaagggagataacttgtgccgatcccatgtagtttgaatttttctcagaaccaggtcgccgactaaaaaggctcgtgatcgaacgttgcgattatgataacgacgcaacccttgcaagtaccgagccgactgaattaaggctgcttcgcgagcttcttccagtcggttaagatcatctactcggttgtctccgtagcgctccttgttgaagttacgaaaacgtaaagattcaaattccacctcactgggcaacattgcttctgctccatagactaggaaaaacggcgactggcccgtagcccgactgggagtagtgcgcaaggaccaaagtacagacggtagctgctctacccacttgccggcatagggattcagtcggtcgaaaactcgtgcttttattccttgaagtaccataccattggcatgttcgacctgtccattgctcacggggtgcgctacggaggcataacaaattttaatgccgaagtccccacaaaaactttaaatactccgcctgtgaattgagtgccgttatcagtgatgatccgattgggtacgccgaaccggtgtacaatgttgatgaagaaatctctagccttgtatgtcgtgatcgtaatgaccggtttagcttcaatttacttggaaaatttgtcaacagccacaaagaggtgagtataaccaccgactgcctttttgaacgggccgaccatgtcaagcccccaaaccgcaaacggccaagacaacaggatggtttgcaactcctgagctggtagatgagtttgtcgggtgaaaaattgacaaccctcacatgttcgcacaattttgtcggcgtcggacacagctgtgggctagaaaaaaccctgtcgataagccttgccaacgatggttcgtgcagcagcgtgattaccatagatgcctgaatgtatatcttttagcaattgccttccctcctccatagacacacagcgttgcaggattcccgatggacttttcttgtacaactcggtctcatgaataacagagtttgctgcgcctggaaatccgctcggcttcatctttatcttgagggagttctagtttggtcaaaaatcttatgaggggctctctccagtcggcttcaatcatgcttacgtcttgggtgtccgtggcttcaattgtttctttccttggcacggttggttcgtaaagatgttcaacgaacacgtcggaaggagctgcttctcgttttgaacaaaaattagccagtctgtcggctgcctcattattgtgtcgaaggacatgggtgagttcaaatccatcgaatttgtcttccaacttgcgtacctcctgccgataagcagtcatgttatcatcaaggcaggaccactctttcatgacttgattaacaaccaactgagaatctccacgaacgatcagacgccgaatgcctaaggagatcgcaatccttaatccgtgaagcagcgcctcatattctgccacgttatgggatgcagaaaaatgtatccgcaatacgtagctcaatctttctccagtcggggagagtaaaacaaccccggctccagtgcctgaaagcctcttcgacccgtcaaaatgcatggtccaatactccatcttttcctcgggcatgtcttcttggcactcagtccactcggcgacaaagtcagctaaagcttgggacttgatcgaagttcgcggcttgaaggatatatccaaggacatcaattctaaggcccactttgcgattcgtccatttgcttcgtgattatgaagtatgtccccgagtggaaacgatatgaccaccgtgaccgagtgaccttggaagtagtgagatagtttcctgacggtaattaaaacaccatataatagattttgaacctgaggatatcttgtcttggaatcagccaaaacctcgctaacgaagtagattggtcattggactttttgaacatggccttcttcttcacgctcaacaaccaggactgtgcttacaacctgggaagtcgccgacacgtataacaatagcggctcttgcggatgtggtgaagctaggactggtagagtagtgagaagttttttgaagtcttcaaaggctttctgtgctttgggtccctactggaaattgtctgttttcttcaacagcctgaagaagggcatccctgctcgccgagtcgcgaaacaaaccggctgagcgccgccatgcaaccagtctgcttttggacatctttctgggagctcggcggtttcatgttgaggatggcgttgactttctccgggttggcctgtatgcctctatgggacaccataaatccaagcagcttccctgacggtactccgaagatgcacttttcagggtttagtttcatcctgaaggtgaggatgcttgcaaagatctcttttagatccgtaatcaaatcatccttctgcttggtcttgacaactacatcatccacataagcttcaacattgcggccgatctgagttgaaaacatctctggatcatgcgttgataagttgctcctgcgttcttcaatccaaagggcatggtgatgtagcagtaggccccgaagggcgtaatgaatgcagtcttcaagcagtcggattcttttagtcggatctgatgatatcctgagtagcaatccaaaaaactgagtagctcgcagccggctgttgagtcaactacctggtcaatgcgaggtaacccaaagggatctttgggacaagatttgtttaggtcgatgtaatcaacacacatgcgccattgtcccgtcttcttccgaactaggactgggttagccagccagtcgagatggaggacttccttgataaagcctgctgctaacagcttggtcaattcctccttgatcgcatccttcctatcctgtgcaaagcggcagagtcgttgcttgcttggtttagcgtcttccttaacatgtaaagagtgctcaatcacctctctaggaataccaggcatatcagatggtttccacgtaaaaatatctttattattttgaagaaaggtgatgagcgtgttttcctattcacaatctaactcagcacctattacagcagtcttagtaggatcagagggatctagaggaattttcttggtcttggcgtcgctttctccgctctttggcatcttggttgcaggcacttctccttcgcttgctgtggacgtggccagtcggacttcttctcgggcgagggtgatctcgtgggtctgggccatctcgcagctttccttgtcgcatgtgacggcttgtttgatgtcgctccgcagggatatgactcctcgaggaccaggcatcttcatcatcatgtaggtatagtgcgggacagccataaacttggctaacgccgggcgtccgagtatagcatgatatggtgtctcgaaatcagcaacttcgaagcaaacgttttctatgcggaaattctcccgagtgccgaaagtgaccggaagagtgatctggccgagtggtgtagcagatagccttgggatgactctgtgaaagggcgtattactcggttttaattccgtgcgagggatctgcatgtcgtcaagagtcttggcgaaaaggatgttgagtgcactgccaccatcgatgagggatctgcgaagcttgacgttacgaaccattgggtctagtaccagggggtaccgccccgggtggaccactcggtcaggatgatccgagcggtcaaacttgattgttgtctctgaccaccaaagatattggggcatatcgggctggacagcattgatctcccgttcagtcagcttttgctttctcttggatattcataagccaggggtccgccaaagatgtggttgagttccttgcgatggtcttgaaaaccagtcgagtcatcatcttcgtcatccttcttctttgacgtgcattgatctccgtcagtgttcttgcgtgcgttcttggcgtattgttctgcaaactatttgtagacgaagcaatctttggccgcgtgactggaatttggatgatgcggacattgggagttcatgatcttgtcaaaagtgttgacgcgggaacgtttgtcgggaggatagtgtagtagttgccacaagttcctcgggcttacgcttgcgatccttgtgattggtacttccactccccctgtagtcggcgtatctttctttggcttccaagtggtgcccgactgcttggacgcggtaatagcatcttcggctttggcatactcattggctttttcgaatatctgcttgaccatcctgggaggcttgcgcccgaacttgccgactaggtcttcgtggcaaatgcccttggtgaaggcggcgatgatgacgtcgtcggtgatgtcggagattttgttgcgttgctcagaaaagcgtcggatgtaatctcggagggattctccgggcttcttgataacgttgtagagttcaaactgggtgccaagacgttcaaaggtgccttgaaagttggtgatgaagtgttcgcgtagttccgcccatgatccgattgtgccacggggtacctgtgaagccaggaccaggcagaatccgctagggccacgggcagatagtttaccatggccttgctgtttcctcctactgtgcggatggcgagatcgtagacggtgagccaagactcagggttagtgctgccatcatatttctcgattccagtcggcttgaagccagccggccaatccactcgacgcaggtcacttgtgaaggcagctactccgtccacgtcatcgtcgtagcggtctggtgaatggtggggagcatagcctcttgccgcgcggcgctggttgatagtatcgcaaagatcgacggggcgcctgcgatgtggggagcgaggtcgttcaactcgacgctccctgtgtcgttcgggaggcgaatggacagatcgctcaccgtgacccctgctcctgcgactggatcccgcgtcggcgatgctgaggcttggttggtgatagtcttgagatcgaagagggggaactcggctgccagtcggcgtgcgggtgcttgcggagttagccgggaccgaggcggcgatcatggtcttcgtttggttcaagattttgatgacgtgctgattgagcgcgtcttccttgaggaggctgtcgaggagggtgatcgctgcaaccgcgttctgttggggagggtgcgaaaaacagtcgtcccgtcgacgtcttgttgcccaatgaggtctcgtgctcgtcgcccagattccaaggcgcgctgtcgtcgatcctcaacctcctttgcagcccgttcgcgatcttgttgttcacgctgcagtcgttctcactcttgtcgttgttgttcttccttcagtcggcgacgttcagcttcttttcgtgtgcgctcttcttccgcttctcgggcttggcgctgttttgccgtctcattgtcggccatgaatacgccgaaaaagagaggcgtgtagtcgtcctcatagctgtcgtcgaagtcgttgaagttaccataatcgtagcgatagccgaagtcatcgtactcaaggatctccgttggtcgagaactgacgtcgggagaactgaggtagccatccaattcttccgtcgagaccgtcccgagaggttggagtataacgccgacctctctagagctagattagattggagccgaagccggatcccgtctaggtcttcgggtgggagacgccttggtcgtgaagacagcagccagatcatcgggaagtctcatcaggattgggggataggacccgtcatcttgatctggtcgtgttggagtagattggatctcgtccgagtggtttgaagccaactcggtagagatgatcttggggtagacctccggccgagttcgggataccgaacggagcggagatctggcctcttcccgactggttcgaatccgagtcgaggagagaaatcttgccgaagtcgaggctgccaaaccggaacgcctgcctgggagggaatacgaagtcgtcgatgccggagacggaaccgatcgcactagtcggcgaagaacttgatgctacccctacctggtgcgccaactatcgaaacaagatttcggcaatactaaaaggggatggctatcaagctggaaaagtggatgggttcagagacaaggaattttatacaggttcaggccttcttaaccaagaagtaataccctactcctgtctggggattgatccgccgagtgtattattgatcgtatgatctgggagaaaaatcgtgtccctaaaggcacccgaacccctccttatataggggaagaggtccgtattacaaagtacagaccatatccctaacggaataggtaattacagataaaatacaatcgtaaccgactaggatcctgggtgtttccttgacatacaagtttggtacttaacccgagtcctcttaaagatattctatccatacatggcaccccatacccagtcggactatacatgccgtgtaggtatggggtatgcataatctccacacttgagttgggtgctgtttggagagggagtttgtaacagactcttcatcgtagtacacgatccgaggtgatgagggagaagtcggctgcatatatattcaattcggactttggacgtcgaaggatcaaaggaaacgagacagcgcacgaccgcaagggcactcaacgttggcatgcaggctaaaatcatagtgttggtcatcgagacagaaggcttggttgaagcgtgcaagagaggtgcgtgtaaatcggttaagtcgggccagcagggtgatcagatcgacggaccagttagactgcagagtttggacggttagaccgggttcaacggacgtgtggttcgttacaggaacttgttaacagatccaaaagaaggacaagaaggttctacagatggatagtttgcaagtgtgaaggacgagtagactggtggcgacaggctggtcaggtcgcatataaaaatatctggcggaaacaagatatatctaggattcgacgaggagttgagatatatggagttaagccagaactgaagaaaagtcccgggcaacagcgggtcaaatatcgttgatggggtcgacaatactgtttggcagtacaggatatatccaggatatgcaggtcggcatgatggggatatatggaaatctgcgtcactgaagaggaagagcgaaggctatcgtggtaattcttcaagtgattcaaggaaacggtaaattttctcaatttatcatggagctcagtctacggatgcggaaaagcgtggatgttggatttattagctcggttcataagtcgacaaggaagaaagggttctcttcaagtctggtgagtttgatttatttatttggtgatgacgtgggttatctggccatggattagatcgaatcaaatcaaagacggaagatggagttgaacatggtcttcgaggagtttatgatgtgacagctaaggaagaatccaatttcacttggcaagacgactgagatgataggtgagaaggtggagcactgttgcaggtggagtctaagaggaagaaattacagggatagcagagtatcttgaaggcggcgggtctggcgcagactcgcccggcagcttgcggtaaagctgcaaagaagataacccaagtctggaggacaggtggatcgacatggtgattctactacttctaggtggtgtatattcgccaaggtggagtttgttagaataggtgtcgaatatactagtcctatttggttacggttggacttagagttgtaataggtgttagggggtggagttagagtcgaactctgtaacccggcaactctcttaaatagagaggggggcaccacaatgtaaccatggtgactacaatgtagcgtagacacgcagggagaggatggtagcgaggccatggactcgtagcggctaggagctatattggttggggaggagcgcccataatcagagcctcgaggatataggcttcggctgaacctcgttaacaaatatcgtgtattcctgtgtcgtcatctggcatgtcttgggtgatcaatgactgaagcgatcgagaaggttagtcgtcgtttcgctatatcgactaacttttataacatatacgaaagggactctgcagtgcgtgccaccactccttgtgacgtgtgccatcccccacgtcgaagtttaggcacgcacactagtacactacttctacagactcgctagatcactggaacacgacgcccacatcgcgcgcaggcgagtgtgcacgacagactcgacaaaagagaataaacggtgtgcgagaaaagaaatgaaacgctacagatag

SEQ ID NO: 4471 - DNA, 19292 bp, Oryza sativa
tcatgatgcgcgtttgatcagttttatatttctatggaatatcgtcttgttatatttgtggtatttaaaaaaattatgtaagttggttacccatatctaaaatcctcgatattccactagacttcattccattttccctatgatttaggatgtgttcgttccacctcgttgggaacatatctcttgcgcacgtaaaacggaaacggagcagtacattagcacgtgattaatttagcattagtttttttttgaaaactagatcagtatgatttgttaaagcaactttcgtatagaattttttttgcaaaaacacaccgtttagctgtttgaaaagcgtgcgcgcgaaaaacgagggagatgagttgagaaagttttggaaagaactcagcttagtctcatttcagttagtagttctttagtttgtaagcccagctcaacagaaagtaattagaatgtttagtctttcagggactagttgatttagaatttttcagccaatcgtagttggttattttgcacgcagattaagggagactataagcccagaaaagctgatgaagtttgcagcgcaaaacctctgccccagctcttcttgttctgctttcatctttcgtcaggtactgtagctgttcgacaacattcacaacagagctatggtagaaagagtgagttcaggatttaggtggtgtttggatccagggacttaactttagtccctatatttagacactaatttaaagtattaaatatagactacttacaaaactaattatataaatgaaaactaattcgcgagacaaattttttaatcctagttaatccataattagagaatgtttactgtagcatcacatagactaataataaattaattaggctcaatagattcgtcttgcgaattagtctaagattatagatgggttttattaatagtctacgtttaatatttataattagtgcccaaacatccgatgagataggaatttaaaaagttttagtcccctctaaacagggtctaaagtctgaagggcgatttcggacacactacacaactgtaccagtacaaacatatatatatatatatatatatatatatatatatatatatatatatatatatatatatatatatatatatatatatatacacacacacaccaacgtggatctatgcatcatatgcatttagggtacttgctctaataagctccatacatgacaaaaaatagcaatagtgcgactggatggactccagatgcacaatatatcttaatagaaactctttgcatttagcataatagatgtcactgagtgacatctattatgctagtgacatctattatgctaaatgcaaagagtttctattaagatagagagactccagatgctcaagagcaagcaaggtaagatcaagctcgaggacgtggccggtttggttggtgcagaagtgcagatgacgcttttccaccggcagcagcagtctgattgcctggctgtaggttgccatcaagcgaagaagttacaagtgtcattgacgacggcttgcagagaagcaggccagggttgccatgagcagcaagaacttggcagctgtgctatggctgcgttatttggctctgtttaggggagctttagattctgagaagcagctatttggtagccagcttttaaaaatctggaaaaactctgaaacccagtttctccagcttctggtttcttagtttatttttcagaatctgtaactacagattctcagaagctgtggactgtttggggcagcttctagcagaagcagcttttgagaaaagctgcagctgggagaagctctcccaaacagggcatttgctggagttcctaactcctcaccctcgttttccgcgcgcacgctttttaaactactaaacggtatgttttttttaaaaaaaaatacgaaagttgcttaaaaaatgatgttgatctatttttttaaaaaatagctaatagtacttaatcaataacatgttaatgcgaacattgttttacgtgccgggaggaggaacacgacctatctatggtggtagtgagctagactaagatatccatactgttctttttttttctttcgtaggagggtaaaagctttgcctcatatatatctattattatatactaaaagtccataaaactttatacaaacactctcaagccgtcacgtggtacctctacaatcgcttctagaccgccacgtggcaatatctaatctcaccgttgattttcatttaaatcggtggacccgataatttagaccattatattagattagttgtattttgacaccctaataaatcagaaaaaatccttaaaaactaaactcccttcgcccaaccctcctggctgtccccacacgtgcctacgtacgtagcaggtacgtttgcctccatgtgcacaatccagttcctcccccattctctatttttttttctaattagatcaatatcataatttctattctattctttctactattattattattattattatataaaagtctattaaacttcctgcaaacgctcttataccgccacgtggcgctctaaaaacactctcaagctgccacatagcactgcaataaaatagataaaatcttagaaattctgagaaaaaaaacctaaccctcgatttttatttaagttggtagaccattagtttacaccgttagaatagatccattataaataaatagtaatctatcccttctaacttaccatgtaatacttacctaaaaaatattggcagaaataagccaagaaggcatacgtgcgtacagagttaaccactacaaacgagaaaagaagaaatgatatacagcataaaagaaaaaaaaacatactgcatatatacgtactacgtactactggaaaaaaaacattgtttttcaaactggattttcacttgctctgtattttttatgacggcgttaaatatttagttaaactaccgaaagaaaacaatgatttaaattagattttctattatactttctttggattttttttaattttagtgaaggtggtagtataagaaaaatatattacttcataaaacatgcacaccccaaaatagatctataatataatataaaatatcaaatgaacgtatcatctatactagcgtaaaaaaaggaggagttttgccttccaatcctacaggtgaaatcaaatccaacgacccgtgatcaccttacaatccaatggctcagatcactccccaacgtcccacgcggccacgcaacgtcccttgcgaactctagcgtcttcctctcaagcgccgccgcagtcgtgttgcctcctgatcatccgccgccagatcgccgtctttgctgtcctcttaggtgcagccgctgcgcacacccacggtgcgcacctcccttccccggttccccagcccagtgctgcccccctcccttcaccgtgcaaaaccctaagcgccgccactacaagcaggtacctttgccgccaggagatcgccctcatgtcacctcgctgccgtctcaccagatcatcgacgcaccgcctcgccataccggtccggcgtcgactctgcacacgcttcaggtctaccacgacaactctttcaaggtagtcccagcatattgaaggtagtaccattatgaactttctcatgccatggctaactatcggcctatcattgtagcattatatatatctatatatgttggtgttcacttacaatttcatgcctctttgataatcttggtaatattctggtcatatctccacctgcgcaaaatttccaaatcctgatggtcaattggttaccatgcactatatatgaatcgatatggaatgatgcatgctttattgttgcagttaatttcaacagagtaaaacggaaggagtgatggattctctacgccttgcaaagttgcaagtgcaatatgaaatgctggggatacgacatttcagattcatgcttcaagtgatcaccatatgctgataagctgagagtatgctcaaatgatcagccagaccttctcttagaggtaattcaatcatggatactttctatttttctctgcaagttcacttgcaatatattagtaagcaaattatatatattgcaaagtataggagccattgtcatttttgttatatatggcttccatcaccccattgattactggccaagacatggtatatgttttttccatgtagattgagagggaaaatacattgtgactcatgatgtttttaaggtccaaattaacatttcaaattatactgtggcttctgaccctgtagatcaaaattattgcagttgcattatgccattagatgatttcagaaattcctgaacattgcataattcactcaattgacttaacgttgcctctgctttagcttgtccatgccatgctttgtttggatagctccaaagatatatttgctattgatcagaatcaaaataaaactcacaaagtttagagcttgtatgatatatgggagtcctttgtttatatctctcgaatgttcactctgatataatcatgcaaattggagggtatgtgtgtaagcgccagttcgattattgtatttacccaaaaataatgattgctgtatacttgcatattaggttgtgcaatgcatactctttcagatgttgtactgcaactgcacaaatcttgatctttttttgtccctgtattttcaccaggtttcacttgatgaggaaatgagtttatagatgtgtagagaatctgaaaaagatatttgggaagagatggtaggtgcatttaaaacaatggcaaggagccaaggaggtaatttctgtcgtgcgttatgaattagaattagcgatctgtactactgtctacactgcaggcacgttttccatttcttgatgagaatgtgatcaaaacgactttattggaaataccaggttcagaggttgcttaacttgatgaacctattggaaagggtgacaaagatttcagcaggtttttacttgttttgagcttaatccatatgggaactgttacagtaaactgaaattcgcatttgtaattcacatgtaaaccattgtcatgacagtgaaactactggccattttgctggtatagtgatattagggccatacatgaattatagttcagtctttttttataaactttggcgatgaagtttagatctcttcctgttactgtattgaagctacaatcatttcaaaaattttggatctcaattctttttctgatggtagcagtatacatgtcattttgctggtttttttttcttttttttttttttgctttaaggggatcagggcaggacagaaggaacactatgaccatgtccccatggcccatgtccatgtacgcatcaagctcctaagtgataatctgattgcctgctgatcccaggcgccggtggaatcaaccttgacccatcaatgatggtcatcccccattgacgatcacatggtccacagagatcatggtgtcttggacaccatcattatttctgacggtttaagctttgtctccacaattttttatctctgtatttgcttctgatggtttatacttcagagttcggaactgaatgttcatactctagatgatcatgtacttgaaattttgcacatttggtactgaatctgcactaaagtgggtttcttgatttggttaggtacattgtataagctaggttcgcattttgtacaattgattaaagaatatggtttgtctatttgcgtagcttcaaatgaatgatgtttaacgctattctgtctgtaaatctacagagcaatatatttgattgaatttagtttagccttttcgtgcattgcacgtgcattgttactggccatccatggaattaaatgtgttgtagaaactggcaagtgtcaattcagagtgaccatttaggattccatggtgtgcatgctttcttgtggcatactggtcttaggagttcaaatagagttttagtgcatagattaaagtgagataaaagtttatgcctgaatatataatttggtcatcttaattcattttcaggaatgttaatatgtatttatgtttccttttttctcataaaataaaactcaccgcagagaatgtatggagcataaatatgttctttctaacagaagttttgagtacttatttttgtgcagctttcttaaactagctagccctagaatgatcctgtttgttgaatcggctgtaaagatggagggcatctaggtaaaagatgaaaaatttatcaaatgcatcgtctactctgattgtatattcgtaaactattgtcctttctagggagtaatttgggtaaattcagctgagggaataggaaaattctccatttccttcaaattattatgttttacggcaatgagaaaataagatcaattgttattctcctgtaagaaattaatttgttcttctgtaagaaaagaatgctccgatagttattctctttactacttactatatcacttctagctgacaatcatttaaatttagatcacaaatgtttgtttacggaagtagcagcagcgcaatgtatgaattttagttggcaatttcgtaccttttgcgaatattttttttacctttgttggtcagaaaattgtaattgaacacaagattttatagatttcactgaccaaattgtcatcttaggataacctataaaattttgttctccattcgtaattgtttgttagttatatattgccaacatgtgccttgcacgtgcacgataactagtttcacactacaattgttgagtatagatagattttatttgcatcaatgggcctacattgatagttcaagatgaaataatgagtaattaaaaaaattactcaggacatttgtcataaacacctataaaaaaatgtattgtttaaaaatatatcacatttttttctcgcaaaataaagtcaggattttagccgttaatgactcaatctatgcttttgatttgtacatattttttaagtgtataagtaataaatgtaaggttgatttctaaagtacttattggattggtctccgaaccattaaactgttggtgttttacaaatactttctatacatatatatatatatatatatatatatatatatatatatatatatatatatatatatatatatatatatgtttgtaatatttaatacttaattaatcttgcgttgatgacctacatcgtttttcatgccttgcctaagttcaaccaattagatcgaatgtagcctaagtaggagatagattagattatttactaaaaaatttaaaattaaagaatcaagttaactacattattaaaagattctgcctaagctcaaccaattagatcgaatgtagcctaagtaggagataaattagattatttactataaaatttaaaattaaagaatcaagttaacttcattattaaaagattcattactttggatcatatatattttacggactagcttttgttcactaattcatacatttttaagaaaaaagcaaataagttttgacgtctttctcgctatttcttagatattaaactaaaatagaaacaatcaataatattggatttttttttaagaaacacgacacgcgcacagcctgctcctttgagtacctctaaaagactgagccaacacattttgagaatgacgatgtcaccacaggcgtctcgctgttgacgggtacgccacctaccattgaaagaatatttagccgtaaatgcgagcacccgtatcaagtctaggacttaaaccaggtagacaagttacaccacaagaaacctaaccaattgatctgtgctcacttcacaataacattggataataaaacaaccataatttttaagctacataactggaatacttttatgccttttaaaccggtgaacaatttgttataactgttagatctatcttatataaaagttaagcatgtatttatggtacatgatatttccaaaatattactacgcaattatatttcgtcattatcatattcatattaggttgcatggagcctctcacccaccctacatgaaatgttcataaatggatcacctctcaaactatatcaatcatattagcttctataaacccatacatttagtggagcttcatgtctcacccaattcatctttaattgaactgttatagatatgtaattaaaaaacaccttactttacttttgttgacatgttttcaaaaaaaaaatatgtttaccttattttcaaatgataaagaagattataaataattgcttatagatattacttaaatatgatataatataaaactaataggttactaacttagcaattaatgctgatgaaaataatttatgtacaaatcatggcagatgttttccgtttaatatttcgctcttatacttatctcaaacttagcataggacgcatgcccgcgcattcgcgcgggctaccttcctagttgatagaacaaacatcgtcctcccatttttgcgtgcgggcatcttaagagcactacgcgcgaaaatactctcccttcttttaccctctcaacacttcaaaaatttcatcctcatatcctccctcaacctctctcacctccttatccttatcctcacctccaactgtctctcctctctcacgtggcagtaggcgggtggctcggcagcgggcgatggcgggaggagtggggccccgccgccgacaacgacgacgaggtgaccgggagcggcgccgttggccccgcgaatccgcgccgcccccgccgacgaggacgaggaggtggccggagcagaggcgaacggcggccatcgagctacagcggcaactagggtttcgattttttcgcaatttttattttcttttatggttttttattttcgcgtgcgggtgacataagcaccagcatgccaaaaaagaagtctgaatacctgatggataatttgcccgcaactataactattttctctcttgcccaggctttcattctttacacatagaacattatcgttgtgtcctactccgaactatgtcatgctcgtgcaacaacgagtcagaccagatgctacagtaaaatcgatctattaattgcgttgatccgctgtgctactcgcatgaacagtgactgatccgtgggttgccatgctgaaagctctatccagcttccaagcagccttgatatttttttcgttctaaaatttagctatttttggagttcaaatttattcaaaatataactattttctttacctgtttggctatttctttatctcaaccaatcacatcgttatttatttaattttttatctactttcttttttaaccgaccatggttttttaccagtcaattccacctatttttcagttcatctgaaaatctctaaaaacaaaatatttatattttgaaacagatgaagtaggatcattgttttgccaaaagcaagccgtatcaaggacacgcacactgtagtgcagcaatggccataaatagatatgccagcaaagcccatataccatcaaaagaaacattcatttgacatttcttagtacaacaatatgcaaatatcctgaacagtctccaaggcttagttctttcctccactttcccaacttctacctcttgattttcacacgcacgcttttaaaactaccaaacggtatgtttttttaaaaaaatattctataagaaaattgctttaaaaaatattaacttatttttcaatttttagctaatacttaactaatcatatccaaatccaccgctttgttttgcgtgttctcattggaccttacaagtgcaattctaaaagagcccaaaactcacaataacaaaggctgcaaccatctgtgcccaccttctgaaggcatatctccttttttttccccgataaatttatttaagagagttcatcttcatggacacaaatacaataacaataacatgtttaagttacactctcttcatatactttccctaaggaattatgattgccagtcttgacaatacaacatcaggttggattgcatacacacactatataagatattccagccatgccatcgcccatcgaccccttcatttatcaccatatgccatgctcatgcacgcctcgtggagtgaagatgacgacagtactctccaagagcccagatagggaataagttgcggtagttggggtaattaaagaagaggcatgcattgaaggctccaacatgttcctaattaagagcaggtacaatagcatgctataaactagttgcaaacatattttaaaaagataaataaggagagagatggacagcgggctacagatttgtagccagctgtagcacggactctaagacacagtgtgtgtatgacagatgggaccatgtattaatagtgtagtatgtaactattgaatgaatgagctattaaattagctatagatgaattggagctggtagttagctacactattaaacttgctctaacatcagcagcacaagcaacacaagagataaacctttaatggtcatataccaacattatctaaagttccaaacacatgtaacgctgaaacatcttagttcagagcaccctaggagtttggtgatttaattaggtacgttctttttcaagtctccagagcaaccacttgaacatgggattgtatgtcctaaaatccttgcacagaaggtaccatatggttgttcatttcctaactacagccaaacaaaataatctcatagaagccctatatttgtctaatgtgaatgtttgccaccctaatgtggctctgctcgctaatggaggttcccaatcggaacagtatgcacggaaaacggagcggtctattagcacgtgattaattaagttttagctattttttttcaaaaaggatcaatatgactttttttaagtaacttttgtagaaaaactttttttacaaaaaaacacaccgtttagcagtttaggaagcgtgcgcgcaaaaaacaaggcaaagagagttgggaatgagcacttacgaacagaggctatgtatggtggcttggggattcttagtttggaatatacgtgttgggctcttaggaggtgtttggatccagggactaaactttagtccctgtcatatctaatatttagccactaatttggtcagataaatggttgcagggtagggccacttcagagttcgcccctagcttgttcaagttgattgctaagaaggttgtaaaacgacatacagtggctcaagcattggatagtcaaacatggatcacatatataaaaggagttcattatgcaggtgattagggactatcttccgatctgggatttattgtgcttggggtaaacttgcaacaacatgatccactggatcagcaccgttggaggtcatcaggatttcgtttatactctagcaaatcagcatatgagattctctttgtcagggactatcagattaatttgctccatagaggaggatttggaaaagttgtcacccctgaagtgcaaacttcgtctgtggttcacggtaaacaatcgccgttggacgggcaatcgcctgtccaagcgaggattgccacacccggctgcctgccctttttgtgatcaagctgaggagattgtgcaacttattttgtcacttgcatttttagccagcgggtgtggtcattggtccttcacagattaggtttcattggcctcacggctcacgccaacccatgacacacgccatttctcaagctggtggtctatgccagtgaaagacacccacaaagaaagaaaaaaagaaagaaagaaagggctaaactcgcttataattttggtggcatgggaaatttgaaaacacaagaatggttgtgttttcaatggttcaattccaaatatgtcaaatgaggcttcaataagtagcatatgaaggcgctctttggtgcttagcaggagcttttaagctctaagaggtgttggctaggtcgatagcccttgcggctttaagtggacttgtttagtgtcttttagttttttaatgtgtgttagtgtttagggtcgggagtttccggactcccctccctgtgtgtaaattcttctttcttattaatgaaatgttgtgtatatcttccgtgtgttaaaaaaaaggtcctgctccagggagccctaatcagagaaaggggatgagagaacaaagaagatgggaaatatctatcagattcccaaaaccaaattgaatccctaactttaaatagctcgattgtacagagctggccaacctcctaacaaacaaaatttatctctaaacacaagtataatgtaaagtttgatcgatgtagccatcccatgtattgaccatagttaatatcagagaagggggatcatgttctgcgcgtacgcgccggcaaaggaggcggcacgcactttggaggccctaatagcgcttagcgctttgctaatggcgcttagcgtagttttttttctggtttttctttttggataaaaatttgccatgcatctgtttcttccctttgtttagttgactaaaacaaacttccaactcatatttattccggatttaaaaactttcaagtctagatttgaactcagattaaaaaattttcaagtcaagatttgaatattttcaacttaaaatttaaaattatcaatcagattttgaaactttcaaaatcatgatttgaaaattttcaagtcagatttgaaaaaattcaggtcaagatttgaaaactttcaactcgaatttaaaaactttcaactaaagattttgaaaactttcaactcagatttaaaaactttcatctcaaattcaaaaatattcaacttaaaatttgaaaactttcatctcaaatcttaaaaactttcaactatttaagtcaagatttgaaaactttcaagtcaaatttaaaactttcatctcagactaaaaaatgtttaactcaaatttgaaaactttcatctcaaaacttaaaaactttcaactcaaatcttaaaaattttcagctcaaattcaaaattttcagaaaaaaataaagatgaaagattcaatttctaaaataaaaaagagaaaaaatcggcacaaaatatttacggcctcccacgacggaaaaaaatagaaaaaggaaaaaaaaagggaagagatggctacgcgatggcgtgggtcttacatgggccaggaatgtgcgccgcttacgctaatagcgcgtacgtgctaattagcaatcgcgtcagagaagctgggtgaattaaaccccattcatgccatatgatacatcgtatatatatctttaaatttttattctgtccttcattccataaaattattgctcagactaaaatgaactcagttctccacgaacgatacaaaacataaccccagaatcccagcaaaacttaaatgcgaacttacttgttgggggaactctcctgtttccaactgcatattgattaattcttttgcagcacgatgcagtggtgctggatcccgctccatctgacatccaaatggttatagagatcattcgataaaaaggtcattcctatcagaattgaattgaaaataaacaaaacacacctgtcctgcacaaattaaagctaacattgcccaggcagtattcactgcatgagcttgatcatctttaatgtttacgtaaacctgtttggtatcataaaaaataaaaatcagtgacgaaatcttccaaatggatttataaaaatttgcaccagtccaacttcttccctcataagatttcttccaaatggaagcaactcttgttgcaaatgaaaaggaataactccaacatgcacaacagatcaaatggatgagcttgtctatgttcaagccccaaactcagcagggtgcttaggctatattcttcctcctcatttcccaactcacctctcttttttcacgcgcacatttttcaaactgctaaacggtgtatctttttgcaatagttttatatacgaaagttactttaaaaaatcatattaatctatttttttaaaaaaatagttaatatttaattaattatacgctaataagccactagggttgtgagtgttcgctccacaataccttccgtaaaggccaggagtactcctttaaaaaactatggtaatcaacccaccgctatgtatcctatatgccaattatcataaaacttgcaacaaaacgagcaatatatgtttattcaaccacaaaaattcaaaaggaatgatctagcgagctagagattaaaaaaaaaaaacctaccttagtaatattagagacataactttctccccacccaccagtatcgagctgctttgataatataaagtcgcatgctttcctgatggaagaactattctcatatgttcttccagcagcaattaacccttttactgaaagaaaggccccataggtgaaacacacaccccaagtgcctagcctgccaaataaccaagttattgtgttacaaattgttaaaatagaagagaaaaattatccaaagacagaaagtcagtatatgtggtgctcttgttacaaaccatgaaccatcttcgccttgtgtgctctcaataaacatcgctgcgtttctgacacatttttctatctctttaatacggtaactagggtgtagttgtttgaacagcaccagagcttgaagcacagaggaggtgcattctggaaatctgccaattcatatggtataaagtgatcagttacgccaggagttatttctacaaagggaaaagggtgttaattattaggattttctaagcacaatgatgcgctcagcacttacggataatcaaccactatgtttggaaaactctcacaaggactgagaacctaggttatataaaaaaaacatgtcaggactacaaatcgcatggccataagaaacatactggtgattgactagttcttcaatataagtgtactgaaacatacaagatgtgctgaataagtttcacaaatttgaagtgcatgaatcatgctggtgttattttaacatcataaattagattgatcgtgtcatgatgtaggcacaggcatggagttttcgtgatgttatttataaagttgttgctggtgttatttataaagcatatcaatcagggcattagtgtgcagaaactcacctctatccaagtataagttcttttacattcatatgtagaaagggtaccatctttgttctgcaaggagaaatgaacacattaaccagatgattttcacatattaaaaccatggcagcgagagagaagggaactatatgcatggcagagttacaatcaccatttttaggatttttgacattttggttacataaagttggcaacaagttgcgtaggttatgagcttggattttttttaaacggaaaacagcacgagaatgccttttcattgaatagagcaggagaaaatacaacccctaagggtaaagcgaaaaaagagagaggtcaccgtaagctatacaaaatgcgggacgaactcgcgcaatcgtttagcccctgctagagcccaaaggctagcctcttctttgattttcgttaggaggaagctcgttgccacctatttgtggtcgaaaatccgccgatttctctctttccaaattttccagacaattagcaggatgagggattgaagtcccttttttgggacattgggcatatttgctaggttctcctaccgctgttggactgactgggcttcctcccattgggccggctccatttgctgatagcccacccatctagcaacgaaatgccaaatcctcttggtgtatctacacgtggcgataagatacaaggccgtctcaacttcacaacggcagagagggcattggccgttgttttgccaacccctgatcgcaagccggttggatgtccagactctattctggatgatgagccaagtatggaatttgcatttccctggtgcccaaactttccaaatcaaggaattgagacttgggctaggcgccccacagcactgcacgcatggtaggccgaggaggccatgtaacgcccgttacttgtgaatttccaagcagtctggtccggttcttcattgtctaagtgcacattctgaaccgcttcccacagggtaactagctagtcaacgaggttgactatgataggtgagtttgcttcgagggtcagatcttgtacccaggcatcatcctccttttcttggcgtagggactttcctttgtttttggaaatcgcgtagaccagcggcatgaggtcttttggtctgcgcccatcgatccatgcagagtcctagaagcgtgtcgtgttctcatcaccgacagttatttttgttgatgcggcgaagagatccctgtcaatttcgttgcaaggcatctccaatcccacccacggttttgtcgggtctttccattcatgccacaatcatcgcagccttaatccccttgtgaatttggtttagaactcccaggctggtaaggtcaattggagcttggatttgggtttcacagctgcactcatactgagttccagaaaaggctattagcatatcacaccccattgtttggtgtgtaagattcttttaacctatcttcgcttagtacaactaataacagtaaacaaaaccataatttttcacataataatgaattggggctagtctgcaaggaaactacaagatcatgtttaatagctgtgcttaaataattccataccacgaaagataggaggcaatcaacagcatcatgcagcctttctatttcaattggatccccgaccacgttgctagagatcttttccagtaacagtacagcctggaaatgagattatgtaagatttcaagagtagacaaaataaaaatttatgcagaactggcaacagatcgtgatcaattttttgtataagcatgagcttcttgggtgtgctatcactgattaagactaggttaatacgatagtacaacctccgtcccaaaatataacaacttttaaccattaggatttgttctaaaatataacaacttctccaccaacattcttttcccaaccaatcacaacactccaccattcacttttcccacctatctccactattcatccaattacaaccctccaccattcacttctacctactttcttaataactgtgtccaactctaaaactttttatattctaggatggagggagtagtacttatttgaccgtttcaaggattaattaattatttgcctcccttgtttcaatggtgcattagtaaaaaaaaaaagaagaagaagaaagaacataatgaccttcagcgcttctgctgtagtgtcagacacagcccatccattgtctgctgacgaaagagtccatgaaccctttgatctatggcgatgccagtaactttggtcaccaggatgattcctcataatcttcaagaaagaacatgcaatttatgttggatcaccttatgcactagttaatttataaatttaaattattaaagtatagactctgaacctgtgaatttttcatgaactcgtgggctctcctaacagttgaaccatactcatttacaagatcagtagcacaaaacgcttgaattataaatgctgtttcccagctctggcaaccatcatatatctatcattcagataaaaatctgtcacagtttttttctgtttcctcattagataaaactaggaagctagcccacgcatctgtgcggacatgtatcaaatactgtgtctgtgtaggaaacatatatataatggcagaatatcaaccggataacacctacagcacttcaaaataattatttctccataaattttcttcatcaacattgctggtataaattgtcaagttgtttgttagctttaaactatccagtatttacttcatacctataagaaattaattataatatttttcattatcttgaaaggaggttgacttagtttgtttaaaacaaatgtctaacaaattaagtgcaaatttaaaataaggtgcttttccttttaagttgaatgtttagatgctctattttgtaacaaatcctaaaaaattattatcaataaatgtgttttatttataccatagagctgcccctccttctaattggttcatatactcacgtaatttttacatttatatatatatatatatatatatatgtgtgtgtgtgtgtgagtgaataaagaaaagagatcaacataccttgtttttttatatacttaatttgtagtttttatttaaagtcctaaaatataaatacaatagtaataaatataacttttaaattaaccaactacttattgtcttaatttggattatatatgtaataatatgtggagaaattcataatgcgacggtatatggtatagaatagattgaaggatattagtatgcaaacacttaaaaaatggtgatggctagaataggcaatgtttgttccaattaaagtgaaaagtaaaaactttttttatggtattttctccaattaggtaattgaccaaaaatgaaaaaaaaacacacacacttccacttccatccctgtcgccgacggtgatcaaagccattcaagccaccaccgttttgtctccaagtccagcagcaagaatgacgtcgttacgctgcagcagcgcacgtgtgctcactgtcacctccgagcgcaatggcggccatcgattgccgcccgccgccgtccaagcccatcattacgcgcctcggcaaggacgccgccacctctagggatgtaagcggggcggataagcggtttttttagcccgcttatctcacttctggtttattttttctttaagtttttttactaccatgtgaaaattgaactagcaagcgggttttatgcgggtagcgagactatccacttgcatccctagccacctcgctgtacaccatctcggtcagcggcggcagtgcgccgctcatcgtcaaccttgccggccagctgctctggtcgacgtgcctgtcagcgcaccgcatcatcccctacagctccaacgtatataaggtcgcggatcagaccggagccgggttttaatctcaaccaaatcaacggcttggaatattggatccactgagttaaataaaaattaagggatggattttattaacgccacatgtcagtttgagagtgttttgaggattgccacatggcagcgttatatcgttttaagaaagtttaatggacttttagtataggaaaatgtacgaattacccccgtatcaatcgcggtcgtccgaattacccccctgaaccacaaaaccggatgggtacggcacgtcatcaaaggtccac

SEQ ID NO: 4472 - DNA, 13229 bp, Oryza sativa
aaacatccattagctgctactaagattacaaatacggtagaatagaacgatggcttacagtagttcctgcatcttgctgtcatagtgcttagcatcaaactgggagccttcgggtgccattcctgccatggctgtattcaagggaaaaaaaagagcaggttacaaaggatgaatggcaataatgtttgaaggacacaaagtagtagtaaactcagttgtaaaagcagtcttgacccgcacaataaatgttagtacatttatagctttctgctgcacacaaggaacatagcacccatagttgaagtctatgcacgacacaacatgatctcttcgaacagggtttatgcacaacacacaacatgaaatcttcgaaccgggaaacacaaactcgcaacagtccagaatttacttaatcgacctaacaggttagagatcaagctcagtatacaatggatactgcatgtggagcttaatctaaggaatcctcctaacacagcatactcaataagcgaacagaccaaactagttggcccaaaaaagaccttcgtttggtccataaagaccttcgacttcctatggttcctccactgtccttggcatacaaaggataataatctaacagtcatcaaagtacaaagcaggacatcgaagtgcttagcaggacaaataatctaacgcagtcattaaaaaaaagtacatatactagcatgttacaaattttagatttgcaaacactaggacacccaaaacatcaattactattgtcaagcaccacataccacttctatagctgctcaaaaggataacaaacatgccaacggagatataacaatctaaacatcattaaagcaatcaaagtcacgcatctcccacccaaacccctctctctcacagactcgccaaaatcacatcgaaccaacccagatccacgcccccaccacccggcgacacccagatcgagccagcgccaagccggaccaacccgaatccagatcgagcacaaacaaaacagaaaaaaaaaagcatcctcagcgggatcccatcccatcccatcgttcattgttacctgaagaggagcggatcgatccggaggagggcttgtgttggttgaaatcaacggtctcgaatccgagatcggcgtctcggactcgattcgattcgtcgggatcgcgtgggcgctgggaggcgctggctttttcgctgcgagcggcgagaggaggaggaggcgatgcgacgattgagggtttgggaggagagagagagaaagagagagagaggttataaaggggacccgacggaggcggagcgcggctcgacctcttctctcttctcttctcctcgtctcgtctcccccttcccgttccgttccgttctacgggccggctgctactgtggagtgtggagtatgagtaagacggggggtagggtttgcttccgttccgttccgttacgagcacgagtggtgggcttgccttgggcctagtgtccgtgtgggcctttcctttttttaaaaaaaaattataagcacagttacaccaccctcatcctaaaatgtagcaattagagagataacgtactaaggtgtgttcgggaggacgcaaaacgaaacttgtattattgcatgattaattaagtattaactatttttttaaaaaatagattaatatgattttttttaaaacaactttcatatagaaagtttttgcatatgtcacaccgtttagcagtttgaaaagcgtacgcgcggaaaacgaaagaggtgggttcggaaaatggggggaagaacacagcctaattttttttacaaaagtcatactaacaaattttttataaccgtttaatttaattagatggatgaaagttacaagagatctagatttacttagagctcatcacatcatagtctataagtattttgtaaggaaattttagtacgtatggacatttcctttctgtgtgtgtttgtgggatggttggttgccaaaggtggttcgaaattctgcgaaattcggctggagtttgattaggtttcgttgtgtttttggtctagacgtacttgaattgaatacttactgttttctgtgaagtttctgtgattgcgacgatgactcccggggtttccttgggtaacaaggtggtgttgtttgacacggtgagaaaaggaaaagaaggaaactatgcaaaattcagtactttttggatggaccggatgtgaacttgagcagagttgcagtatgtcatgttgcgttgcgggcaagtaattaattagtcggcacgacagcaatcgcgcaagaacatggagcatgggtgcgttgcgagttccaacgcggacagctcaacgcaaccgacatggggcttggatcatagaagttcatgttaagataattgaattcattttggcctatgcattctgacattagaataccatattaaggacatggattattttcatcagcttgatttgaaaaaaaaactacttagaataccatattaaagactactgactgaacttttgttcaattagacaattaggcaaggatcatctgactgaacttgacacagcaagtcggcaggtggaggtatcctgatagataaacagatcacacaaacaactcaaacatcgcaaacctgccaatctcacaataagagaacattaatttgcagctttgcttacttcgatttcattttttctcaggtcaagaacaaaatttacatcaatgcgcggttgcaatctgagtagtgatcttttactccgtacagtgatgacgcaaaacttacaggagattagctactacaactaattacacttcgcatgtccatggaaataaggtaccatatacattaattctgaaccaagtctccgtatttcaggctccttgcagcatatggctttactctcagcttgctattcttgcccaactgcttgtggagttgtggggtgaaataggtctcaccacctgcagaagaagttctggttctgaaagacaacataccttccatgatacattgatgcctccagataggctcagaagtctatcataccaaagatgctctctactgaaggattcactaaacaacctttcatattttcatctttatttcctaaacctaaactcaactttttagtaatggacacaatttctcggtccaggaatacagagaatgcgaccaataagaggatttaaaaaaaaaattcgaagggctatacctatactgtactgcactagtcactagatattagtaatggtaagaatagggcctcaaggtagtttgatgtacaattggttgctcctatagacataggaggctatagaagacaaggggtatgaaagcgttgtcgagttgggctgtatatgcttccaataaaccgctcaatgtcacagctaccaaaagtgatatccaatgctgtgttaatataaaagagatggtcaggatttatgcttgcttagtatattgtagaataaaagcttcaaatggtttaatgccagggggggaagtaaaacctgtgaaagtatgtatccacttgaagctaagagtgacagcaggattgagcaggctgctaatacagaagttatgcctgctgctgtgccctcaattgttttctctaacatttcaaaagtatgtgcataagagatcaattatcaatcatggaataaataataatggaaattaaactcacttcctgtcttgctccatcttaggacaccatacttataacctatcattgatgcctaggtaaaacaagagaattcatcatactgaacgcagctaacataagaaaatattaactgatcacgcactggacatagaacctaccatggtatcaccaatacccaagctgagaattccagcaaatggtgtaagaggtcggtcattgaatcctgatgacatccatttaggaagtgcacatcccagcaagagtgagaaatgactgaacaaaacaaatatagtattaggcctatccaagcactgaacatgtaaatgagttaaaatctggaaaacaacgaccattaatccagacctacctaacaattagaatttccgaatcgcgatgatcagtgaaggcactcatgaactgatgcacaatatgcccaagagggtatatttcccaaacctgaggtcagagtgaaacatttcgtcggagaaattagcacatgtgggcatacaaactgccaaaaaacagaaagaggggggaaaagaaagggacacaaataaagaaaatgcttactcgaaccatctccaatattaagaaaacggcaaatgctgcaccaaatgctaagtccaagaaatcaggctgcaaagagaaacaatttattgagagtgtgtttcaaacaatctgatggggatcgaatatcgaaaacatatattacctgaaatattactgcaggagagaaaattaggacagcaacgagatggtaatacttgcgcaaaagaatcctctccgttttgctttgttttgatatactgtagaaccttctaattgatacatatatcacaaatatccagtatgcgcataaagcaagccgttcacgtgaatcggtgaaaatatagttaaaaaccctgtgaatataaaccattaagtgaaccaaaattcaatacgtacaaaaatgcacaaggtttagaagcaacacaggaagaaatttttcaatatttgactaacagagtgcatgcttttatgcccttccaatgaaatgcaaacttatatgctcaccaaacaaatggatgcacttcaaaaccttgaataagacgcgtccatgatggcactaacaacaatagtgctaccaacaatgaaacataaaatacaccacagtcaattctcttctgtgtgcattcctcaactgtttgtgttctttgactctccagttttctacagtaagccaaaacttgaagggagcttttgtataacaaggggagaagaaaaagaccaagcaaaaccccctgcagaaaagaaaaaaaagggaagggtattatgcactaagaaactgaagccagagaacgcaatagcttctacctgaataactgtgcctatctcgcttcgagttccaggtgcgcgaataaatgcttctgatgatacggagaactccatctgccagcagcacggttgcaaatgtgcaggcaacaaaataagtatcagatttgctaccattttgctggtaaaacatagttcgaggaataaatcacacctttgaaagagtatgagccagcatatcaccacagtaaagaacaagaccacttgagaccaaaatggcctcccctaagttcacagaaaatgtaaagataagttaaaaaaagcaatagcttcaagtcatgatgaaaaggagacatatacattgcatcggccaataggaaccacacaaattagctgaatttaaattttaaaaaatgaacagtgtagatataatgcactatgcctgcatggaaaactggtaggataactagcaatcgtatggatagctctaaagtctaaacatatgcagtcagatataaacaaaaaaataaagatctaactacatcttagacttcaggtacaaaccaaaagatgaacatgaagggaacttctctagaatatgctggattaagatcacagcagccactccatgacacagcaaatacaccaaattactcatcaccagcagacctgttaagacaacctagattagtttgtaattccttgcttctgatgaacttccaccagattttggaaagaaagggtgagattatgtttgcatgcagataaaatatgcatgtacctccatcagtcttcagtaaaaggtggaacaagtatgccaggggatataaaatgatgagcaacaagccgtatttcgaagctatagaatttccattgctgggagactgccgtagatgccaaacaaaaaatgataacatgccaaggcagctaacagatactgcccagtactgcatttcaaggtatgcatattctgacaatgaacacatatgtagttagtaaaccagatgcgtcaccgaaaatcttagtgtcaaacaagatttgaaatgttgatgaagatttagggaaatttccatttagcagtggatctgataaatttgacaaaatagaaaaatggataccttcacgtccattaggatctgctagtaagaccctataaagttgaattaaccgtgaaagcatgacactaggcagagtagtggcaccaagaagtatgcctgatgaagcacccggcctggagcatatcaatatatcatcatcaagcacttaacaatttttttaaaaaaacatgcccaagagcatcaagccaccacaagaaggtgaagtcctcacaacacaagacgtgataaaatcttacagtaagcaactaggattgcacatcacagaacccatataaattttttgactaactcaccgggggggggggggggggggggagagattccccacctgaattgtcattgcataaaagaacccatataaatgacagtgggagcaacgttttagctgaaaatgcaatggaacattattttggccatcaaaatgagagcaatattttgactggctgtatgatagaagcacctctgaatttaccatttgtgaaatgggtcaactaagaaatgctgaaacccaattattcaagagtgatatttgtcccttggattcttggaaccaccaaaacctgaccattttacacactactgaaccaaaagaaaattcagtaagcctcaagtacaagtaaaatcgcattcctgcggaatgctgaatccgactgatgtcgtttccccaattgcatgatcctcacagggaggcagccagcactgaaccaacaaatggatcaattcgcctcagattctacggctgcgccaacgaattttgcaaaacactgcacctcgcaggttccctgacatcacagggagctcctcgaacacttaattcgtggagtttgaaactcgaacactggtatcaagatcgcgcaatcccccgagctaaccaaatcgcgcgaactagcagcccagctccgtggagatgcggcggaagaagatacggataagagcgggggggaggatataacgtcgcacctggtcctgaaccggcggagcggggatgaggacgcggaggcggagccatccacggcgagctcgacggcaagggcggccgcggcgaggaccgcgagcggggcggcgagctgggccggcgccgcgagcgcgacgcgggcgacgaagaggaacacgacgagcctctcgcccgagaccaccgccggcgccatcgccatcgccatcgccggcgaccgaggaagcgcacgaacgaagggagcgcggcgcgaaccggacggaggaggagaggtgggctctgtagcctgggtcgggccttggtggctctgactgacaggtgggtcaaagcggttgagccgtcgcgtccgacacgggtgtgggtgtggtgcaccgtgcacgcgcaccggaccgacctggtcctcttgcgtggcgtgtgcgcgacgcggagagaaacgattttgtgcctcgtatctgtgggcgtttgcgtcgacgtcgtcgtctactgatgggcgttgggttggatgggaatatggaatgattcctgagcattttgtaccacctctccaggcaaaattcacaagtgttgcaatgttcaagcaaaattcgtgttctgtactatcaaatataagttcgacatccacaactcatgttctcagataggtacagaatttaaagcaactttaggtaactagtgactgatgaggagcttgtctgatggatcacaaaccacaacatacgcaatacaatttaaaacattttctaaagtaacaactaacagtccgggaagaaaacagacactatacgatctaaccatccatccattgatccatcaactcagagcagggtagtaatactaataccacgttccagacatacataagtgacgttccaggcatagtaataacattaataatacagactctaataataagacaagttcacaatctcgatagtagcttataacatttttttgctaataatacagttattgggacagcagtaatactatgttgatcattttctcttcagagcggaggggatcatgcaacggcaacaaagtaaacattcaggacagatatcatctccttgggatctttaatctaagggaactcctcagcaaaccgggtcaaaataccctgaacacaaaaccagtaacaaaaacgtcagtacatcagaacaggtagcaatttatcattacattacacaagtaaaccagggggaaatatatcctaaacattgcacccccttcagaagcaacaagcctgcaaataaagaaaaaagaaatgcaacttcaatgaaaatgcatccatcacaagtaaacaccataaattgaatatcagctaactcaaataccaccgagttcaagcttcacagttcacacgcatatattggatgacggtacatggaaatgtacatcctgcctgccaatgcgttctcacatcagatgtgttctttgcatagagggaagaaaaaggcagaacataaagcaaatttgcagaaagaaacatgaaaggaaaaacgaactagtgcctgcacactatgggtcatatgataacaataaccaaggctttggcaccactgaaaaggagcaaaccgaacaaaatagctgttggtgcaacctagtccattcaatataggcagctcgtgatagatgttcactgaaaccaagtaaccaagaagaccatagaattctaacatatcaatgtaaatgtaaagtgagttataaaaagctgagctctatttttctaagttgtttcaagttaacattattccaacaggtcaaactgcctaaggcctaataacatacagtagcccaggctaaggatgcccatttgttgaggaacagtacaaactgataaaacacttgcaaggacagcagtaaaccaaaaggaatcatacatacgagtaatgcaatggttgctctttagaaaaagaaagcacctgaatgaacaaatatgaacccatgatacaatatcacaacttacttcgtaactaacagcagaagtttcaataatatatgccacaaaatttaagcaaaataataggaaagaaacaacacttacattgatcagacaaacatcgccagctctggacggctgtagatattatccccatcgtcatccagtgcaggataagcagcaacaagcgcatcttgtgcaccaatatatagtgagttgtagattttccaatatacttcacgtactttccttgctggatggaaaaggccttgaaggcagtaattcaagatcacagctggaccaagagcaactctcatcccctcaatcgcctccatgacagcattgatgacatggggagatgtctcaaatatgtttggccagacatagttaagcaaatggacaagagcatcctcacagcccaagccagcaacaccaagagccatgtgcttcacagcagaggcagcagtttgccggtgaacaagatctctgtccattagagcatcttcaagcaagggagtaacagcatatatgtaatccttgcccatctcaccaatatactcaaagaggaaagagagagacttcaggacaccattctgaacattgagttctgggactcggtactcattcatcagggcaggcagaaccgtaaaaggtgagcaggtttcagcaacaatggcaattgcgacagttgtgcagacacggttttgccgttcctgcaccttcaagttattcaacagagtagccaacacatcctgtggcccaatagccttcgcaatataaccaaatgtgttcacagtcgctcttctaatacccttcttgtgagccttcaacatttcaagaagctcaaagcaaatcctcatccactccctagcaggcacaaattctgctccgcgatcagcaatcctaccaactagatcaatgcagttctcctggaccttctcatgcctattcttcaagataggagtcagccgaggaagaagatccttgattggcggtgtcatcttagtcataccaatgacattcacaatagctttcaatgctccaagaatcgaacccaacacctcagggtactcctctcccaaatactcatacagcacaacacccaaatgacccataagctgctcctcctgacattgtttcatcacaatagctatccttgagatcagatcagcagcttgctgcctaacttttgcactcttgttgttcaaccgccacttaatggtaccacaaatctgaggaaggtaaggcttgaccctctgtcccagtgcattgacaacagctccaaaaccattaagcatgacatttgcatcatcacttgtctgctcttggaaagcatacaggatgccatcaataagcagctcctccaaacgagcatcaatatctgaagcacccaaattagccaccaccttctcaattgtttccatcaccattctcctgtaaggctcgctttcatctttcagatcctcaacaatcctcccaacaatatcagcaactccaaccttatttgccatctctacagttgtttccacaagctgcttatagttcctgcggtccagagccattctcctaacccagaagtgacggaaaaactcaggaaggatgtcattccggatataatcagcctctacaccctctgtactgacacactgtttaacaaccttcaggacaatcttcttcatttcttcatctggtgactggaactcccttatcaggatttgcatgacctccttcgtgtagtaactggcatacagcgcatccataagagggatgatgaaaccaatagctttcaagaaggcagcaagaacctttccacggtgagatctgatacccttccacagaggcttcaaaacagtatcaaaactttctataccatatggtgcagcagcctcagcaagtgtagcaagagaaagggcagtgattgtccgcactttctggttctcatcactaagaccatgctcaatgatctcgactagggacttgagatgtggcagaacagcgcagcccataagaatagcaatctgctgaacaatcttgataccagtgtgccgagcttgccaggacttcttactctgacagacagcctttaagaatggcaggagagcaggggtacccaaagcagaagccaccacgctaaatgctctagcagtggtatttctcacatactcatcaatgttatcaatatctggtctcatggcggcaatcatagtagcaagaccagcagctttgctaagatttgagataatctcccggccctcaacacgagcatagtagtcctcatcaatcagaagtggctcaatgaccacaagaatcttatggacaaacggacggactagctcatccagcttatacagtaccctgtcaatgaccttcaccagaagatgccgctcctggtcctcaattgttggctgcatgagcaagggtagaatcttgttgaacaaagggccagcaccaaattcccttgctttgtctgtcagctgtcgaagtgcgtataggctggtatgaagctggaggttcaagaatcttgtacccttcctgcgggaacatagtatcaagctcctcatccgtaagaggcctgttccgctcctcaatgtcccgctcccaccgcaagagctggtactgctctggagtcattggaccacgagaagcaatctggccgggtgttggcgtcgcaaggttgtcaccaccaaatggcgtcggaccaggagtgtaacctgcaggcgtcgcagcaccagtgcctccaggtgtagcactacccatacttgcaggagtctcatcccatctcgatctctgcttcttgggtgttggcgtgacaagcccaccaggcagcttaggagtagcatcccaagctccagaaggtgtggcacctggagtaatgccaccagctgcaggtgttgcatccgcatcggccatcctcccaggagttggggtctcatcccaacgattccttctcaccgacggtgtcgcatccccgacacgaccaggggtggcatcccagcgcccaatcccaggagttgcatcaggagcatcccaatcggaggaggtcttcgccttcttggatccagcagcagcagaagcatcaccatcctgcgactgatcccatctattgcggcgcttcggcgctgccactggctgctgctcgggcacggccttcttctccttggccttctcctcctcttccttcttcttctgagctatgtcacgcagcagctgctccttctgcttctgcaggtcattctcgcgcatggcatcggcataggtccgcacggaagggtccggggtggcctcaccggcggcgaagggatcatggcgctccggcgagatgatgcgggccagccggcggcggcgatagtcatcctcgcggtcgatgatgcgctgcgacttcttggggaggccgtcgtcctcggcggcgcgggggatgtcggcggcggcgacggcgtggccggtgtaagaggcgaggcggcgggcggcggggttgacggccgcctcggattcgtcctcgggcgcgtcgtcctcggaggcggggatggaggtgtcgtagccggcgaagcggttggggtcggagccgccgccgccgtagagatcagtgtcgaaggtgacggaggagacggccatgggcgcgccggcggcaagggcctcctccatcttcttgcgctcctcctgcgcccgcgcaagctccgcgtcgatgccgtccatggcgccggcgcggcgggggagaagcggttagggtttcgggggtggagagattagacctggatttttcacattttggtccttttaaaaaacttatttcgcaagtagacccctagaaaaacttatcccaaaaatggtcctttttggggcgccagagtggctggcgccgtcgttcaacaggacggcgccagactatttggcgccgtccccctgccgacgtggcggggcgatgctgaggtggctaggggggaaccttttaggaatggacacaaattctcgggtccgggatacagaaagtgcgaccaatatgaggattctaaaaaaaaatttgggaaggctatacctatactggactgcactagtgactacataagtcatggtaagaataaggccttaagggttattctggagtacaaccggttgcctccttataatagggggctttaaaaaacaaagggtaaaaaaacgttttttaaaatggggctggatttgtttccaaaaaccgctgaatgttgcgaaataccaaaaagtgatatctcacaatgtgggttaatatataag

SEQ ID NO: 4473 - DNA, 1619 bp, Oryza sativa
acacatgagcctcgtcccaacacatgagacgcgtcacggcaaagcttttcgataacctcgcattggcagtacccgctccatgaacttaaatcctcatgcactctaggcgtccatgtttctagcagtgagtggagttctggcgctcccgggaaagagaagtctcacacgcatattaaattatggttcaagttaagttccctctctcacacactcatggcagtcctaccaatggcgacaccgatgtagggcacgcctctcggccctacctcaacagctgtcccaccgtagcgcacctgcctcactcaggggtgaaccatctatgcagggatactgcctctgctcggctatctaatccgctagttctatacccatacgagaagtgcggatgtacgggggtcgtttcatgcttaacttcatggctcggtccttaattgaccggggacggtactagccttttccagataccacccaaatcctccgtccgccccagtcgaaaacagttgtttaattttatttttcctttcacaaatcatgtcatcaacatcatggcaatgtggcgctcatgtctccacatgccgcatctcaattaccttcccaaaggtaattgcccaagcatatagcatttgataaatatgattatgcataattctagaatagcatttctaagcaattgtcatagttgactagggactcatacgtaaacatggttacaaagatttaagggtaaacaataatcaaggcatggcataatcacaagtgggatgttcatcattgcatgcaattttatttgtaaacaaaacaatttcgcaattgggatcaacatgttcaaggaatagtgatgacttgccttgctcaaagtcttgcgggtcttggccttcgcttggatccgcaactccctcgggctctatagttacgtgcgaaaattgatttgaattcggttagaattcaaataagaatccgaataaatccaaatgacagtcgaatgcgaaagtcgtttcctttttattaacttcactatccgcgaactacggcaaacccaatttcgatttaaactattttgcgggtataaatattttgttgtcataagttttcaatttaatctacccgagcattatatccatataataggttagaaatttctatcgcgagctaaatgtcggacggaatcctaaaattatcttataatattatacgttttaatttagtctatgactaaacgattaaatataatatacgtctaaaattcctagcgattaagtccgaatttctaccgtgaatcgattacttatagagattatccaaaaatgatctatagtagtctataaagattcatctaattgttaattatatctaaattactactgcgaattgatttcttttagaaattaccaagaataattaaattttgcaattctgggaccatgattattctataattaaattttaattattttaaattttctaaactattaaccttcctaattttcttccaaatttttctatttatttttccttttcctttttccccctttcctttttcttttctttttctctttttctctcttttccttttcttttctttcctctctttctttttctctcttcctctcggctctatc

SEQ ID NO: 4474 - DNA, 2507 bp, Oryza sativa
acagttggggtcatcagcccttggttgaacaaaaaggcattaatggcactagaccagaagtaagaggcagctgccattaggggctcatccttagctgaattggctatagtgagggcgagtacctggccgattccaatttcatcccaatgaacctgcttgctagccgatacgcgcttataccatgtggtccagcttttctcaggggaggttttctcgagggatggccaagacttgaaggtgttcttccaatcgctcagattagggttcgctaatctaaaggggattctgttggttttggcaatgatgaattcagtagggtcggaatcaccaattggaccaaggaaatagtggttgtcatgcgacagacttggaattgcaacaagattggacagatgctacggatgcaatcaggaatagagaagaagaaaacaatataaggcaggagaaaactaatctgttgcaaaagagagagatctagccgatgagaacttacctcagtgtactcggctaatggcgcggcagatgggctggcggaacaagacatcgccgcaggcggagatctggccggagatgaagtcgcctgggaatcgccttgtgtgtcggagaaatcgccggagagagagaaagcatagttggtttcggcggtgaaaacgggagaagacggtgtgatttctcgggggtaacggttagtatttaaagcgctggaataacggtcgggaaaaggcaagagcggatcctctctcggaatcgacatatggcaaatccgaaacattaccaaatattccggacttgggggtcatgtgttaatgatcaaatttggtaattcaaagtatcggagattaagataaaatcgaagcggaatccaagagatagatcgttccggaaatagagcaagaatcggctgaagtccgaatcggctgcgaccaggtcagtagagtttgagtcggacaaggtagccgattgagccgatttcgacaatgtgactcgatacacatcgtcgggttgagctaatgtgcttcatatggattgccacacatggattgagtcctaaaaatggcaattgtatctattaattaggatattttatgtaatttccttagagataagtttgggcaaaagtctgccgtaaagacttatggtatcttagagtttattagagataagagtcatgtccgacaaggacatatcttgtatctcgggtataaatatgacccgaacccatgtaatcaaataacacacgttctatacaatctcggcgcatcgccaccctttttactttcgtttcatctcgacgatttcttactttcgagttgagctgcatcgtttcgatcttcaactagaggtaaacttgtcatggcggcttgcgttctcgggattagtgcttacatctttatgacattctaatcttgtttatgcaagttgtcgatttatcatatatcctatataatctctggcaatattgctatttaaccctcagtcggctaacgtctatcactggagggcagccgattaagttaaatatcaacgttgacttagattatatagggtatccaccaccctatgaaatatccaacggcatgattgtctagatattgttattcttttcatacttatagctgcatcagttgagtttgaccatataagtcgtgattagaatctcaatctctagcctgcttttggctgccgattagggtttcatcagggtttcagccaatcttacctgatttaactactttatatcccatatgcttgattgatatgttaaatcttatgttaagatctcatcacatttaggtatattaagcttcttgtttggtatattttgcttgccttaatatcttaatatagagtggtatcggagtattagccgatacatgctagatctatcttatcggctatgctatgaatgcttataatctccttgttaatgtatatttcgatctaagtgatttatactgtctcggcatggcgaccgatctatcccaatcacttgatttaagtatatatcgacagaagtattatataccgttaatatctacagccgatcgagtagatttagttctttcttgtttatttatgactgccgatcgattcaaatatgacatcggctcagagataaatgatatgtcatcggcgactggccgatcggctatcatttatggatttaatcgcggtttctttgtatttatttcttgttgattgcaggatcaaatcaactggcacgctcacgaacctaaaggaaagatttttggacctgcactaaagttaagcagatcttccaggccactgtgtgtttttcgcatcaacaagtacaagtggcctaacttatagaattaattgctgtacccaatgctaatttaatctatggacttcaaagtactagacacactatttatatggactcatttttcgaatttactaaaattatgtgatggttctgcgttttgttttgttaacaaaattggtgatatttttgaattcaatgttcacctacagagattattgca

SEQ ID NO: 4475 - DNA, 3436 bp, Oryza sativa
aagcaagaactcgtcgaaacaaaacgaaagtaaaagggtggcgatgcgccgagattgtattgaacgtgtgtttattcgattacatggggttcgggtctatttatacccgagaattacaaaatatgtccataccagacacgactcttatctgtaacaaactctaagataccataagtcttcgcggcagacttttgcccaaacttatctctaaggaaattacataaaatatcctaattaatagatacaattgacttctcaggactctatccatacgccgcaatcatcatgaagcacatcaacctaaaccgacaacgtttgctgcatcatattgtcggattcggctcaatcggctaacactgtccgactcgaactctgccggtcttagccgtagccgattcaaacttcagccgattcttactctgttttcgcgacgctcttcatctttgattccgctttgatctaatcttctttttcgatgctgacattaccaaatttggtcgttaacacatgccccccaagtccggaatattggataatgtttcggatttgccatatgtcgattccgagagaaatccgctcttgccttttcccgaccgttattccagcgctttaaatactaaccgttacccccgagaaatcacaccgtcttctcccgttttcaccgccgaaaccaactatgctttctctctctccggcgatttctccgacacacaaggcgattcccaggcgacttcatctccggccagatctccgcctgcggcgatgtcttgttccgccagcccatctgccgcgccattagccgagtacactgaggtaagttctcatcggctagatctctctcttttgcaacagattagttttctcctgccttatattgttttcttcttctctattcctgattgcatccgtagcatctgtccaatcttgttgcaattccaagtctgtcgcatgacaaccactatttccttggtccaattggtgattccgaccctactgaattcatcattgccaaaaccaacagaatcccctttagattagcgaaccctaatctgagcgattggaagaacaccttcaagtcttggccatccctcgagaaaacctcccctgagaaaagctggaccacatggtataagcgcgtatcggctagcaagcaggttcattgggatgaaattggaatcggccaggtactcgccctcactatagccaattcagctaaggatgagcccctaatggcagctgcctcttacttctggtctagtgccattaatgcctttttgttcaaccaagggctgatgaccccaactgtgatcgacatcaccatgatcactagattagatgtgacttcatcggctaaccctatgagtttgaacaccaagaaccagtttgatttcaaaaccaaaagcataggtggttggtctggttatgtggcagcatatatgggccaaggatctgtcactcctagggaacatgtggctttcctgctcatgtggttagaaaaattcctcttctgcggaccaggttgtggtcccaccaccaactggcaattcttagccgaagcccttgaaacaaaaaggcaattccctttgggtaaaacccttctcggctacttataccaaatgttgaacaatgcatcggccaaaatagctatcggctcagtggttggagcaggaggaccatggtggttattgcaatcttggctaaatctggtagttatgaaagccgttaatcggccatctgtgacagaagctgaatttccaagactagagccgattgcagatgatgatggagaagaacgcacccaccgcaggtgtatgtcctatggggaatatgcatccacaccagccaatgcaggagcaaagttatcggctgagctgctcaaggactggttctgcagcttttatgaaagctttcaaaaagatgcacgtgtttggttcttctatgagaattcagccgacttggatctcccatcggactttagattcgaagacatcaatcatgagagataccaaaaatctatagaagttttctcaacttcaatcagcccatgtatccttcctgttggcattcatcaaggaagaaatatacaagtttcttatgaattctactatccgatgagctctgccagacagttcggaatgggacagctaccgggagaactccatcggtttctcctaagcaaactcctccaactccttctgctctagcccatttttcaagggtaagcaaccgcctctgattctttttgcaactttctcacttatagccgattgctcacagattttatagttgcaaaaaaagaaaaccgctgtaaagaagaaatcggcagcaccatttcccaaatcggctccaccagtgagatattcttaattcttttagtagttgatcccagctgatttttcctaatacttatctttttgcagcctcctcctcctccttctcctcctgttcagcaactatcaagcgatcaaaccccatcggctgcagggagtcaccatgttgaagaagaagtacaaccaaccactcctgtcatcccagtaagtcttgtctataaaaatcttgaatcggctgaacaactcatcttgataatcaactgtcttcaaatttcctcctgcagatttagccgatttattctcttttgacatcaaggattactttgatgaggaagcaaaagaagaaacatcaagcaaaactctagcccctctaaatgaagatgtcaagaaaatccttgaagacatatgtcatcggctagggtcatcactggacagtctggtggccgattgtggttcaatccaggcacgatttgcagaaatccaagctttaatcccagatgatctagcgaacaccatcactccagctgcgtaccttgagcaacatcaattcaagctggagaaagctaagcaacggatagccgatcgatgggagcgaaaagacattgaagccactatccaagccaatcggcaacttgtacatgaagaaaaattcaagcttgatcaactgtctgaaggtccgatcaagtccaatattgatcggctcgaagcccgcaagattgagctcttggctcaacttcaagaatgtaatgccgaactggacctggaacacaagaagctagccgatctcccgcgagttattgaagaacacaagacaaggctgaaatcggtcataaaaaacgttgctgatatgaccaagtccttgaaaatcatccctggaatcgatgctcaagatgcccaagctattgaggaggtagaacaaattaggcaaagggctatatcgctatccagcaatatttgtctcagtgacttcttgtgtaataggccttaggaaatttttgtaatcggctaagatgctttggtactatattcaactgtcttgacgatcctttgtgccgattaatataacttcttaacttgctcaaaaattttccaaatttgcaacttgt

SEQ ID NO: 4476 - DNA, 13756 bp, Oryza sativa
  unsure (1)..(13756): unsure at all n locations
ttactcattctcgcatgcccgcacgtcgactttagaggatcccctgtctggcccaacatatttgagacatctccccatgtcatcaatgctgtcatggttgcgattgaggggatgagagttgctcttggtccagctgtgatcttgaattactgccttcaaggccttttccatccagcaaggaaagtacgtgaagtatattggaaaatctacaactcattatatataggtgcacaagatgcacttgttgctgcttatcctgcactagatgatgatggggataacatctacagccgtccagagctggcgatgtttgtctgatcaatgtaagtgttgtttctttcctattattttacttaaatttcgcggcaaatattattgaaacttctgctgtgatattgtatcatgggttcacatttgttcattcaggtgatttctttttctaaagagcaaccattgcattactcgtatgtatgattccttttggtttactgctgtccttgcaagtgttttatcagttagcactgttccttgacaaatgggtatccttagcctgggctactgtatgttattaggccttaggcagtttgacctgctggagtaattgtaacttgaaacaactcagaaaaatagagctgcagctttttataaatcactttacattgatatgttagaattgtatggtcttgttggttacttggtttcagtgaacatctatcacgagctgcctatattgaatggactaggttgcaccaacagctgatttgttctgtttgctcattttcagtggcgccaacgctttggttattgttatcatatgaaccatagtgtgcaggcactagttcgtatttcctttcatgtttctttctgcaaatttgctttatgttctgcctttttcttccctctatgcaaagaacacatctgatgtgagaacgcattggcaggcaggatgtacatttccatgtaccgtcatccaatatatgcgtgtgaagcttgaactaggtggtatttgagttggctgatattcatatggtgtttacttgtgatggaagcattttcattgaagttgcatttcttttttctgtatttgcaggcttgttgcttctgaagggggtgcaatgtttaggatatatttccccctggtttacttgtgtaatgtaatgataaattgctacctgttctgatgtactgacgtttttgttactggttttgtgttcagggtattttgacccggtttgctgaggagttcccttagattaaagatcccaaggagatgatatctgtcctgcatgtcacactttgttgccgttgcatgatcccctccgctctgaagagaaaatgatcaaacatagtattactgctgtcccaaattcccaataactgtattattagcaaaaaactgttataagctacggtcgagattgtgatcttgtcttattattagcgtctgtattagtaatgttattactatgcctggaacgtcacttatgtatgtttggaacgtggtattagtattactaccctgctctgagtctcagatggatcaatggatggatggttttatcttggtgtctgttttcttcccggattgttagttgttactctagaaaatattttaaattgtattgtacctgtatctaccccatccaacctgagaatatgttgtggtttgtggtccatcagacaagctcctcatcagtcactagttacctatctgagaacaagaattgtggatgtcgaacttatatttgatactacctctgtcccattttaagtttttaggtgcaaccataatttttcgtgtctaattttgatcgtccgtcttatttgaattttttttaaaaaaaaagttcaaaaatataagccatgcataaagtactacttatgttttatcatctaataatgataaaaatactaatcataaaaaaaatcaaataagatggatgatcaaagatagatatggaaactcatgactgaacttataatgggacgaatggagtagcatagaacatgaattttgcttgaacattgcggcacttgtgaattttgcctggagcggtggtacaaaatactcaggaatcattccatattcccatccaactcaacgcccagacgacgacgtcgacgcaaacgcccacatatacgagagcgagtcacaaaaccaaaaagaagaagaagaagaaaaaaaaaaacagcagtagcagcggcggccactgtttctctccgcgtcgcgcacacgcttgacgccacgcaagaggaccaggtcaggtccggtgcgcgtgcgtgcacggtgcaccacacccacacccgtgtcggacgcggcggctcaaccgctttgacccaccacccgcgtctggtttatgcgggccccacctgtcagtcagaaccaccaaggcccgtccggttcgcgccgcgctcccttcgttcgtgcgcttcctcggtcgccggcgatgccgatggcgccggcggtggtctcgggcaagaggctcgtcgtgttcctcttcgtcgcccgcgtcgcgctcgcggcgccggcccagctcgccgccccgctcgcagtccttgccgcggccgccctcgccgtcgagctcgccgtggatgcctccgcctccgcctccgcctccgcgtcctcatccccgctccgccggttcaggaccaggtgcgacgttatatcctcccccgttcttatccgtattttcttccgccgcatctccacggagctgggctgctagttcgcgcgatttggttagcttgggggattgcgtgatctttgataccagtgttcgagtttcgaaccccccacgaattaagtcttagaggagctccctgtgatgccagggaacctgcaaggtgcagtgtttttgcaaaattcgttggcgcagccgtagaatctgaggcgaatttatccatttgttggttcaatgctggctgcctccctgtgaggatcatgcaattggggaaacgacatcagtcggattcagcataccgcaggaatgtgattttacttgtacttgaggcttagtggattttattttggttcagtagtgtgtaaaatggggtcagatattggtggttccaacaatccaagggacaaatatcactcttgaataattgggtttcagcatttcttagttaacccatttcacaaatgggaaattcagaggtgcttttatcataaagccagtcaaaatattgctcccattttgatggccaaaatactgttccattgcattttcagctgaaacgttgctcccactgtcatttatatgggttctgtgatgtgcaatcctagttgcttactgtaagattttgtcacgtcttgtgttgtgaggacttcaccttcttgtggtggcttgatgctcttgtgcatgtttctgtaaaagattgttcagtgcttgatgatgatatatgtatatgctccaggccgggtgcttcatcaggcatacttcttggtgccactactctgcctagtgtcatgctttcacggttaattcaactttatagggtcttactagccgatcctaatggacgtgaaggtatccatttttctattttgtcaaatttatcagttccattactaaatggaaatttccccaagtcttcatcaacatttcaaatcttgtttgacactaagattttcggtgacgcatctggtttactaactacatatgtggttcattgtcagaatatgcataccttgaaatgcagtactgggcagtatctgttagctgcctcagcatgttagcattttttgtttggcatctacggcagtctcccagcaatggaaattctatagcttcgaaatacggcttgttgctcatcattttatatcccctggcatacttgtttcaccttttactgaagactgatggaggtacatgcatattttatctgcatgcaaagatagtctcaccctttctttccaaaatctggtggaagttcatcagaagcaaggaattacaaactaatctaggttgtcttaacaggtctgctggtgatgagtaatttggtgtatttgctgtgtcatggagtggctgctgtgatcttaatccagcatattctagagaagttcccttcatgttcatcttttggtttgtacctgaagtctaagatgtagatcttcttttttttttgtttatatcagactgcatatgtttagactttagagctatccatacgattgctagttatcctaccagtttccatgcaggcatggtgcattatgtctacactgttcattttttaaaatttaaattcagctaatttgtgtggttcctattggccgatgcaatgtatatgtctccttttcatcatgacttgaagctattgctttttttaacttatctttacattttctgtgaacttaggggaggccattttggtctcaagtggtcttgtttctttactgtggtgatatgctggctcatactctttcaaaggtgtgatttattcctcgaactatgttttaccagcaaaatggtagcaaatctgatacttattttgttgcctgcacatttgcaaccgtgctgctggcagatggagttctccgtatcatcagaagcatttattcgcgcacctggaactcgaaacgagataggcacagttattcaggtagaagctattgcgttgtctggcttcagtttcttagtgcataatacccttcccttttttttcttttctgcagggggttttgcttggtctttttcttctccccttgttatacaaaagctcccttcaagttttggcttactgtagaaaactggagagtcaaagaacacaaacagttgaggaatgcacacagaagagaattgactgtggtgtattttatgtttcattgttgatagcactattgttgttagtgccatcatggacgcgtcttattcaaggttttgaagtgcatccatttgtttggtgagcatataagtttgcatttcattggaagggcataaaagcatgcactttgttagtcaaatattgaatttttttttcctgtgttgcttctaaaccttgtgcatttttgtacatattgaattttggttcacttaatggtttattatttcacagggtttttaactatattttcaccgattcacgtgaacggcttgctttatgcgcaaactggatatttgtgatatatgtatcaattagaaggttctacagtatatcaaaacaaagcaaaacggagaggattcttttgcgcaagtattaccatctcgttgctgtcctaattttctctcctgcagtaatatttcaggtaatatatgttttcgttattcgatccctatcagattgtttgaaacacactcccaataaattttttctctttgcagcctgatttcttggacttggcatttggtgcagcatttgctgttttcttaatattggagatggttcgagtaagcattttctttatttgtatccctttctttctcccgtttctctgttttttggcagtttgtatgccaacatgtgctaatttctccaacgaaatgtttcaccctgacctcaggtttgggaaatataccctcttgggcatattgtgcatcagttcatgagtgctttcactgatcaccgcgattcggagattctaattgttaggtaggtctggatgaatggtcgttgttttccagattttaactcatttacatgctcaatacttggataggcctaatactatatttgttttgttcagtcatttctcactcttgctgggatgtgcacttcctaaatggatgtcatcaggattcaatgaccgacctcttacaccatttgctggaattctcagcttgggtattggtgataccatggtaggttctatgtccagtgtgtgatcagttaatattttcttatgttagctgcgttcagtatgatgaattctcttgttttacctaggcatcaatgataggttataagtatggtgtcctaagatggagcaagacaggaagtgagtttgatttccattattatttattccatggttgataattgatctcttatgcacatacttttgaaatgttagagaaaacaattaagggcacagcagcaggcataacttctgtattagcagcctgctcaatcctgctgtcactcttagcttcaagtggatacatactttcacaggttttactttcccccctggcattaaaccatttgaagcttttattctacaatacactaagcaagcataaatcctgaccatctcttttatattaacacagcattggatatcacttttggtagctgtgacattgagcggtttattggaagcatatacagcccaactcgacaacgctttcataccccttgtcttctatagcctcctatgtctataggagcaaccagttgtacatcaaactataccttgaggccctattcttaccatgacttatctagtgactagtgcagtacagtataggtatagcccttcgaaatttttttttaaaatcctcttattggtcgcattctctgtattcctggaccgagaaattgtgtccattactaaaaggttgagtttaggtttaggaaataaagatgaaaatatgaaaggttgtttagtgaatccttcagtagagagcatctttggtatgatagacttctgagcctatctggaggcaacaaggcatcaatgtatcatggaaggtatgttgtctttcagaactagaacttcttctgcaggtggtgatacctgtttcaccccacaactccacaagcagttgggcaagaatagcaagctgagagtaaagccatatgctgcaaggagcctgaaatacggagacttggttcagaattaatgtatatatatatgctaccttatttccatggacatgcgaagggtaattagttgtagtagctaatctcctgtaagttttgcgtcatcactgtacggagtaaaagataactactcagattgcaaccgcgcattgatgtaaattttgttcttgacctgagaaaaaatgaaatcgaagtaagcaaagctgcaaattaatgttctcctattatgagattggcaggtttgcgatgtttgagttgtttatgtgatctgtttatctatcaggatacctccacctgccgacttgccgtgtcaagttcagtcagatgattcttgcctaattgtctaattgaacaaaagtttagtcagaagttcaattagacaatggatgtgcagattctcacatcagtagtctttaatatggtattctaagtagttcttttttttttcaaatcaagctgatgaaaataatccgtgtcctcaatatggtattctaagtagttcattttttggacttcgatcgtcctataacttctatgataatcaaatgtcacaacgcataggccaaaatgaattcaattatcttaacatgaacttctatgatccaagcctgtcacaccttaaaaatcctaaatatataaattgttgtttaattggaattattagaatttattttaaaaagccttgaaaagaagatctagttttaattaataaattccaatataaaatggggccagataaaatttcattaaatactttgcttaactctataattcctagatttttctggaatttatttgagctaaggaagtatttttaataaatggaattgcatttcatgaataatttaaattgaaaaaggtttttaaaagtctcttttggctttgggccgaaagtcggcccaaaaccctctctctctcctcctcggcccaagccggcccagtccgcagccgagccgcccgctcgcgcgcgcgcgctcgctgccgctgacaggtggggcccacctgtcagtcttcgtcttcctcgcgccgctgccgccgcccgaaccctagcgccgcgccgccgtcgtctcctttcaaatccaaccgcccctttctgtttccggtgaaattaatagaggggaaatgatcctcgggatcccctctaccttttcccttttggaaacatcgtctaaatcgttttggaactcgcggattcgagttcgattcggatcaatctctctcctctgaaccctagactttccttcgcgtcgccggtcgccgtgggccttcgccgcagcctccttgcccctataaaaggacccccaagtccaccgctacctgctgccaccctcgccttcgtctctcgccgtcggtagcgccctagccccgtgagacctcgcgccgccgtcgtcgccgccgtcgctccagtcgtcgccgtcgctcggggaggtcgccatcgtggtcgccgtcgcgtcgccgtcctcgtccgccccttcgccgtcgctgtcaaccgccggagcaccgtcgccgtcgtcaagccgaagagtgccgccgccttctcctcgtcgccgatgtcgtccggtcatcgtccgccgtcgctttggtcaccggtgagttcgccgtgccgtccgctacccgtaggagccctccgttcgcgctgtcgtgccgtcgttcgccggcgagcatgcacgcccgagccgccgccggtggtgacgtcaccgccgacgtcgtcgtcgtcgtctctcgtggtccgaccgtggaccggtcgatctcggccgtccgttttggatggaaagatctcggccattcgtttccgtaagccgccgccgtgcacccggtccaccgaaaaccctagccgctgacgcaataattcccttttccttttcaaaaataattcattattgcgtcataattcaattaaaatccatataagtgttttaatccgatttaatctttaaaaattcataactaattcatcttagctcggatttagttggttcaagtctctaaatttttctaaaattgagatctacatgttaaaaatatccacatgtactgttcatgcttgtttatgtgctgtttggtgattttgctcctttttgtttagattccgacgtttccggagagtctgttttcgcaggagaagaatttgaagagttccaaggccagcaaggcaagtcacacagatcctaaacacaatcctttgagcatgttgatcctatatttaaattctctatttatttcaattgtgcatttattttcgaatgtcactgggtagtgtgaatctattcctttgttatggcctgtttgcattgattactttattccttgataccttgggttattataacttgactagttgggctatatatattggttcagctagatattagataagattgcttagccatgcttagaaacattagcacactattgggataacttatgactcactattatttaatgatggcttaatgatagttcacgatggtcaatcgtgattggttaattaattacttgccaactaaaacttgataatggtgggttgtgagcacatggttttgagagtcgtgctcatgacaaataaggaccggttcacgagtttcggttgtgaaacattaaccgtgccaaccacaagccagcgtgggcaacggctttaccttttgtatagcatggttcattgcggagcaccagactgagaagtggcggagataagcccacgggggtcgctggggagtccatgccttgtttataagggggtgattatgatccaggaaaggtgcgctgtggtggattgtgttgtgcgaggggtactgtcacagctcctttccgaggtaccgtggtggtattgaggcacatggtgacatgttgtggggctgtgtcttgtgggtacagtggtacacctctggccagagtaaaactattcgaatagccgtgcccgcggttatgggcgggtctaacaatgtctttcgtgattagtctcacacttctcaccataataaaagatgctataactggtaataatttgattagctcctggtttggaatggtatattcctggtttggagatagatctgtacagccgggtatggttgttcaggatggttgggcctgagcagcatgggtgtgctgtttagtgttgattaaaattggtgattaattactctactgttttataattctcaaatgtttgctaaatgctgcttttgcaaatgagccctatattatgccattctttggtatccttgtgcacttgcatatttgctgcgtggcttgctgagtatgtcatatactcaccttgcaatcattcatcagaggaagagttctacagtgatgctgatggtgtggaggattaggtgtagccctggtcaagctgcctgtggagtggagtcgtctgcgccgtttatcttatctttccgctgcttagatctttattgattgagaggaactatctacctctgtaatgacattttattcgcttattaattagagtaataattgtactctattatcaatttgttattgtgtgcctcggctgattcctgtacgagggttcacacacatgtaagcatttggaattttggatagaaattccgggcgtgacaagttggtatcagagccccttgaccctaggttatgccaaatggttacccatagaagccctctaaaaatattggaaaagtagaactgttctcctccccttctcttttaattaaaccaaactaatagcacatgcacttcataatctcttttagtggttctcattcaaaatttattccagtgttattagtactgtacatctattactgtactaatggctcatttaccagcaaaagttttacaatattgttttatttaatcttgctgcaatgaaataaatttagcatgttgattttataactttcttttatttcttttggaacctgttgttcaaaagtacaaaatttgtgaccttgtttccaactgtttcaacttatcttgcaagcttggtttactttatttacttaccttttactttgattttctaactttattcaaattaatccaaaaacttgtgctattaattggataaatgtcttaactccctcctttcacttgtctttagatgccgcgctacaagcctgagtacttgtttggtgttgagggatttgtccaggagttgcgtacgatgtcctttgccataggatttgggactgcccctttgtatgcccagattcctcacgatcgtcacgaaaagaagtgccgagtcaaagtcaccttgaacagtaatagtgaagatatctcctcagtgatgttcgaagctggaggaggaaactacatccatgcatgtcaggaggtggcaaggatcgccataggagagctccgcgatcgctacagtgatcagttggccgacaccttatcgctaccatcctcgccaaccacagggaagtgaccatggcagctaccttgagactgagggaattgagaatgatgctaccacaaggcatttggttgagatgctgtgggctatggatgaaacccgtgcgaagactgtgttagcggctcaagatcgtgaagaccagaatcgtggtaagatttgcaagctagaggacaaagtggatcgtttggagaaggaactagccgcattgaagggagaagcaccaccgcagaaggccaggattcgtcttaccgcaaggaagagagctctatttgtccctcgctaccaattggcgccaaaggtccgtgtggtggagaaagaagttaccccagccctagcggatcctccggtcgtcaacgtaagtgatgatgaaggagaagaatccaagcgcacccattccaagatcgagtggggagccactcaagatgatggagacgagccgaacgagccttcaatcaactccgatgcccggaagacctagaatgccttgtcaaaccgttgtcttagatcgttgtgttagtttgcttgttttaagtttggttgtgtgtttctcgcatgtgatttacatcagtggtgggatgtaagtgcatgcgtttgtttgttttcgagtgttaggtagttggtgagtttagtggtgtgagagtcttcagttttgtaataatgaaactcacttaagatcaataaaagttaaattaattctctgtcctaagtagttttccccggtttctcttcttgtgctcctgcccatgccagatggtgctcactcgcagcgacgggaatggccccaacatcaacaataacaacaacaatggagagaatcccacacttgcccaagtcctggctcaacaggcacagcttatgaacatgatgatgcagcaactccagaaccagcagaaccagggaaataactatgcacctccccagaacaagttagcagaatttcttcgtgtgaggccgcccactttctctagcaccactaatcctgttgaagctggtgattggctgcatgccatagaaaagaagttggatttgcttcagtgcactgatcaagagaaggtctcgtttgcatcacaccagctgcatggccctgcctctgaatggtgggatcacttccgccttaacaggactaccgctgaacctatcacttggcttgaattccccgctgctttccggaagacgcatataccatcgggagtggtgtctctcaagaagaaggaattcaggtcgctcacctagggatctcgcacggtcaccgagtatctgcacgagttcaatcgtctggctcgttatgctccggaagatgtgcgcactgatgaagagcgccaggagaggttcttggaaggacttaatgatgagctttcttacccactcatgactggggattatcatgatttccagaagttagtggataaggctattcgccaggaggacaagtacaatcgtgtcacgcccaggaattcacgaaccagaatttttaagctgaatgtgtattaaacccctgtccaggaccagccagggtacacaaacgacaattgttgacatacagattcacgtcttacaaaaatataaaagattacaaatgcagcggaaaaggtaaagcgagctaagcctgaagacttgactcctgcagcgggcgattccattccacaggcaacccttgacggcagcgacgaaaccaacctcttcaagacatctccaactgagaagaacttcaactctggtgagggggaaaagagagcaagactgagtactacccactgtactcagcaagtcataccggaagagggggggtatgatgcagggtatatccaagggaggctaaaggttcttttgcataaagccggcatttcaaagcagtagttgaaagcagtaaaacagtagtagtaattaatccatattaaccaatcactgtccaacgttacaccacgttgcaacaggcccaaaccaccacctgaactaaccagttccaaaagctaactagggtgaaactaatcacggtgaatctggtcgaccgcccataaccgcgggcacggctattcgaatagttttactctgatcagaggtgtacaactgtacccacaagacacagccccacgacacgttcccgtgcgccgacatgccaccacgacataccggaaagaggccgtgacaggacccttcgcataaccccctctaaccgatcgcaccacaccttagggttcgcccccgtccccagcaggcaacgggcagcccccctttcgtgccgcggtgaatccggaagccgatcaaccggacaccccggccgacccaactccatcacgcccaccctcgcctgggtacgtcggctagagaaaagctacactacaagcccagccgttgcccacgctggcttgtggtaagtacgataagttcttccagggcatcccgcgaaccggtccttagtcgccatgggcacgactagcaaaaccatgcacccacagcccaccatgtagtgtattttaattaaccaacaccattgcggtggcactaatccaaagctattgccaataatcaaagtctatgctttaatgtgatccccttttgtgcagggtacgaggtgtacatcatnnnaacacg

SEQ ID NO: 4477 - DNA, 1515 bp, Oryza sativa
caacgccattcgcaaccggacgccgccgcctcgactcgacgtccttcttcggatcttgctcgcccgccgcgccttcatcctccgcgaccagctcgtcgctgccctcgtcaggagctcgcctatgaagttctcgtggagctcgccgggccagacggggtgtggcctgagcttgcagcacatctcccatcagatatacttacacgcttgtggggacgctgacgacgccgaagcggtacgagcgtcgcaacatcgtgcatctcgatagcgtacgcgctgcagccggcgatgcccgcgcatgtggacgtccgcttcgtgttctgctccgtgacggatgtttgacgatattttgtcattttacgttaagcaaacaagattactatttataaaagaagctagctcgctggtttttatgagatgcatgggccatgcaaactctcgctggcggcggcgctggacgcaatggtgggacgaggtgggggaggtggctggggctcgtgacggctgtgtgggtgcagtgcatctacggcaagaactacaccatcttcaactaatcccactccatcaagacgctcatgggcctcacccaacagctgctcaaaacagcctctccgtcgccaaggaagcgtcgggccgtcgctgaggccggccagctctgcgccctccccgacaccgtcgcccagttcttccgccaccgccgccttccagtttcttccccgttggccgccggccgcgccaagctcctcccccgccgccgccgtcagttcttccccgtaagccgccggccacgccaagcgtcgtcgccgcgtcacgtcctcgtcagcctccgcgcccaacggccgtggcacccgcccgcgcgggaccgcttctccgccggcggtgacgcagcgtcaccgacgccattcgcgaccggcctccgcctcgccccgacggcctcctccccagccgccgacgggcttgccaaaagaagagtgagagagagataggaggaagggtgaagatatagttggccatgtgggccgcccggcacggcacggcccaggcccggccgtgcctgggccgaggcttgtcgggccggcacggcccgaccgacgcaccgggccgtgccgtgccagcccacgtgccgcgctcacggcccaggcacggcccaacacgcctcgggccgtgccgggccggcccgaaggcacgatgggccgtcgtgcttttcctcagaataagtctaaatttcctccctcctattgggctgtgacatatgtacagctacaaaaagtctattttacctccctcttctttgggctggggtatataaatagctaaaataagtctatttaaggtccctattctttagacagttacatttatatgtctatttttagtccctatactttatgtaccgggcctggcctgccggcccatcgtgccgggccggcgcccccgccgggccagcccagcgtgccggcggggaggcccaggcacggcccgacggtcgggccgggccagcacgggcccgacccaagt

SEQ ID NO: 4478 - DNA, 2097 bp, Oryza sativa
  unsure (1)..(2097): unsure at all n locations
gggtggagagattggacgatgcgagaatgggggaggaagagtaaaaattcgtgacacgttgtcacgttcatgtcaatctggcacgttacgaatagagtctcgggtccacgttacacgtttgatacatgggacccaccaaggaataataattaactaatttaccaaagtaactaagaatttaccacggggtccacatgtcatagacatgtaatgacccacatgtcatagatagccaaatcttcaaagtggcaaaaaaattaaatacccaaaacccccctccgttaaacccgaagaaaaaaaaccgcaccaccagcgtggcgccgatcggagccaccggataaatgtggaaggtcgccgccgacgcggcagaggggtggggcggctggatctgcgcgtcaatcctgctgccgaagacggcgtccgtcgtcgccaacctcgtgcgtcatcttcgaggtccaaagtcggcgacgccgccgacactcgcggcacctagaatgctcaacctcgttgtcgacgcggtgacggcgcagttggcttcgcgctccgccgacggcgtgccccactctcaccgcgaggccagtttcccctcctcctcagctgtcgtggaggacgtcgcctaaaaccctcaccttcaacgcgttggcggtgtggcgtcactggctgtcgacggaaaccctcgcctccgatgccgtagaggtggaggatcgagcgccactaacaaatccatggattccaccaacgaaggcaatggcctctatcgcggcgcctcctctgccagcgtcgcggactacacccgcaggcccggctaaggggcctcgggctgctacttggtcggcatcgacaactttctcacgtggctactcgacaaatcaattcatgaaggtccaccaacgatgacaagagtcacaagatagattctcaagtcctttttaggccctgtttagttcacaccaaacttcccccaaactccaaactttccatcacatcacatcacattacatccaaaactttcctactcacataaactcctaacttttttttttccaaactaccaaacttctccccaaacttcggaactaaacacagccttagtcaaatactagtacaatcttaggcctagctccattaggcaatttatcttatgttttcggtggcatgtcaaacaagcggagcgattagcaaatgactaatcgagtgttaattactattcctatcaatttaagaattaaattcatttaactatttgataaagatatttttatatagaaaatttttagacgaaatacactatttaatagtatggaaagcgtgatcacattaaacgagtgatttcttttagccaaaactccgttaagaactcaatgttgggctagattcgaaagtgagtttggattggaccactttttcattaaggcgttaaccatgagcacgtttacaaactatttaaacaatgtgtttttaagtacaagtttctaaaaaaaaatcaaacacatttttaagttctaaatcttaattaattgtgtgttaatgactacttttgttttgttttacgtgaattggaaatctcaatcaaatagtagtagagcacttcagaacttagcctaatattttttttggagtgcttcctatttttgaagtttaattttatacgagagatttaacagcccacctcgcaaaccccaaacccccccccccnccnccccccttacagaataccaaaaaaaaaaaaaaaacgatcaccccacaaaccccccgttccattttaagaatccccaaaccaaaatcatcagttcatcacccccaaatgctaaaggccgccaggttgcctagggttttccccgcccgggtttcggcgccggggggggtttttttcatcgtcgcccctgttcaggttatcgccgttataccactttagttttccccgtgggttgtttccgcgctaatacgttttattttacaggagttttttcggccttggttagggtggtcgttttcgtcctcgggggttcgtgcgctccttcttaatttgatttttcacttagggggcccatttcccttcttggagcgtttctcccttacttccgctggatcgtttcc

SEQ ID NO: 4479 - DNA, 6594 bp, Oryza sativa
tccccacctgaattgtcattgcataaaagaacccatataaatgacagtgggagcaacgttttagctgaaaatgcaatggaacattattttggccatcaaaatgagagcaatattttgactggctgtatgatagaagcacctctgaatttaccatttgtgaaatgggtcaactaagaaatgctgaaacccaattattcaagagtgatatttgtcccttggattcttggaaccaccaaaacctgaccattttacacactactgaaccaaaagaaaattcagtaagcctcaagtacaagtaaaatcgcattcctgcggaatgctgaatccgactgatgtcgtttccccaattgcatgatcctcacagggaggcagccagcactgaaccaacaaatggatcaattcgcctcagattctacggctgcgccaacgaattttgcaaaacactgcacctcgcaggttccctgacatcacagggagctcctcgaacacttaattcgtggagtttgaaactcgaacactggtatcaagatcgcgcaatcccccgagctaaccaaatcgcgcgaactagcagcccagctccgtggagatgcggcggaagaagatacggataagagcgggggggaggatataacgtcgcacctggtcctgaaccggcggagcggcgatgaggacgcggaggcggagccatccacggcgagctcgacggcgagggcggccgcggcgaggaccgcgagcggggcggcgagctgggccggcgccgcgagcgcgacgcgggcgacgaagaggaacacgacgagcctctcgcccgagaccaccgccggcgccatcgccatcgccatcgccggcgaccgaggaagcgcacgaacgaagggagcgcggcgcgaaccggacggaggaggagaggtgggctctgtagcctgggtcgggccttggtggctctgactgacaggtgggtcaaagcggttgagccgtcgcgtccgacacgggtgtgggtgtggtgcaccgtgcacgcgcaccggaccgacctggtcctcttgcgtggcgtgtgcgcgacgcggagagaaacgattttgtgcctcgtatctgtgggcgtttgcgtcgacgtcgtcgtctactgatgggcgttgggttggatgggaatatggaatgattcctgagcattttgtaccacctctccaggcaaaattcacaagtgttgcaatgttcaagcaaaattcgtgttctgtactatcaaatataagttcgacatccacaactcatgttctcagataggtacagaatttaaagcaactttaggtaactagtgactgatgaggagcttgtctgatggatcacaaaccacaacatacgcaatacaatttaaaacattttctaaagtaacaactaacagtccgggaagaaaacagacactatacgatctaaccatccatccattgatccatcaactcagagcagggtagtaatactaataccacgttccagacatacataagtgacgttccaggcatagtaataacattaataatacagactctaataataagacaagttcacaatctcgatagtagcttataacatttttttgctaataatacagttattgggacagcagtaatactatgttgatcattttctcttcagagcggaggggatcatgcaacggcaacaaagtaaacattcaggacagatatcatctccttgggatctttaatctaagggaactcctcagcaaaccgggtcaaaataccctgaacacaaaaccagtaacaaaaacgtcagtacatcagaacaggtagcaatttatcattacattacacaagtaaaccagggggaaatatatcctaaacattgcacccccttcagaagcaacaagcctgcaaataaagaaaaaagaaatgcaacttcaatgaaaatgcatccatcacaagtaaacaccataaattgaatatcagctaactcaaataccaccgagttcaagcttcacagttcacacgcatatattggatgacggtacatggaaatgtacatcctgcctgccaatgcgttctcacatcagatgtgttctttgcatagagggaagaaaaaggcagaacataaagcaaatttgcagaaagaaacatgaaaggaaaaacgaactagtgcctgcacactatgggtcatatgataacaataaccaaggctttggcaccactgaaaaggagcaaaccgaacaaaatagctgttggtgcaacctagtccattcaatataggcagctcgtgatagatgttcactgaaaccaagtaaccaagaagaccatagaattctaacatatcaatgtaaatgtaaagtgagttataaaaagctgagctctatttttctaagttgtttcaagttaacattattccaacaggtcaaactgcctaaggcctaataacatacagtagcccaggctaaggatgcccatttgttgaggaacagtacaaactgataaaacacttgcaaggacagcagtaaaccaaaaggaatcatacatacgagtaatgcaatggttgctctttagaaaaagaaagcacctgaatgaacaaatatgaacccatgatacaatatcacaacttacttcgtaactaacagcagaagtttcaataatatatgccacaaaatttaagcaaaataataggaaagaaacaacacttacattgatcagacaaacatcgccagctctggacggctgtagatattatccccatcgtcatccagtgcaggataagcagcaacaagcgcatcttgtgcaccaatatatagtgagttgtagattttccaatatacttcacgtactttccttgctggatggaaaaggccttgaaggcagtaattcaagatcacagctggaccaagagcaactctcatcccctcaatcgcctccatgacagcattgatgacatggggagatgtctcaaatatgtttggccagacatagttaagcaaatggacaagagcatcctcacagcccaagccagcaacaccaagagccatgtgcttcacagcagaggcagcagtttgccggtgaacaagatctctgtccattagagcatcttcaagcaagggagtaacagcatatatgtaatccttgcccatctcaccaatatactcaaagaggaaagagagagacttcaggacaccattctgaacattgagttctgggactcggtactcattcatcagggcaggcagaaccgtaaaaggtgagcaggtttcagcaacaatggcaattgcgacagttgtgcagacacggttttgccgttcctgcaccttcaagttattcaacagagtagccaacacatcctgcggcccaatagccttcgcaatataaccaaatgtgttcacggtggctcttctaatacccttcttgtgagccttcaacatttcaagaagctcaaaacaaatcctcatccactccctagcaggcacaaattctgctccacgatcagcaatcctaccaactagatcaatgcagttctcctggaccttctcatgcctattcttcaagataggagtcagccgaggaagaagatccttgattggcggtgtcatcttagtcataccaatgacattcacaatagctttcaatgctccaagaatcgaacccaacacctcagggtactcttctcccaaatactcatacagcacaacacccaaatgacccataagctgctcctcctgacactgtttcatcacaatagctatcctcgagatcagatcagcagcttgttgcctaacttttgcactcttgttgttcaaccgccacttaatggtaccacaaatctgaggaaggtaaggcttgaccctctgtcccagtgcattgacaacagctccaaaaccattaagcatgacatttgcatcatcacttgtctgctcttggaaagcatacaggatgccatcaataagcagctcctccaaacgagcatcaatatctgaagcacccaaattagccacaaccttctcaattgtttccatcaccattctcctgtaaggctcgctttcatctttcagatcctcaacaatcctcccaacaatatcagcaactccaaccttatttgccatctctaccgttgtttccacaagctgcttatagttcctgcggtccagagccattctcctaacccagaagtgacggaaaaactcaggaaggatgtcattccggatataatcagcctctacaccctctgtactgacacactgtttaacaaccttcaggacaatcttcttcatctcttcatctggtgactggaactccctaatcaggatttgcatgacctccttcgtgtagtaactggcatacagcgcatccataagagggatgatgaaaccaatagctttcaagaaggcagcaagaacctttccacggtgagatctgatacccttccacagaggcttcaaaacagtatcaaaactttctataccatatggtgcagcagcctcagcaagtgcagcaagagaaagggcagtgattgtccgcactttctggttctcgtcactaagaccatgctcaatgatctcaactagggacttgagatgtggcagaacagcgcagcccataagaatagcaatctgctgaacaatcttgataccagtgtgccgagcttgccaggacttcttactctgacagacagcctttaagaatggcaggagagcagggatacccaaagcagaagccaccacgctaaatgctctagcagtggtatttctcacatactcatcaatgttatcaatatctggtctcatggcggcaatcatggtagcaagaccagcagctttgctaagatttgagataatctcccggccctcaacacgagcatagtagtcctcatcaatcagaagtggctcaatgaccacaagaatcttatgcacaaacggacggactagctcatccagcttatacagtaccctgtcaatgaccttcaccagaagatgccgctcctggtcctcaagtgttggctgcatgagcaagggtagaatcttgttgaacaatgggccagcaccaaattcccttgctttgtctgtcagttgtcgaagtgctgtcttccgctgtgggggtgtgccattcttcaccttgagcaggagcttcatgatcttcctctccttctgctcttctggagatagctgctcctcctcctcctcattcagcaatgttccaaagtactggtaatcctctggcttcatgaggggcaacccaccaggcaactccttgggcacatcaaactgctgcccacgattctcctcaggaatagcatacaatggtgtgcccaatggtgttggtgtagcgagcagctttcttgctggtgtgcgtatgggttggtatgaagctggaggttcaagaatcttgtacccttcctgcgggaacatagtatcaagctcctcatccgtaagaggcctgttccgctcctcaatgtcccgctcccaccgcaagagctggtactgctctggagtcattggaccacgagaagcaatctggccgggtgttggcgtcgcaaggttgtcaccaccaaatggcgtcggaccaggagtgtaacctgcaggcgtcgcagcaccagtgcctccaggtgtagcactacccatacttgcaggagtctcatcccatctcgatctctgcttcttgggtgttggcgtgacaagcccaccaggcagcttaggagtagcatcccaagctccagaaggtgtggcacctggagtaatgccaccagctgcaggtgttgcatccgcatcggccatcctcccaggagttggtgtctcatcccaacgattccttctcaccgacggtgtcgcatccccgacacgaccaggggtggcatcccagcgcccaatcccaggagttgcatcaggagcatcccaatcggaggaggtcttcgccttcttggatccagcagcagcagaagcatcaccatcctgcgactgatcccatctattgcggcgcttcggcgctgccactggctgctgctcgggcacggccttcttctccttggccttctcctcctcttccttcttcttctgagctatgtcacgcagcagctgctccttctgcttctgcaggtcattttcgcgcatggcatcggcataggtccgcacggaagggtccggggtggcctcaccggcggcgaagggatcatggcgctccggcgagatgatgcgggccagccggcggcggcgatagtcatcctcgcggtcgatgatgcgctgcgacttcttggggaggccgtcgtcctcggcggcgcgggggatgtcggcggcggcgacggcgtggccggtgtaggaggcgaggcggcgggcggcggggttgacggccgcctcggagtcgtcctcgggcgcgtcgtcctcggaggcggggatggaggtgtcgtagccggcgaagcggttggggtcggagccgccgccgccgtagagatcggtgtcgaaggtgacggaggagacggccatgggcgcgccggcggcaagggcctcctccatcttcttgcgctcctcctgcgcccgcgcgagctccgcgtcgatggcgtccatggcgacggcgcggcggggggagaggcggttagggtttggggggtgcgggggggggggggggg

SEQ ID NO: 4480 - DNA, 13200 bp, Oryza sativa
  unsure (1)..(13200): unsure at all n locations
atatgaaaaacaactaagggcgatataacaatatcggccactgtagatcggcaaaccataaccgattacaacataaaaaaacaactaagggtgatataacaatatcggccatctcaaggcgatgcaaacacatcggctatcacgtatcggcaacactaaccgatcatgcattaacccaaacacttgggtaatatttcttcaaatattttccatttagcgctcgtccatatacttctccatcgagtccttgcagcatgtatgctcccttagacacaaccttatgaatctgaaacggtccttcccaattcggcgaccacttgccgaatttattatcccgagtcccaatcggtaaaaaaaacttccatacaagttcaccttccgaaaaagtcttaggcaccactttcttgttgtaatgccgagcaattcgttccttatccctggtacctttgcaagggcccttaatctagactgaacaagtcttccctttcatcggccatgaggttataatactcatcggctgttaaatcattttgcaattccgttctccttgagcggattctaacttcccatggcaaaacagccttatgtccataaacaagcttataaggcgggacttggatcgatccatgacaagccatccgataagacaacaatgcttcggccaaccaagtatgccattgccgaagataatcggaaatcttcctcttaatcaacttgatcaaactcttgttagacgcctcggcctactcattagcttgtgcataatatggtgaggaattcaacaatctgatacccatgctatcggcaaactgaacaaactcatcggacacgaaaattgaaccttgatcggttgtaatggtttgagggataccaaatcgatagattatatgttcttgaacaaattgtatagcgtccccagaatcaaccgtcttcaaaggaatcgcctctacccacttggtaaaataatcggttgccaccaatataaacttatgtcctttactcgacggtggattaatcataccgatcatatcaattccccaacctctaaatggccatggtttaatgataggattcatagccgatgccggtgccctttgaatcgccccaaatttctaacaatcttgacaccccttataatatttgaaataatcctctagcattgtcggccaaaaataccctgcacgtcgaagcaaccacttcatcttatgagccgattgatgagtgccacaaatcccctcatgaacttctccgattgcgaccttggcctgatcggcatccaaacacttaagcaacaccccatcaattgtccgataatagagctcattgtccaataaagtatacttcaacgccttatatcgcaacttgcgagaagccgattgagatggattttgtaaatattgatgtacatcatacctccaatcatcggatgtcaacacaacaacctcaattttaacatccttgatcatcggcttatatcccgatgccccttgggccaaatcattagcttcaatattttgctcgcgagatacatgcttcaaagtcaccagccgaaattccttcatcagttcttggcacttttcattataaactattaacgtatcattcttgcactcatattctcctgccaattgactaattactagcaaagaatcccccataatctcgatagcatcggcttcaactttcttgaataactgcaaccctttgagaactgcctcatactcagcttgattattggtcgcataaggtttaatagtataagcaaactcaaaacatacccctcgagggaaaattataactaagccgataccacaaccatgagtacatatggatccatcaaagaataaagtccatggcacaatctccactgagtcgattgaatcatcacgatgatcaactatgaaatcggctatagcttgccctttgaccgccttcggtgactcataccgaagatcaaactcagttaaagaaaatatccattttccaacccttactttcaaaattggagccgataacatgtatttgacaacatcggccttgcatatgacagtgcattcgttggacagtagataatgcattaaccttgtacaggaaaaatacaagcacaagcacaacttctccacaggagagtatctggtttctgcatccaaaagccgacgacttaagtaaaatacaaccctctcctttccttcaagctcctgaatcagaaccgagccgattgacttctctccggccgacagatataatctaaaaggtattcccttctgtggaggaatcaaaaccggaggagagctaagatattccttaatgtcatccaaagctttctattgctctaccccccaagtaaactgttgatcggctttcaacctcaataatggtgtaaaaggctctaaccgtccagacaaattagaaataaaccttctgacaaaatttatcttgtcgatcatctcttgcaacttggttttattttctggaggctgaattttcttgattgcattaacactcctctgagttatctcaatcctcctctcatgaacaagaaatcccaaaaactgaccagccgatacgccaaaagcacactttgtcggattcattttcaagccatatttccttgttctctcaaaaacctttctcagatcggctatgtggtcctctatttccttagacttaacaaccacatcatcaatgtagacctcaaccaaccagccgattagatcatgatatatataatccatagcccgttgataagtagctccagcactttttaagccaaaagtcattacaacccacacaaataagccgattgcaccaggacacctaaaagccgttttatggatatcttcttcggccataaagatttgattgtatcccgtattaccatccataaagcttaaaatcttgtgccctgaagcagcatcaactagctgatcggcaactggcattggatattcatcctttggggtagcgttatttaaatctctaaagtcaatacacacccttaccttaccatttttcttgataacaggaactatactagaaacccactcggcatatcggcaagtacgaataaaaccagcatcatatagacgtttaaactcagccttgacaggttcaagcatatcggctttgcatcttctcggaggttgttgatgtggtctaacccccggtttgataggtaaccgatgttcaacaattgatcggctgagtccgggcatctcataatattcccaagcgaagcaatctctgaattcctttaacagctttatcaacttggttctgaattctgaagataaattcttgctaataaatgtcggccttggtcgatcacctggacctatgacaatttcttccaaatcatcggccgacatgaaaccctgtccttgcttgttatcgagatcatctactatgtccttggtgtagacctttgaaccctccacgatgccctcaaaataatagcttgggttctccatcttcaattggttgtatatcagaatcggacacttttagaaaatctccatcccaaacttttccagacaaacaatccaaatcatccatctcccaaagagctaaatcggcactggcaacgttgactgacctgtcagctggtacaatctcaatcttgtcgccttgccactgaatcaagcattgatgcatggttgaaggaatataacaattagcatgaatccaatcccttccgagcaacatgctgtaagaacccttcccatcgatgacaaagaaagttgtacggatagttttgttgccgacggtcagctccacattcaaaactcctttggtttctgatggattgccaccaaaatccttaagcaccatatttgtcttgatgagatccttagcgtctctgcccaactttctgaatgtagcataagacatcaaattcactacagccccaccatcgaccatcatcttggacatcggcttcccattgatataaccatttatatacaacggcttgagatgccgattttctgtaccctctggcttctcgaagactgcctgttctggtgacaatgtcaatttagccgattcttcttcaacttcatcaacatcggcctgcttgaccccaaactctgcaggcaacgtgaaaaccatgttaaccgatgcaattacaacactttttcctttggccaatctttttgcttcatcagctgtggcttcatcggctgcaggaacctaattcataacacgccactcctgctttggctttgttttctttaaccgatgatcgatttcctgttcgacctcctgaaaatgctcccgactcctcaatctttgaacccttctcttttgattctttgtaaaaataccagaaggacaccattgagttttcctgttttcattgtcctcctggctacgatcttggtttactggacccaatctttgatgaacaggaactcttttctgcctcagccgattgcctctattacatgatcggcttgaactctttgttatatcactgcatccaggacagtcctcaatagatggcagcctcataccttcattccaacaaaatcgaaaaaactcacaaccccaatgaggatcaaagccgtcatcgttttcctcataatgtttctcctgctgcctgtcatatcttttctgatacttcctaataattttagccgaatttgactgaaaacctcttgcacgtcctccattggctgtttgaccagttgtatgcaccatattaacaggaaaaggattgccatcaaccttcatcggcctcttagaatcatcaaacctaattttaccgtcctcaatagctgcttggatttgctgcctgatgaccttgcaatcattggtagtatgagacccggaattatgctacttgcaataccttttcttgcccaactctttggccgatggaattgtatgaccagcaggaagttgaatctgtttctctcggagtaacaaatcaaaaatcttgtcagccttggtaatatcaaagtcatacctctcctctttcccagagttctttacccattggcatagtataacctttttgcttctcacccattcggctgttgctatctcagagtcatcaccatcatcatccaatccatacatgtaaggacaaacgtgattaacctttctagagtttttcctggactctgcaaacctctgttcatgcagggttaccttctgtgtaagatgtgacaagctatcaaagtctttagacgagaatttctccctaatcggaggaatcataccctgaaaagccaaatcgtctaactgggcatcagtcaaactcaagctataacacttattcctcatctctctaaatctctgaatatactcatgcacaggctcatcatgtctttgcttgattgctgttaaatcggacaatttcatctcatgtaccccattgtagaaatagctataaaaatgcttctccaaatcggcccaactgttaattgatccatatggtaaagaagaaaaccaagtaaaggccgatccagacaaagacagtcggaacaatctaacccttaaagcgtccacagccgatgcttcaccgcactgggccaaaaatcggctgatgtgttcataagtcgatgtactatcctgccccgagaattttgagaaatctggaactttgaaccggttaggtaaaggaactctctcaaaccattcagggtaaggctgtcggtataaatttccagcatctttcggcctaagcccgaactgttccttcattacacccgcaatcatatcggcccatggttgttgctgaggtgttccttgaggctgttgtgtcatgggctcgaattgattgtattgaggaacaaactaaggttgagccgatcccccctactgatattgaacttgtggtgatggaggctgatactgataattcaaattgcctccctggtaactctggaaatttggcttaatattgcgtaccaaatgctcgggaacaacttgaggtatcaccgtttgatctggctgtacatgatgaactaggtgctctgggacaactcgattcacagcgtgctgtcctagctgattgttagatgttgcaaacccagccgatgcattcatcaaaccttgctgttgaatcggctgaacaatctcctgttgtcttaacggtgtttgctgaattggttgcaaaacctgccgtcttggagggatctgctgaattgactacacaacttgctggttgggggtgtttgttgaatcggctgtgcaacctgctgccttggtggtgtctgctgaatcggctgctgctgggtcgggtcaacattaggttgaagaggtaagaacatagctacaacctgatcttgcgttagccgattcacattttgtccactatgctgtggttgctctcataccaacaaccgaggattgaccaattgacccggtgctgatggcaatgcagcaggtgcaggagccgataccggtgccgtcgactgagccgatggtgcattaggaggaattgactgagcagctggctgattatcagtaattaatggccgataattttggaatactcctcccagtagataaaccgaccctgtagcttgatactcagccattgaaccatcaaccatttttttcaccatattcgacaaagtgttgactaatattccagattgattgatcaaagcatggtgcacaacatagtcaacctgatcttggaagttgttaaactgtaactgtgctgcgttaccatcttggttaagattaccgccttgaactccctgggaaccatcaccttgaactccaacaccttggaccccttgagagccatcaccttgaattccttgaaaaccatctgcaacacctttatcacacggttgggttgtgccatctggaacttgctgtacttctccatccttagaagaacctgttccgggaatatcagcaactaccttcaccttatacttctgcaccactgtccccttgcgggtctgcatgaatgagtttaagaactggttccgtgcttgctgcatcattgagtcaaaatccttctgttgatcaggtgtcaacttgtctggagtaatggtcacgatgttgccttcattaatctcagataagcctagctgctggatcttttctttaagagaacctggactagccgaggacggcgatgctggcggcttctcggccatggagaaaactgctattgtgattctaacttcttaatgaatcccaccaggcgtgccaaaagcgtgttgatgtaaaacacgaggcctgggacatctgcttaactccagtgcaggttcaaaactcgccttcgggtatgctagcgtgccagttgatttgatcctgtaatcaacaagaaacaaagacaaagaaaccgcggttaaatccataaacgatagccgatcggctaggtgccgatgacatatcatttatatttgagccgatgtcatatatgcatcgatcgacggtcattaataaataagaaggaactaaatcttattcgatcggctgtagatattaacgatatatagtccttacatcgatatatacttaaatcaagtgattgggatagatcagtcgccatgccgagacagtataaatcacttagatcgaaatatatattaataataagactatatatgttcatagcatagccgatcagatagatctagcatgtatcggccaatactccgatactactctatattaagatattagagcaagtagaatatactaaacaaaagcctaatatacttaaatgaaacaagatcttaatataaatggcagattcaacatatcaatgaagcatataagggaaatatagttaaatcaggtaagatcggctgaaaccccgatgctaccctaatcgataaccaagaagcaggcaagagattgagattctaatcacgactcataagatcaaactcaactgatgcagctataaatatgaaaagaaggacaatatctaaacaatcaagccgttggatgtgtcatagagtggtggatatcttatataatctaagtcaacataggtatttaacctaatcggctgccttctatcgacagatgttagccgattgtaggttagatatcgatatcgccagagattatgtatggtatatgataactcgacgaattacataaacaagattagagtgtcataaagatggaagcactaatcccgagaacacaagccgccataacaagttttacctcttgttgaagatcgaaaccgatgcagctcaacccgaaagcaagaactcgtcgaaacaaaacgaaagtaaaagggtggcgatgcgccgagattgtattgaacgtgtgtttattcgattacatggggttcgggtctatttatacccgagaattacaagatatgtccataccagacacgactcttatctctaacaaactctaagataccataagtcttcgcggcagacttttgcccaaacttatctctaaggaaattacataaaatatcctaattaatagatacaattgacttctcaggactctatccatacgcggcaatcatcatgaagcacatcaacctaaaccgacaacgtttgctgcatcatattgtcggattcggctcaatcggctaacactgtccgactcgaactctgccggtcttagctgtagccgattcagacttcagccaattcttactctgttttcgcgacactcttcatctttgattctgcttcgatctaatcttcttttccgatgctgacattaccaaatttggccgttaacaaggtgacggctttttatagcatgaggaatgacggttgcgacggttggaaaggtctgtaataccctccaacgaccattgggagtgaatccccaccgtcagattgaaatctttcatccagcggcgcaaagggggttcggccgaaccaatggcccaaccggccccgctcttcagcaggccgtctcctcgtgggctcctcaatccagatcagtgaattatgggcctatttgatcgtgtcaattctgagtttctggcctatctctccacaagtctgattcttgacagcgtctgattgattgtccgagtgttttgctgtcggttctcctccattttgtacctctttctctaaggtagatagaattcatgtacaaatggaaatagattattctaaaacaaaatatacattgcaagcatagctagttctcctttattttagctatattgacagtcggaattggtcaataacgaccgtcaacaattttcaaaaatgactgtgaacccaaaaacgcttctggaaattttcggatttgtccgaaacattttcggaatctcctaaaaatcttcggttgacttcactgttttgctgttctggaaattttcggatatgtccgaaattaattttcagaattttcgaaaaatgcaattattgggcataacaggcaaatctggagttgtggctataaatagcccactccccttacttgtgagggctgctggtcacattggatattttcatgcccttggcttgttcatcttcagattcacttttgagtcttgctttcttgtttccctctcacttgtgtttgattcggattttggtctgtgtttgagagttgtggattcgagtttgtgtgtgtgcttgttgtaggcttcgtgaagatttgtgagcacttgcatcatctccgggagttcctttgattatttattactcttggaggttgaggactcctaggcggctaggtgtcagtctcgagtcaccgatctacgtgtggtaggccaggagaagtttgtgaagatcggatctcacctccgaaagggaagagataccactagtgaaaggaggagtgctttgtgcaacctcttgagcaaagggttagtggatacccgactctttgtgagctcgtcaacgtagagtagaatcccctcaaggatttgaactcagggaacaactcatcgtgcaacaactttggtgatattacttccccctctcctctagctttgcttgattgtgtcgctaaaggtctagttgcttttcgtgatagcatattcttgttgtaggcagctaaatctagaatttactttgttttgcgcatactctgctattttcggaaattccgaaaatccctacttccgtatttacttgagtttttgaattagcctattccccaggcctaattgaccctttcataaacctcagcgccattttagctagcgctaagtgcccagccagggaccccgcaacagggttgtttggcgagccgggcggcagcggctaagtgccgaatgtcagcgccaaggaaagtggcgctgagctgtagatgtcagcgccaagctccttggcgatgagacccctgccacgttggctgggccatgctggcagcgctcagcgccaaagcggttggcacggatatggccaagctccgcgccaggaggcttggcgctgagcccatggcctatttttggttaaagttctttgcgcgggctaatttcgtaataagtttttcaaaagggtcaatttgtaaaaaaaaagaatggcaaaaactgccatgtcggacgaaaccgcctcctaaaccacggaaggagatcatttacaccggttttcaaagatggaacagacgttatacccggttttgttttgtagttgagggatagattcgaagcaagagttgagggtggtaaaataaacttattcctgctaggctagggaaaggcgcattatgctggacttgggactgggccaccgcccaccgcagtccaataattacggcgttaaagacctagacgaaggagtggtggaaaggaagcagcctcccagattcccacccccccaccatctctccgtaaagctgacggctttgggaaggcgatgatccggcgattcctgtatatggtcgacatcttcgacaaatcacacggccctatctcccgcaggctacgccgcatcaacccatcacatctcttctaccccaatgatgcactgcccgtgccccaatcgtcgtcgtcggcgacggtggtggaggacgcccccctgcctccaatagacatgaccttctgcgggtcgactgagttcatgcgtaggagcgacgacaagatcgtcagcgtcgacaggactactcgccgcgccatcctctacgaccccgccgagcacaccgtccgcgtcttgccctccatggtggagtacaagttctggaccaagtcgttcgccgtcggcgacgatctctacgtcatggagacgataccgctgcctgacaaggtggatctcggccgcgatgcacggccgggccgttctttcgaggcgctcatccaccgtgaaccacgccccgtcgatggcgacaggatagaggacgagtgctactggcgaccactgccgccgcctccgtacgtgcacgccgccggcataagaaccgacggccagatctgcgggtacgcggtggtcggcgagtcccacatcttggtgtccacccacagctacggcgcctactccttcgacacggcgagcgccgcttggagcaaggtcggcgactgggcgctgcccttctgcggccgcgccgagttcgtccccgagcacggcctctggctcggcctctccgtcgcggacgacggcgtcctcggcgcgtgggacctgtcctccaccatccaccaccagcagccgccgccggtggcccaccacgggtgtaagggctttgcggtgccggaggtgccatacgcctcacacgtcgtgcaccttggcgccggcaaactgtgcgttgctaagctgttcatggtcgctcaccaccgggagacctgcagccattcttgttgcgactttgacagtgataaaaggtacttcgccattctcaccggtgtggaggtggtgcgctgcaatggcgacaaggttgacatcatcaagcacaagtcctgccgttatagctttggtgaacactacatccccatttatctactctaactagtagagtactcctacctactgttttaataaacctttatttggttaatcctgctgtttttcttgtaaactcttttattgtacatgcatgatttgaaggaatcaattaattatattttgaagcacctgaaataaaaatataacatttctaacctgaataatcatcacaacatagtgttcaaagtggcagaacctatggtactggagacaacatatgacagtaaccataacagataagcatgagaccaacaagtcagcttcctttttgttaatcaggaatggtactttaggatctgcttatgtggtttagctcgtgtgtctctataattttcattcctttaacagtccgcataagcgcatacagcattgaatcatctcaggcaacgagaataacctattgcttcaatcatcattgcataaatgtgcattacagtgaataacccagattgctgcaaataaaactatgcactttttatctgttaacatagcctacactgttaaaccccctcctcatgtaaaaatcagttggaaataaaataaaaatataatctctggtgaatcgttttatgctctgttgattatggcagtccaaaaacatgttgtcaccattgtccatgtgcttaacttgaagaaagtctactggtatttgtctggctcaaatcctttatccagtaatcttttctttttgatgatagttataaagttagtcaccgttgtcatactcgatacgtttggcaaacacaatggatttgataacaatcaactctttgaaggtttgttcttcagctttattctaacttaggcttaactgaacatcctacttcagagtctttttaatgtgcttggagtattatatatgagatccgttgttcacttctaatctaatggtcaatgataaaaggtaccaattaggagtagttaaaatgtgggccaggtattaatctaaaattttagtggaaggttagataagtaatttgatcctaatatcaaaacacaatttacctctttaaggccggcgcctcaggccgcctctcgtgctgtacacgtaggatagctacagtacgcagggtggaaattttgcaaaaaattcctttgcttttgtataatttgatcaaggtccctcccgaacagtttctctgaggtggtattttacgtgtagggcctgcataaagccggatatttcatgcaaaggagggaaaaatcgcgaattagggctgcgatctaaaatggctctaaaatgtggaagaggaggggctttttcgcaaaaatacgcgcactaatccactcccccccgccccanntgtcaaacgctagccgtcactccccgcattccctctcccct

SEQ ID NO: 4481 - DNA, 11897 bp, Oryza sativa
gcctaccctcctcctcgtcgtctcaccctctcgcgccgccgccgcctccacttccgccgccgtcgtgttgctgtctcctcgcccctccgtgtccgcctcttcctcgcgccgtcgcccgagcgcaaccgtctccgcctccgccactgccgtcgctgtcgccgagtgctgccacttccgctttcgcctcgctccgcccatacctagcaccgcgccgcagctgccgccgttgccgagcaccgccggagcgccgtcctccatttctgtcgctatcgccgagcgccaccgatgcatccttcgccgccatggctgacgactgctgcgccaagttctcctcgagcagctcgccgcagttgtcgatgaggaagtggcgtcgaatccggcaacatctgacctgctgctgcgcctgcgccactgtcaacaatcgatttcacctgccatgaaaaaacaaaagaaaggtcagttattccggttccctgccttattcgagaggaaaaggaagtattggtgtaggcgtttagctacaaatatggtcatgcagcggcgagagcagagctgaggcatcaggcgtggtgcgcgtcgcttgatggtgcttgccggcactgtcagcaaacctggcaagaggaccactcgatgatcttgtgaacatttacagacggcttttgcatcattaagggaacttgttgcatcatggatgactaggatatcagaagagtgcaagttgtggacttcttctgctctatccaaacaaggaagacttcagatatcctaatatgcatattaatggaatttttagaaataaaattttcagctcctttaactttctgcttcaaatgcatatttcccattccaatgctcctaatggattgtattttgtctcaagcagttgttttagtaaaaaaattgtatgtaatacatgagatagcctgggacagtaatagctcaagaaacaaaactctctttgagcacaaagagaaaagtcctttcaagccgtgagaaacttttgggtacctttttggcctcctatcatatgagctcctttttcttctcccctgtaaatttgtcaagttctacctcactgtaagagagaggagatagagagagatgtactaactgatgaactgatcaatacaagtcctaactgatgaactgtacaaattatatgtgttgcgggagcgagaagttgtgcacagctgagttgggatcagatcatctaatgcttactggagttcaatgtggttattttctatccacgcgatctcaagactttgcttaggggctattacaaacacgagctaggtgggcgacggacctcatattatgacatcgaagtcacttctgactgaggtgtgttttgtcaaccttcagtactcatgtttcatatttaaggtcaatgtgtaatgtcttttacatggctgtttatatctcaggcaagatagtttttgcacttgtaccagcatttgccaccacttattcaattcataagatcccactagccatagtggcaatctcaaaaccactatacatcagtgaatttccatcttatatagctagcttgctggaagatgaggaggtgaacaaatccttcccagatctgtacagttggttctgaccctgagccgcttctagacactacggcgggagttctgcttccattgcctccagattcctgcaactccatatacggcacatattctgttggtgtattccaggtataagtttgttctttgctctggcctagatttgcagttgtttcagcttctgccttatcttagttattcgttttctttagtgtgattcaattctgtagctaccattcctaaagtttgcgttggctccccttttttttcaattggtacatgcagcaggctaggatatcaaggaaacaaggggttgatgaggtgatggacaacagtgcaggatcaacaatgagaacaggatggagcggagagatggatcagtagttcctccaatctacaagtgcatactataccgaacgccacacatgatctccgtttaggatcctcagtagtggtatgtctaacatgatgtggtgatctttgtggaacaggcataggtttgtgtcttaggtgaaaaatagcacatatattattctgatgagaatatatttgttggtgctattttcagcaacacctatgcatttggtggattaatgtttgccaagcagttctattcacctaaaagtcttgatgataccaaaagttggttaatggttatagtagtgtacatggacaacgttgcatagattatcttatctgtttttgcaaggggatattcataccaaattttcttatggatacttctctaacaagaaaaatagtgaattaatttgccctgacaatgatttatctggtatttcctgccatgcgtgtagctgtatatgcggttactctcaggaaaattgtctttgtttgggatgaaaatatgctatactccagatctaaggtgagaagagtagtcacattttttattctctgatttctcaagcagtatatttcactggcagaactagatcccaatacaatttcagtcctattcttttcttcctagactcagctcatttatatgttacttggaacagatatcagtacaatatcaatattttttcatttgattttcgttgtcccgtcaatgtttatatgttagcttatgggacaagcatatatatgaacaggtttaataaagcctcataaaggaaagttgcttcatgattttaagtcccaatggtatttttggggaaacgcttcacatcgagcgtccggagtgaaacaaaatatcgaaccaaaatgtctggtggggcctactattgatttaacccattctttacctccctcctctaatcctgcaaccaactaaccctaatcccatttcctcctcgatccaaatgccctccgtcggcgactatccatctgcccaaccatgttcttccctgacgcggacgacgagtctgacgacagcgacttcatcgacgccctcatcaacccctccgatcccaccttccctaacctgacccccgtcgccgctgccgtcgccatggcttccgctgtgggggggcgggagtgggaggggtcggctcctcccgcagcggtggcggcgagaggcggcgcggctccctccttctatgacgacgaccaggcccgcgtctcctcgggcccctccctctccatctctgtagcgggcacgccttggtcgcgcaaccttcctccctcgccgatccgctcggccagccggagtagaaaaagacagaggtgggtttcgttgggaattttagtgaagttgcagattatttgcatttttgttgcactttgttctatgaagttgtttcgttccgttttgattcattattgcatacattgatttttggtgttgcaatcagtatgttcaattattgattttgttgaaacaaattttgctcaagcaccgaaacatttttttctctgctagtggaactttggactcattgttgcatgcatcgatttttggtgttgcaatcaatatgttgatttagttgaaacaattttgctaaacactgaaacattgttctctgctagtgaaacatttggaacttttttattgaaacaatttttaacaagagatgaaacatgtgaaacatttctcaacaacatggtgcaacaccgtccgatgattttcacaggatcggacgtccgatccgtagcagccttcgtatttttgcaatgcaacagtgaaatcacctttccctgtcctaccaagcgaactcccttcctgatcctcatcaaaaattcgtttctttcctttcttttttgttcagaattgaacaaagaatttggggaagaaaacatcttcccccacttatcatgatagcctgctccagtccccttacgaaactttcgttattgggttgttattgggttagccatacacttcacatgtttctagtgattcacatgacatcatcaaatgatacaagtcttggataagaatctacaacgcactagaacgcccttgttgacgattctttactgagacagcatctagggctcctcgaataatgtgatctcacaccgggtaaatccttaacccttcctcctttggtagaacatatgcgcctttggttgattaatacataagctagtcatggttatatccgagctagttgtgttctcatcatcctccccttcttgattggaaaccgtcctcggtttcaccttgtcatggagcgtattgaatttatctttatctatcacaacatccggtgaggaacatttattgatggccatatggttggatcctgaaatctttatagtcgaaaaccacaacattccccttcttgcaaaccaacatgtaactcatttaaaccactagaggaactagatagagaattacttatacgcatgtgttcctctagacaatacatttcatcatgaaaaggaggtatagttaaattcgaacaaatatatactcgatgcacattacattctcaagtatttaaagaagatagaaatttatgctcttcattcttgctagcaatgtgaataacatgtttaaactcaacacatggcaattcaacaacataactaacatgtttattcactagttgtggcatggatataagtgaagcatcgcacaactcttctttatcacaagaaacattaagcaacttgttttgtgacaaaggtatttcaacaattgtttccactatgggttgctctaatgtagcgcaagtagtggacatagttggcacatcataaatatgcataccttgattagttgtagcaccatcaccattacctttattctcatcttcataaattataggtgcttggccaattgaacattcttcaagcatgcatggagctatggataggtctttttgctcttcgtctttcttctcttcctcctcatcatcttcaacatcggaggtgctgatgtagccatcttccgtagcagcgtatgcccgttgactagggcaaaccttctgcacatggtcaaatccatggcagcggtggcactgaatcctgggcgtgcgtcccgttgaagcaacagatgaggcactcttggtggatacctgtgaagaacctttacctgaatctacaggtcgtgaggaaggtggttttggcgctgcagaaactccatacgcaactggtcacttgctcgttggtgggggcgcccagaaataggtgggcttgggcagccccggagatggcttcgcccgcggcgtgtacgtgcttgccttgttcttgacctgttgatcacgcccctgcaattccttctctccaaacatagcaaactgaaacaactggttcacagtgttaaattccatataatcaactatgtcctgaatatcgcgcctcaatctcgagtaaaaacgacaaatagaatcttcggttccctccactatgctacatcgcatcaatcccttttgtagctcgccatagtaatcatgtacagatttatcctcttgttctaaacacataagtttcttgcttaaatctctaagataagatggaggaacaaatctatcacgcatagctaccttaagttctttccaagtagtaggtaaagctctcccacatctaacccagtccaccaaatataagaaaaatctttaaacttactagtagcttgtcgaactctatgctgctcaggcacaaggtgggcactaaacttttgctctactgtcatctcccaatcaaagtatttctcagcatcataataacccaaaacagatggtattttaaacttaaccttagaataaggatcatcaggcacgcgattattgttaccttgttggtatcgttgattttgagcaccactcatacttgtcattgcaaacacaaaaacaacagcaaacagtgaaggttatccctaataatctgctacgcggtgtagtggtgcctctcaacaactcagccaaatggagcaccttaccaagctcttacaagtgtcttaccagcactgctaaggacggtacaaccggtggctggttcgtgacaccttgaaggacgtgatgtggcgattgcaaggatcaaagtggtgctgaccagaagtatatatgtgaagcttaggaggcacaatatatagtagcaaaggaacgcaattgtgctaatcagaaaatgcaaagttgaataataattcaaagtactagtcaatgtgctggcctagcttagactcaactctagctcaaggaagcacccgacaacactaaggactagatatgaatcaatgcacaactctacactctgaaaacatactcaaaggatgaatgatttttttttctttcttggtgcggctttttttaagcacatttctgccttttttttctttttctaaggtgcagttttttctttccttttctttgcacctttctgccttttctttcttttttttattttttactatttttttcaacaagaactgaccattgacctcaaacagggtctcaaatgtaaatatgaatattacaggtacttaaatgctaagtgcaaaactaaaattagatcacctcaaaaatggaatgctcatgtcatgtaggttccgtttttataaaaatatctcaaatcggcaaccactaaaatacccaacaatgtgatgtaatgccctagaaaaaaagtagaataccgtagaggatatattggaagtccctaaggttttggtgtttgaaattagaagaaaaacaatagttatacgctagctgggctagctttcggccagcccaaggcccaggtgccccctccacaccccctcaaaaccctagaagatcccctcacctccccctagccgtcatttggtaccctgggcgcccacctccccctaggggtgggcagaaaaagaccgaaccgaactaaccgagaccgagaccgaaaaattcggtcacaaattcggtcatcagttgtaactaaccgaattttatacagtcttttcggtcatctcgctcggttaaccgaaataaccgaactggccgaatcactgtaaaggcccaataccagcccaatagcccattagctagagaaaaccctaaccttccttcccacatcacacgatccttcccagtccccacaaccccacatgcgcgtgcagatgcaccgcctcttactcgctctttctcctcctcctccccgcctcctctccgctttctcctcctcgcaccgctcctctccgccttcttctcgcgtcgcgccgccgccttcctcgcaccgtgcctctccgtcttctcctcgcgccgtgccgccttctcctcctcgcgccatgtcgccaccctctacccacacatctgcgcgcccacgacctgactcctgaggcctcgatgacggaaggctaatgggagacacaagatggatgggatctggaccgtggagtggttgagatcgacgggatcaatggctggattgatttgcttgatttgattttttttccatgaatcatgctctacttgctacttgttgtggcatcatcaaattttagtccttcatcccagttgctttttcattcatcatgtacagagttctttttttgcaattattttttgggctgagttcggtctttgaccgagaccaaaccgaattaaccgaagaccgaaatactctatcttgagttttcttgaagaccgatcagtcttgtgatcgtaaagaccgaatttttcaaaagactgaagaacctaaccgaaattttcggttagaccgaatgcccacccctacctccccctctggtcgacctcccccatgcctgccctactgcagacctgggaagaagaagaagggaaggagaagaaagggaaagaaggaagcggagggaatcgaggtgaagatggaaatgaagggtttgattaccgctgcccatggaggctttccccctgttttggttttctattagggtttagatcaagtgttggaagcgagtaagtttgggatccaccgatttattcctcagccaggttttcgctgatctgccccctgcgcagttctgttttggatgccttttcggccaagataataggatttccttcgaaaagtctctatacaaaagttgtaaataacgtgtagatctatcttctgaccaaatggcatgattttatatcaagtggtttaggaggtatcaatttctgaagttggctgtctgaatgtcgatgcatttatctgtagtcgaggttcagagggattttagaggatcttaatgatggaatccgagaatcttgtatttacagaagttgtagcatatgttgtgatctacctcctacataaaaattgttagcttttatcttgtagtttgttgtcagtgctcttttgaatggttgttgcacagttttctgggcagatgcacttttctgttttgtgccatgttttaggccagctaaatggaagaattcagttttgttatctaaatgaaagttataactcttgttctgtagatgtcagaaatgatatattttgctatgttatgtgatgtagaattggaggtatcgagttgttaatctatgctgcttttataggaagattatcggtaattttctttatgttgtttggggtgggttcccagcgtagaaagtgaatgtgtgattcttgaatgattatatgtgtgttgtttgaggctgagtcggtgtttattcaggtggtgccacttcggaacgcaactagagttcatctcgccatcggagaaggcaagtaacgtagcggtggtttgctataactttgacttgttatttgattttacctccacgttgaaattatatatcatcaaccaagattattatatgttatacataggatttacctatatgaatcatacttattgattccttcttgtagcataaatcaaaccttcaccctgaacacaagaaaacactttcggcgccaaatagcctcttgggctaaaccattataccaactaagcttgggcaaagctcaaccttagcaacgggaactggctttgtcatcatatcagcaggattatcatgagtgtttatcttgcatacctttagcttaccttgtgcgactacatcacgaccataatggtacttgatatcagtgtgttttgtcctctgatggaacatctgatctttagtgaggtattgttgatgcaaaaaacacacgctggcctggaagatctgcttagctccagtgcaggtccaaaggttggtaagatgcaggcgtgctagtcagtttgatcctgcaactgacaagatatgaaaatagcagatcaatgaaccgatcggctgacaagccgatggagcaattccagccgatgccgataccagccgatagcgatagggttttgagctatcggttgtatgtccaatgtagattctgatacttgatgtgaataacaatataaaggcaatcagctaataatgataaataacaataatataatccagtagaaaccaatcggctaacaatatgatataatagaacaagtattgatctgaaggttaaagcatacatcggctggaggtccgatgtcataaaatccacaagattagatagatcaatgaaacctttgttgtcattggctaaatccgacttatatgtatatccaatccttataagccgatgcaacgtctagataccttatcagttagcaccccaataaaacattagcatgaacctatcggcttagcaagatttatattatcaacaacaatctagtacgtcgaacctaaccgatgcagcacgagattgtatatgataatctaatactcgatgagccgatagatctgtctaatgtgatggatataacaaatctatttagaacagcattataattgtagagatatattggctaagacagaagatcggacctaaccgagatagtcccaactaaaccaatgcgtctctaaacgcaatgcaactagagatagaattaagatatcaggtaggcaaatatatcaaccgaaccagagcgcgatccaagagatcgaagcgatgcagccttgaacaacaccaatgtagccgacagattcaccagggccggcggaacgtaggacttaccctttcgccggagatcgaactgaaccgatgcagccccacgtcaggtgccaaattccgtcggttgataagtaaaaacctcaggaaagagggtggcgacgcgccgagagtagttttattgattgtgatattgattacaatgaccccgggtgtacatatttatacccatgggtagatactagtccttgtaggactagaaagaaactttcctaaaaataaaaggaaaacataaagtccttaccggacactaaacacactttcctaaaaataaaaggaaactaaaccctgcctaattaatagataaactgccatgttgtatccttcttgaacttggactcttctagataagcttcctttaattgatccgactccaccaagaacacaactgttggactcttctagataagcttcctttaattgatccgactccaccaagaacacaactgctggtgacttgacaactcacatcgaccgattccgagactctgaagccgatattgactctaggccgatgatgattttgggcttacctaattttggcgttaacaggtatatggcactttgattgtcacaaaataggttaatgcaagaatcaactccacaaatctcagcaaacaatcctttcagccaaactgattccttacatgcttcagcaatagccatgtatcctgcttcagtggtagactgggcaacaacaggctgcaatgttgccttccaacttacagcacaactaccaatagtaaacacataacctatgagtgaccttcgcttatctaaatcagcaataaaatctgaatccacatagccaataagtcccttagcagccctgccaaatttcaaacaagcatatgttgtgcctcaaaggtatcagaaaatccactgaacagccttccaatgttctttgacaggattagccatgtatctactgaccaaactcatagcatgagataaatccggatgagagcaaaccatggcatacatcaaagaaccaacagcacaggaatatggaacccttgacatgaattcaacctcctcatcagtactagcacattgtaaagctgataatttaaaatgaggtgcaatctaagtactaacagactttgcatcatgcatgttgaaatgatgaagaaccttcttaatgtaactttgctgactaagaaaaaacaaaccagaatttcggtctctagtaatttccataccggcgacaggcctccacttcgcttatgctagagtgggttggattatgtttcttgggttccctttggattttcgtacccaaagctatgtcagccgtgttattagtctttttgggaggcttgattattggcagtagatggatgtagtcccgggaagagttatgctgcgagctttttatgatgatgttgatatggttcctagaacaatagtgatcaagcaaatacccaatcagggtggtcagggggagtcttggactttctctgtttttgtcctcaacaatgattttgccggcattcaggctccggatgaagatttaccaccaatgggtgccctagatcctgatcttgaaaataatcatagcaatgggccggttcaggaggagcatcttgataatcatgctggtggttggggagattgggagcagcaaggggagaatcaggatcagcatgtgataggggattctggagtgagtcagcagaatcagaatcagaatcagaattcagattctaatggtaatatgcagatagtgccttttgtccctttggttgatcctgctttggaggttgtgttcactgttgctgaagaaggccctttatattttatttctgatgaaacacaaggaaggattcaagaatttttcctcaggaaggagcttctggaaaagttggttaatagtttatcttcctcttttattccgggtttggtgaccccctctgctcc

SEQ ID NO: 4482 - DNA, 18452 bp, Oryza sativa
  unsure (1)..(18452): unsure at all n locations
cccccccccccccccttacagaataccaaaaaaaaaaaaaaaacgatcaccccacaaaccccccgttccatctcaggaatccccaaaccaaaatcatcagttcatcagcgcgaaatgcggaaggcggcgaggttggcgagggttctcgccgccgcggtgtcggcgccggcggggcgtcgctccatcgtcgcgccggtgcaggtatcgccgtcatccacgtctagttctccccgtcgtttgtttccgcgctaatacgttctcatctacaggagtttttccggccatggctagggtggtcgtcttcgtcgtcggcggttcgtgcgctgcctcctcagttcgcattctccactacggtgccccatctccctcctcggagcgttgctcccgctacgtccgccgcgatcgttcccaccgttcgttcaagccccccttcgaggtctgccgggagcccgtggacaggaaggacggcgtctcggtggttcggaacgggagcatcatctaccgcggcgacgcctccttccctgcacacgatgaaaaccggcgagacttcgtctcctacctcaccgattgagagtttgagactgacgatgcagttccaccgtcgactacccctcctccgcccgtactcgacgagatgtcagattgcttttctccgccaacttctccgcaggatacagccgcttatctgcacgcgctggatccaacagtacagtaagtctccaaaagcaaaatttaccctgcttcgtggagagagttttttcattaagtggcgccgataattttatagtttttcattaagtagtgcccataattttatagtttttcattaagtggtgcccataattttttcttgaaccccataattctgtatgtcctccaattagtgaaatgtgaaaaaacaaatttgaaccccatagttttttatgtcctctaaatagtaaaatgtgaaaaaaaaaacaagttcatgactactctgagttgcgaagcagagctgggcatgcaggtgcagtgttgtgcagtcagtagagatgcaaccctgatatatatatatatttcagctaaaaaaatttttagaagcaaactagacatgtcttatttcagctaaaatatacagtataccatatatgtgccaaacatcagcatcattgaattttacactgggaacaccatcgactacccaatgaaatgcaaaatgataggaaatgcttttgcttgttgattcatatggtttgttccctttgtctgcaggtatagggataaacattctctagaaacatgctatgagcccttgttcttcttcagaaagcatcccgcagtggagtttcatcatccaatagatgcgcccgactccatgtttgatagagtgatattaacagaatgggctaaaccagctatgagaggggtgctggagaccatcagcagtcatcattctgcgaatctggaacttacagagttcagtctgaaagatctgaaaatattctgcaattaccagaccccggaattcaaaccaaggttcaagttagtttgcggcacaaggaatgctacatgtgaaggaatgagaatgaattatatccaagcaggacagattttcaaggagatagttaatgcatcgctgggaacaccaagttcgtgggatatcttaattgaggattttcaggacttactgcagatgttagaaaatcccatccttgaggaggcttatctgatgagaaaccaccctgctttgcttgcactgaaactgcactcacagtttttcatggcatgctatgaaacattgatgagggcatcacttcaatctgtgttcgaagtgttcaagatgctaccctatgggatgaatgattcaagtggtcactggaaggtacgtctagagcaacacccgtacctttggtggatgctccacagtcagtttacatcctatggagacagaaactctgagcagtgcagataccgtcggaactactcatgccacaagattcatcatctcacaaaaaggactgaacgattcaaatggtattctgcaaatgatgttgacatgctgctttaccaatatctacccatgtcgcttcctggcttaatgagagcaatgtgggacgaaggactgcttgcccttttctgcttgcgtctagatgagcttttcaccaagtgaaccggtcatatctcctggtggcaagtgaaacacccatttctggtaatcgacgaatgtgacaaactcagtcttaactgtctggtaatagtttttctgctgctcacaattcatatgttttctctggagtacatttctctcaaacgcttcagatgatctcgttgagtgagggttgggctagtactgtagcttgctgttactagtacattacttctcatatccagtcctctgcagtgaggggtggggttattactttactgtcgcttgctgttactacataactactcgtgtaagtatatctagtactcctggattacggtttcgacagaatgtatagactacttttgtccccccggaggtgtgcttggaatttgtattccgtattgtataatgctcacaactatgaaacctcttgtatctagttagtagctagaaatttttcagataaatattcacacgataaacttgggagcacaatatttttgcccttgttatatatttccagttgtattataatacaaccgatccccccccccttctgcattgtacttgttttgggtaaatgctatgccggtgatctgtcaaaattatcaacagagtagtatagtgggtaaatctccaatctgtcattttattggaagcagtagcttgcacttcagtacaagcagtagggtttttcagcaagctccagtaaatctttatgtcctatcaagaggatcatcgattcgattcacaagggaatgtttgctacatggaatcaggaatgtttgcttcaaattagttttgtcatcttgagctgaaacaaagggttgatggaattttggccattaccaatctgcgcatgcttacagtctctgactgcctgtgctagtagaaatctgtcattgtttccactcatgactcatgtagcagtaattatttttttgccgggtcggtgaacaggaatcctactttactttattatgggaggaaaaaaatacagtaaaacaacaagcatggttattgccaacttgccacacagtgaaacctgtcattgtcttatctccactcatgtaactctaaacatagtacatacttgcggtgctgtactggttagagaatcagcgagtagaattatctctcgagcaccaatggaagttgcggtgtgagagattgctacagtctactggttcaagaaccagcgagcgagtagaattatctctcgaacaccaatggaagtcgcggtgtgagagattgctacgattttactgattcgagaaccagcgagtagaattatctctcgaacaccaatggaggcgctagagttggtttattacatgtgtatctcatgtggccagcatgacttacatacccaactcgtagcatatccggatgtctgtccgcgatcatgtcgggtgatcaagccgacattgttcgtgagcaattatccgttaacaaccttttctcgagtagtccagccatggccggtgtatgagataggtcgtcggtcttcgttggttggttgggcgcgacgactctgcatttgtcaagaacgttcttgataatgcagtgtactcgaccacatcctactcaagtgctcaattgttcctgaaaaatactttctagaaggcaagatatatagcagagaatatcgagtaggtactcaaagaactacatggatcttctagtattatcaggatgctacgagcagatgtaaatatcaggcattacgtaaaccgtaaacaagcatgattcatacagaagagaacagagcaagcccccagcgttagaccgtagtcggtttaacgtcggaaatactcgtgcaatagatattgtataaaagacatgctctaggtaaacataataaattatagatctgacaattctgtatgatctgaataggtatgataaattgcatataaaatattgcgtacctttgtagatacatgccggatgtatctacgaaattagtagattaatttaaaaaaccaatctaccaattactcttaccgcgtacttgtttgacatcatatgatctgacgtcttttggtacgccgcgtatcttgaggtttggtcgatctcgagagatcgagttgttgatgacgatggttccgatctcgtcgggagacatacttcggtcgggttggatcttcccacagcgaagtcgtcgaatagcttgttgtcagagaatccatcttttgaacccatctcgtcgaaaccttgaagtaccaaactccccctacctagcgcgccattgtcgacgtttgatgtcgcgattccggtatttgcatggtacggggatcgttggtactaggatatacgcgagactgagataaaagagatggagacggggatttttatacaagttcgggccccttatctgacaagtaatagccctacatcctgttggccaaagccggttattgatcttattcatcataaccacaccagtacaatgtttggagtagcctatctaactgttgtcgacatggcggtctgaagatctgactcgtagtcgacaacagagtagcctttctcctcgaatccgtgcccggcgagatcagagatagcgctttcgtctctcctgacagtatccgaagacaccgtaggggactagccgtgcttatcgctgaagtcgatatccggcggcttgtcttggcgtatgtaggcttgtggttttatggcgtctatgttgtccgtgtatgttgattgtctctatatcccctctcctcctagggggtcttgtatttatactcataggtgtcaccttgtccaagtagaactaaggaaaccaatatgaatacaatccgagtagtccttgtcgtttccatgtagaactctggttgtcttttcttatccggaacttcatccatatccgaggtcagattccgtataagacatggtatgtgacgggtcctgtcgagatttagtcaactattattagatatatggtatccataaccctgacaagattaatatgatttttttcaaacaactttcgtatagaaactttttgaaaaaaaacacaccgtttaacagtttgaaaagcatgcgcgcggaacacgagagagagatgttggtaactaagggtaccgaacacagcctgagtaaagtttgaggcagcaaaaacgtcggataggaatagttggatttatactgtttgcttgttgccgtgggatgcgttagttggttcggcatacgatgcgatgagaaggacggcgatttttttttacggaagaaggtagagcgcgctccaccttataatcatttcattaatagatcatttcattaatagaaatgaggttttcaggttacaagttagaggttatagttaacctagaacagaaaggaaaaaaacgaaaaggaagaagagaagaaacaaaaataaaaagaaaagagaacggggggtgggatttacaaagatataaacaagggttcttatactaggagagcctggtacaccaggattgaattttctgcatgtttgattcattggttctcatgctccaaagatcaagggtgtctgagacttgctgtgtgatgtgctgtaggttgtcaaactgaccttcaaacactctgttgttgcgggatttccatagcgtgtaggtgcaagcagcgaaccaaattggttctattccttttgaagaccgattgctgtctatgattgcttgaaggaaagccgtgcttgattctgagttgttgtctagctgcaataagtttagtttttcccatagattattggcatttttgcatcttaggagtatgtgatcagctgattctagtgtcaggcaaagggagcagtggggatcttcattccattttttgctgaccatattggctttggtgtttagcctgtctctgaatgctagccaaaggaaaatcttacaatttacctcagcgtactcagccgatggagcggcggatggaccagcggaggacgacatcgttgcgagcggaagtttgccggagctagaatcgctgtggagatcgcctttcttcgccgaggggatcgccggagagagagaagatagaatcgcttcggcggtgaaaacggaagtaacggtgtgaagtttctcgggggtgacggttagtatttaaagcggagcgataacggtcggaaaaacggcaatatgtgattttcttggggatcagatatggcaaatccgaaacattaccaaatattccggacttgggggtcatgtgttaatgatcaaatttggtaattcaaagtatcggagattaagataaaatcgaagcggaatccaagagatagatcgttccggaaatagagcaagaatcggctgaagtccgaatcggctgcgaccaggtcagtagagtttgagtcggacaaggtagccgattgagccgatttcgacaatgtgactcgatacacatcgtcgggttgagctaatgtgcttcatatggattgccacacatggattgagtcctaaaaatggcaattgtatctattaattaggatattttatgtaatttccttagagataagtttgggcaaaagtctgccgtaaagacttatggtatcttagagtttattagagataagagtcatgtccgacaaggacatatcttgtatctcgggtataaatatgacccgaacccatgtaatcaaataacacacgttctatacaatctcggcgcatcgccaccctttttactttcgtttcatctcgacgatttcttactttcgagttgagctgcatcgtttcgatcttcaactagaggtaaacttgtcatggcggcttgcgttctcgggattagtgcttacatctttatgacattctaatcttgtttatgcaagttgtcgatttatcatatatcctatataatctctggcaatattgctatttaaccctcagtcggctaacgtctatcactggagggcagccgattaagttaaatatcaacgttgacttagattatatagggtatccaccaccctatgaaatatccaacggcatgattgtctagatattgttattcttttcatacttatagctgcatcagttgagtttgaccatataagtcgtgattagaatctcaatctctagcctgcttttggctgccgattagggtttcatcagggtttcagccaatcttacctgatttaactactttatatcccatatgcttgattgatatgttaaatcttatgttaagatctcatcacatttaggtatattaagcttcttgtttggtatattttgcttgccttaatatcttaatatagagtggtatcggagtattagccgatacatgctagatctatcttatcggctatgctatgaatgcttataatctccttgttaatgtatatttcgatctaagtgatttatactgtctcggcatggcgaccgatctatcccaatcacttgatttaagtatatatcgacagaagtattatataccgttaatatctacagccgatcgagtagatttagttctttcttgtttatttatgactgccgatcgattcaaatatgacatcggctcagagataaatgatatgtcatcggcgactggccgatcggctatcatttatggatttaatcgcggtttctttgtatttatttcttgttgattgcaggatcaaatcaactggcacgctcacgaacctaaaggaaagatttttggacctgcactaaagttaagcagatcttccaggccactgtgtgtttttcgcatcaacaagtacaagtggcctaacttatagaattaattgctgtacccaatgctaatttaatctatggacttcaaagtactagacacactatttatatggactcatttttcgaatttactaaaattatgtgatggttctgcgttttgttttgttaacaaaattggtgatatttttgaattcaatgttcacctacagagattattgcaggtagtacagctgtgatcccttctattccccatgcaaataccactggtcaatggcagggagggtttgcgtggttcacaggatccagccaaatggttccccccatgcatacagaagctggaagctctcagttccaagtatcgttttccggtagttcaataaacacacattttaatgttcatcattttgtaatttactgagccacgcacatattttcttattttcgcaggtgtacctcaagttaacatgcccatgttttcaacgggtatgaatgattagtgccaaggagctccaacattcaacattggttcgtaaataatgtgtttcattttttcactatctttatattgtgatattaatttagctctccacctgcagggggatgtatcaaatgtccatgaatgaaaacacacaaccacaaggaccaagctttctcgaaatgttaggccatggagattggttgttcaatcaaccacctatcatgcaaccacaaacaacaggtacaacttataatttactagaaaataatttattttcagtatgtgtgcacgctacaactttgcattcaatgttttgtaggaatgtacaaccctgaacaaatgatgggatatgccggcagcatacagtcatacggagaaccatgtagctacggtgggggctcgtcaacagcacaacacgacataggaccattgcaacatgatgaaccaccaccaataactcagccagcccaagactacgacgatgttgatctccgcggtgttgaagtcgtccgtaggtctgtccgcgagcgatattcacctgaaagattatctttgtcagggcgcagacctccaactggtgctagaagaaagggaaagaaaaaggaaactggcacgtcccgaaatttcgatgatgaggcttaggaatagaacgattttatattgggctcattcgaactaatttgtaattttttgtgttcaaactttctaatatctcagctacatttctaaataaataaatttgaaatacttacctgccttaccatcacgaacacttacaaatatttacacttcagtgggtttgaacactttgcgaattcatggcattatcttatggtaagcccctaatatgcaccataaattatcgcgtactcagttcataccacaggatagggcctgcgaattcgcaaagtgcactaacctactgaagcttacacaagtgatacgctatacttgagtccgcatctttcgtttcgcaacgttccttttataggcactcaacaagtaacctctctaaccagacgacaacaaactttcggcggacagcacgcgaaaaaaatctagcatcactctctctttgtttgtggcgagcatgtgacatagagaagacaaataactttcggtggacaaaaaaactttcggtgcgatcccgcagaatggaggcacggagtagcagtgcattgttttccatacctaattttgatcgtctgtcttatttttttaaaaaataaattattaatcacacataatttactattcatgttttatcatctagtaataataaaaatactacttataacgaaaattaaataaaataaaccatctaggttagacattgaaatttatagttgcacttaaaattgttaacgagggagttcagtttacgggagaagggtgtgggaccggcatcacggtgccgcagactggcgctgcatgaccgctcggtcccgcgcctccactctgcgcaatcgagcggcactaattggggaggcgggcccgcaggagcgctatcggttccgcggattggggctgcgggaccgtctcggtcccacacctccggtccgcgcgatcgcctggccagctgactggtcccgctaccaccaccactcagcgcagccacgccgcgggaccgactcggtcccgcacatccattccacgcgaccgagtcggtcccgcacacccgttctgcgcgaccgcattcccgcactgccaatctgcgttgccatctcgttcccgcttccccagtccacggggaaagtatatttgcgcaaatatttgactccaacgtatataaatgcatattactaaaaaagaatatatattcaaatttaattcgataaaccacatgcatacaccagcaggcaggggcggagcccaatgggcctaggggggttcataggcacccggcccaattttcagttttagtaggtaataagttcaccggaggtccctcaacttaacagcgagattttttaaggtcccttaactacaaaaccagaaatgtgtacccttaaacttacacaaactgtgcacacaaggtcctatagcagtatatatgggtggtttcactgatatggtatcctagtcagcaaaaaaaattaaaaaaagtacgtgggacccatctgttagctacacatattttttttcttctccttctcctcttttctctcttctctcttcccttcttcgggccggtggtgggcggaatcggcgagcgcggcagcagagtggcggcaggctgcggacgactggcgagcgtgcggcgggctgcggcgcggagcggatggcgggcgagtgcaacggtggacctccgccattgctgccccttcctccgctcgccgctcatcgcgtgacggcaccaacgcggctggctgcggcgggagggaggtggaccgcgcgcttcttagttgatggcgatgccccggagcttcatgtgtgtacgccgatgggttcgtcgggctccagaccatgtcggtgtaggagagaggatggtgcccgcgtcgaacggcggccgtgcttagcaagaagacatcgaactactacttaaccgatagcttcgaatagagctgggttgggtcggctggctgaccccgccacggccaaggccagcgtcgccggccgctgtaatgatcaaatttgcacaagtctttcattgtcgatctgatcatcatccaccaagctcatgtacccagtttagcaaaagtaagcacaaggcttcacacatgtttcacagcaacttctgccgctgcgacctcctcccatgctgcgcccacgacaggaatggtggtaacgtgagcccagtcaggtcccaaggccgcccaccaacttcctcccgcgcaccacctgcatctcctctgcaattcatccaaccatgcattggagccactgagccagcattcacctccaccttctaatcaccaccgattgactccgcctcgccgttgcgcgatgctgattgcgctttactaggtttggacgcggcggcagctctcccgcagcccagagggtacctccgcacggcggaggcgaggcgcacgagcaccacctcggtagcagcgggtacctagctcgattccggccaccaacccattcccctcgccgcgattgggcccctcggtcgcgaccacgaggaatggctgccttgccagtttgggggatttcgtcaccgcgcgcgccgatgcgttcggaggtggtcggaggaggttggcgcgccgtccgcagcccgccgccgctctgctgccgcgctcgcccactgttgattgttatttcagctatggccccaaggtgatccaggtgatggcagttgcaacggctggatgaataattcagttttgagtttgttatgcatgcacgagagatgtggcgagctgcaggagtagacgaccgcgtcaggcgtgcgttgtgggcgtgagttttgcacggcattgtatccaggagttccggatcgtgggatggcgcgattgtaggcttggattcgttttttcttttattagagtataagtagcagtagctaaaatttccatttgtaagtttatcaattcagttgaatgaaagaacccagaaaattgtcccacaaattccttctctctcgtgattctctgaaactctgaaatactctgcttctctgttctgaatttcttcctgtgttcttcagtttttttttgtctgttgccgtgccggacgtgtgcagtgtgcgcacaaagtgttcgattgggtgattagcagctaacaagtggtatcagagcttctcaggttgagggcggatctggcactatggcgttggttccggcgacggcagacccggcgaggggggagctcaggaagtgctttcctttacccacagctcacgtcaaccaactacactagttgggtaatacgtgtgcaggctatgatggaggatcaaggcgtatgggaagcaatcgagccggcggccggggcggccgtcgacccgaggaaggacaagaaggcaaagtctcatcttctccagtcgctgccggaggatctcttgatgcaggttgcaaagaaatgctcggcaaaggaggtttgggattgcctcaagacgagattcgtcggggcggatcgggtgcgcgatgcgcgcctgcagacactcaagggagagttcaccaacatggtgatggaggccggggagacgctggaccagtacgccggccggatcaccacgatgggggtccggtactctgctctcggcgcgacgttgaatgacgccgccatggtgaagaagctgttcgacactgtcccggagaagttcatcagcctcgtcgcagggatcgagcaattttacgacgtcgacaccatgccgttcgaagaagtggtaggtcgcctcaaggcgtatgaagagcggatgcggaagaagaaggcgaccaccggcggagtgaccgcggacaggcaagttctcctcactcaggccgagtgggaggcgcgcttcaagaaaggcgggggagaaacctcgtcaccatagaagaacaagccctctggtgagggggcgaaccgcggccaggccgggcgtggtcgtggcaggggtcgcggacgcggcgggacgcagagcagcggtggcggctctggtggtggcggcggtggccgcgacaagagccacataaaatgtttcaactgtgaggagtttggccactactccacgcagtgtccacatcccaagaagaagaaggttgaagctcatcttgcgcaaacggaggatgctggcccagctttgttgctcgctgtgacagaggcggtgcagaacgcgccgcgccaggatgcgctctgcgggctggtcgtgcacgaggagcgtgtgtggcctcgcctgatgctggcagagaagggagcagctgctggtgatctgtggtacctggacaatggtgccagcaatcatatgtcaggagatcgtcggaaattccgggaactggacaagaccgtgacggggcaggtcaggttcggcgacgcctcgtcagtgcagataatggggaagggatccatccttttctcatgcaagaacggtgaccagtggttgcttgacgatgtctactacatccccagcctccgctgcaacatggtgagtttggggcagctaactgaaactggccaccgtgtcgtgatggatggagatgacctcgaggtgttcgacaaaaatccttggcgattggtgatgaaggtgcggcgatcctcaaatcggctgtaccgcatcgagctacagctggcgtcaccggtgtgcctgttggctagtctcgatgacccggcgtggctgtggcatgcctgactcggacacgtgaatttccatgcattgaagctattggtggacaaggagatggcggcaggagtgcccgcagtccaccacccaaaccagctgtgtcaagcatgtctggtggcgaaacaagtccggcagccgttcccaggaatggcaaactatcgagcagaggcgccgctcgagctgctccacatggatctgtgtgggccgatcactccatcgacgttcgccggtaatcgatactttatgtttatcgttgatgatttttctcgttggatgtgggtgtttgtgatcaagtcgaaggaccaagcgctcgcggccttcgagaagttcaagccgttggcggagaacacggcaggacgaacgatcaagacactccggacagaccgcggcggcgagttcttgtccggcgagttcgcgcgcgtctgcgatgcagccggcatcgagcgccacctgacggcaccgtattcaccgcagcagaatggcgtcgtggagcgtcgcaataggatggtgatggcaatggcgcggtctctcctcaaggggatgtccgtgcccggcaggatgtggggcgaggcagttcgtcacgccgtattcctcctaaatcggctgccgaccaaggcgatgggaaatcgcactccgttcgaggcatggacggggaagaaacctcacctgggcccctgcgggtgttcgggtgtacggcgcacgcgaaggtgactgcaccgcacttgaagaagctggacgaccggagcaatccggtcgtgtacctgggcgttgaagaagggagcaaggcccatcggctgtttgatccgcgtcgtcggcaaatcattgtaagtcgtgacgttgtttttgatgaaaacacaccttggcagtggagtgttgctgcaggagaggtgacttccactgagttcgaggtagaagaacccgtcggcgcagagcagccggcgccggcagagcaggcaggctcggtaccgtggtaccgggcgccgccggcaggaaggcgagccggcaaggagccagaagtggcagaacagcggggaacacctccggcaagcccggcgaggttctcaccaaccttgcctagcacgcctacactcggctcatcctcaacgcactctgccgaggtgcaggcgtcaccgcgcacggccgacagtgacgacgggccggtgtggtacagaagcttggcggagatcatgattgaagcacctcgggtggacctggtggaggatgatgatgacacagaagcgctgctcgcagagatggaggagccgacatcctatcgtgaagcagccggcgagccggcgtgggtgaacgcaatgaacaaggaactggaggctattgagaagaacaagacgtggtcgctgtgcatgctgccagccggtcacaaggcaatagggctcaagtgggtgttcaagctaaagaaaaacactgccggtgaagtgatcaaacacaaggcgcggctggtggcgaaggggtacttccagcggcaaggtgtggattttgatgaagtgtttgcgccggttgcaaggttggacatggtgcgagctatacttgcagttgcagctgatcgaaggtggcaggtgcatcaccttgacgtcaagtcggcattccttaatggtgatcttgaggaagaagtatatgtctctcagccagaaggttttgttgagaagggaaaggaacatcttgtgtacaaactgagcaaagctctctacgggctgagacaggcgccatgggcgtggaatacacagcttgatcggagcatgaaggagcttggtttcagccggtgtgcacaagaacaagcagtctacactagaggtacagggagtgccgggataattgttggagtatatgttgatgatctgatcgtgacaggagaaagcccaagcgagatcactgcattcaaacaacagatgatgggggagtttgagatgagtgatcttggactgctcacctattacttgggaattgaagtgttgcaaggcactgacgggatcgccatcaagcaggttgcttatgcaaggaagattctgacccagtttaggatgctagattgcaattctacctcaattcctattgaacatcgttcacagttgcacaaagatgctcaaggaagcacagttgatcccacggagtacaggcgagtgataggttgtcttcgttacttgttgcatactcggccggatttgtcctacacagtaggcgtggtgagcagattcatggaacgaccgacagtgatgcatttcaaggcggtgaagcaaattctcagatatctcaaggggacaatcaactgtggactcatgttttctggaggcaatggtgcagtggagattactggtttcacagattgtgatctggccggcgacagtgatgatcgtcggagtactagcggcatggcgttttacttcaacggcagtttggtctcatggagttcacaaaagcagaaaacagtggcactttcgtcctgtgaggctgagttcatggcagccactgcagcagcgtgtcacgctttgtggctgaggggattgttgattgagatgattggtgcagaagccaggccggtgaagctgtatgttgataacaaatcagcaattgcactcatgaagaaccctgtgtttcatgggagaagtaagcacatcgatacccggtatcattttattcgtgagtgtgttgaaagtgggaagattcagattgaattcgtccggactgaggagcagcgggcggatgcgttaacaaaagggttgccagcagcgagattggcgacagcacgacacctgctaggtgttcgtgattttgggccgtagcagaattaagggggagtttgttgactgttatttcagctatggccccaaggtgatccaggcgatggcagttgcaacggctggatgaataattcagttttgagtttgttatgcatgcacgagagatgtggcgagctgcaggagtagacgaccgcgtcaggcgtgcgttgtgggcgtgagttttgcacgacattggatccaggagttccggatcgtgggatggcgcgattgtaggcttggattcgttttttctgttattagagtataagtagccgtagctaaaatttccatttgtaagtttttcaattcagttgaatgaaagaacccagaaaattgtcccacaaattccttctctctcgtgattctctgaaactctgaaatactctgcttctctgttctgaatttcttcctgtgttcttcagtttttttttgtctgttgccgtgccggacgtgtgcagtgtgcgcacaaagtgttcgatcgggtgattagcagctaacacccactgccgcgctcgcggatccggcccgccgccggcccgaagaacggaagaaggaaagaaagaagagagaaaaagaggaggagaagaaaaaatatgtgtagctgacaagtgggccccatgtacttttttaatttattttgctgactaggatgccaagtcagcaaaaacacccatatatactgccataggaacttatgtgtacggtttgtgtaagtttaaggatacacatttctgattttgtggttaaaggatcttaaaaaatctcgctgttaagttgagggacctcctataaacttattccttttagtagttacccctcattttcacctggaaaaagtacactcaaagtcccttaacttgtcatcgagttacaaaatcgtcctccaaccgcaaaatcagatatccgacgtcccttaactaatcaaaactggtcacaatagatcattcggtggttttgataccggttttgtcctacgtgacagctgagtcagcgtgggacccatgtgggccccacctgtcagcatgccacgtgtatagatggccttttggcccgcccggcacggcccggcccaggcacggcccaccagacatcgggccggcacggcctgattggcacttcgtgccgggccgtgccggcccatgggctacgcctcccgcccaggcacggcccaccagccgtcgggccgtgccgggccggcccgaaggcgcgggtggtccatcgtgcctttttatataagtctatattccatccctcctctttgggccgtgaaatatatatagcgaaaataagtctattttccgtccctcttctttgggctgtggcatatatatagtgaaaataagtctattttctgtccctcctctttgggttgacatatatatagctaaaataagcctattttacgtccctattctttcgaccatggcatataatatgtctatttttactccctgttgtttatgtgtcgggcctagcctgaggcccatcgtgccgtgccggcccggccgtgcccaacccctgcgggcggtgccgtgcttgggccgggccaaannacgccgtnngccaatgggccgggccnnatcgggccctcgggcccttttggccatctatagccacgtgagcaccctttcttttcccctcttcacctatagttggccataaggcccgaggcccgaaggcccggcccacggcacgccttttggcccggcccaagcacggcacggcccgacttgggtcgggcccgtgctggcccggcccgaccgtcgggccgtgcctgggcctccccaccggcacgctgggctggcccggcacggtcgggccggcccggcacgatgggccggcaggccaggcccggtacataaagtatagggactaaaaatagacatataaatgtaactgtctaaagaatagggaccttaaatagacttattttagctatttatataccccagcccaaagaagagggaggtaaaatagactttttgtagctgtacatatgtcacagcccaataggagggaggaaatttagacttattctgaggaaaagcacgacggcccatcgtgccttcgggccggcccggcacggcccgaggcgtgttgggccgtgcctggg

SEQ ID NO: 4483 - DNA, 25780 bp, Oryza sativa
cccgcggccttcctcccagccgccgacgggctggccaaaacaagagtgagagagagagaggggaggaggagggagggagaaaaggggaaaagagagggtgctcacgtggcatgctgacaggtggggtcagcccacgctgactccgccgccacataagacaaaaccggtatcaaaactaccgaaagatctattgtgaccggttttgattagttaagggacgtcggatatctggttttgcggttggaggacgattttgtaagtcgatgacaagttgagggaccttcggtgcactttttccttttcacctcataggaaccccctcagcccaagagtgtgcaccaccctgacccatgagcgagcaagcaacggcccatttgcaacgccaggagacgccccccacgcccaggagcgatgcgccgacgcctcgagtatcacagccgcgcctcgtctccttttttttttttttcttttcccccaccgcgagtccaccgataccgcgtcgtctgttcgtcttcgtcatccgtcgcaccagcaggctgcagtctgcatcgctggcccgcgggctcgtcgagtcgccgtcctgccgctggtcgccctagccggccgccggtagtaaagcagcagtagctgccagctgaacgcctggactaggactacagaggcaaagggcgcagaacagtagggcaaccgagcagtgcacaggcaaactgaagagaggtattcatctaatgatctaattatctctctctaattctcttgattagtttcagattttcaatttatactcctctcttctcttctagttcactcttctttttaatccaattagtttgatttgtaacttgattctactttttcaattatccagatttatataagctagggttcaaagtttgaagaactgaaaggaagtttccattaaacatctctgcttgaagggactcctgttgtccttcatccattagtccatcagaccatcattagtaaaattgtaagcacactgtgacactttaagatggatggaaaattaagatgtcttcatcggatataaatttttagttcaaaattaaaatgtttctgacttttgttctagatttattgtgggctattaactatcgatgatgttgagattaacagctttgagcccgaggatgaattttgcatagattaatcgtcttctatgtattttttgatgttccatttcgcggtttcttttcgtcttatatttcggtaagcacttttgcttgctactcaatgattttgtctcaatagttatccataaatgaacgaatagcattatttatagtaattgccgctctctatatagcaaagtagtgcaccacccttaggtggtgtttagatccagggacttaactttagtccctgtctttagacactaatttagagtattaaatatagactacttacaaaactaattacataaataaaagctaattcacgagacaaattttttaagcctaattaatctataattagagaatgtttactgtagcatcacataggctaatcatggattaattaggctcattagattcgtctcgcaaattagtccaagattatggatgggttttattaatagtctacgtttaatatttataattaattttcaaacatccgatgtgatagggacttagaagttttagtcccatctaaacagggccactgccagcaggcacgagcagtagcggtagctaacgctacaacgagtacctggcaacaaaatagatgaaaccggatcgccccatgcctgtgcgaacatccgccaatcccctcgaataaaggaaaatatttggagcagaacaatgcatgaaccggtacgaatggaaagtaaacctgaccatttcaataagcagttaagtacacaccatgcctgtcaatgactgcccacaagagctattaattaagactatcgctgaagaaataatcggaggtagaactgggggtgtgtgtcggcactgatccccaccttcccatacatgacgctgaacgtagctggaatcggacgtgctcggtcgctgtttctgctgctgcttgcatcccacaaatcctggaaggaaaacagaagcagatcaacataatggctcataacgtcacagaaattcctcaacaaaaccatcgtctttgccctgtcctgcaggaacccaccctgaaaaggccgtccagctccaccggcaacacgaccgtgtgtactgttctagcaccgccagcccagagataccggtgactcctccatggccgagctcaaacaaggagggaatgcacaacattcatcagcacaaacggtggaagaacagaaagaaactgccgtttacctctggcacacagacatggaaggatatgcgggcgtcggcggcagcaaggtcggcgaacggtggctcccatccaaggaagaagcaatcgtcgccgcagccacttcaacgaccgctaccgacatcccagctagatagcaccacattacaaaacaaagagataagtatgcttgtcacattttgacaaataacagattgatcagggaacttcctgctacctaaccaaccaaccttcacttatctgacattctgaactgataatcgtggagcacaacaaaccaaatcaaggcaagccgcactgccactgccacattctggaatcgctggatgaacaggtgaatgtatagaaataggtggcaattagggccagtcacaaagttaaaaaagaaagccattcactcaccgtccatccagacaagatacttcatggagtcaccggccgctgttggtgtgaggaccacccgcagccatggtcaacaaatgcacacgccctcgaaaccctcatagagtccaacccaaccctgcataattgaaggcagcacaacaacccaccaatgtccatcttggtgaagaagatgaagttgatggcgtccgcctgtgccagcaaccgcatcagcgtgtagtcgctgttccgcctaaacaaaaatcaccagaaatctccgtagagaggaagaagctaactcacatatcgttggcaaggttgaccctggtgttggcgaagaagccgcagcctgggctgtcatcgagggtagcggatttgagaatgaactcgtaacacaccaagcttctccacctccaaatcacgttgtgatcgagggcggcggccggtggcgtggatctgctgcaggggagggcagcgacggttgtggccgatggacgtcttgcggcatggatctgctgcgtgggagggcggcggcggcgcggtggcggcgcgtcggccgacgatggcaaggggagggatgacgtcgacggagtcgggcggcgcgaggggtcggctgttaggggaatcgatgacccacgatggtgaggggagggacgaagtcggcgtcggctgcagccaccacaggtgctcgaacagcaacgcgtccacggcgaacgccaccgcgggtccgccgcccggccgccgcgaggaggcgccgcaccggcccggcctcgagcacggccaggtcgacgggggaacaagttcctctctcccttcgtcgtccccacctccaccctgaccacatgcgccgccgcggacgcggaggcggaggagtcgaggcgccagtgcccgccgcggcgagacgcggagcggaggaaggtgtagcagccggcggaggacggacgcggcgacggggcctcctcctcctcctcgccgtcgccatcggcgggcgcagcggcgtggctcccgatgccaggatctgggccgtcagctctttgcgccgcctgtggcgtggtcgtcggagctacgacctcgtcgctgatgaaggctgcgcccgccttcaccgttgctcggcggagacggctgcgctcggcgacggcgcgaggcggaggcggacgagctccgacctccgagacggcgatgcgacggcggtggcggaggaggtggaggaggcggcggtggcacgatggcgacggcggagggagagggtgagacgaaggggaggaggggagaatgacaggaattttttttacaaataatacgattttaatggagcaaaaatattggtcggttaaatgaaatcgcaagtctagcacctatagaacagccgttgttcgcctatcgataggtacttgttgaactgccagttcgacgagtgataaaatatcttaaaaaaaaaagaaaaacactgtagtgacactgtaacagcgcagcctatcaaactttgcccgtttaataaatctggactattcgatatgtccatgtgggggcactgtagcaaagtactatttttttttcttagaccaactaccctgtggtacctgttgaatttgttcgataggtacccctaaacgtaaaattttgcctatatttttgcgatttttcattaaatcgtattatttgtaaaaaaaaagctagggctggggtgggtgggttagtgtgagtcatttttcgaaaaagcccctcttcttttaatttttacaacacagtcctaattcacgatttttcttttctttgcacggaatatctgggcctccatgaaaataaacacctcataggcacggttctcaagggaccttgatcgaattacccggaaatcaaagggttttttcacaaaaataccaccccatgcactgttcatactgtatcaaaatcctgacgtgacacacctcctcgcccgcccaacctgcgccccttcaggctatgttcggttactagggatttaatccccaaggagaatcaatccagggaggaattaagtgaatccctctcatatcacttaatccctgttggggatgaatcccttgcttttcctaatccctctctagaaaccctgtgtttggttttggctgggattttggctagaaaaatctaaaaactgctgaccaacgtgaatatatgaatgctgatgctcaataataaccgaatactccctccgccccaaagaaaattccaatcctgggtttgaacctggacaccctccgtccaaaaaaacccaatcctgggtttgaacctatctaggaaaaaaaaacccaatcctgataggttcaaacacaagattgggttttttttgggacggagggtgtacatattagtccattgtcaataaactgaaaaacagttatgactgaaagtatgaaccaatgaaaatggaaacatcacaaattaaacaagtccaagatgagtggagagctgacgagcagcaggagacgacctgacaaattaaataaattaaacaagtctgaacatttgttctattcaaaggttgcatcaacaatatacatattcaaaggttcagggatcaacatttgctgatgccgcaaaaaagcagtatccttgcagacttccttcttcccaaagcctgcagagaaaaaagttccctttagtttctgactgaaactgcataatttaaggaacacttctgtgcaatgagcaattgtttcgaattggtggttgtgatctcaatctatgatgtagaaaagagaaatttttatgtgcatttttcataattttggctgtgtttagttcacgccaaaattagaaatttggttgaaattggaacgatgtgacggaaaagttgaaagtttgtgtgtgtagaaaagttttgatgtgatagaaaagtttgaagtttgaagaaaaactttgaaactaaacacggcctttaactaccaaaaatgaaatttaaaataatggacggccctctgtaggttgttgcttgctgcttgcacatctcaaccaagaatctatctttcagcaaaatataacaggtgtgtgtgattgatgataaaaaatcagaaaaaaatatacttgcttaattgctgatggccaagaacattgatgcatatatcaaatcaatactatactattgaaaagttcacatgtaggaaatagaataacattaagacaaaaaaatgacataggaaatatttgctgactgtaagttggatggctaacaaaaataaaacagtgacttgccttttcttttcctgctcctaaagttctaatacaagagcatgcatatgaataggacaatatcaagtacttctgaattgggggaaagaatcatatgtgcctgtaatcgtcctcctaactagtatatcaagaaacaatgagagtacatatggatatggagcgtgcacatatataggtctaaaaaccagtaatagttagagcagtatatagtactactaaagtttccagttcatatagttgtaccaattttaaagcaaattactagcaggtcaattagggctgtgtttagttcctgaaattggggagaagtttggggaaagttggtagtttggaaaaaaagttaggagtttatgtgtgtaggaaagttttggatgtgatgtgatgttatggaaagttgggagttgagaggaagtttgagtggaactaaacacggtctatatgagcatatggttggctcctagattacctgtacatgtacaaagaaatttttatgtgcattttttatattgcgtggcttttcaaattctgacactagcaataatataagttctgtaggagtctagagaaatcaaatgcaagggtctaacataatatcagtgcacacattttgcatatattatcttaataaaaaaaacatcaggacttcctcccattccccacaaagtcagcaatgcattgcatttcctttatttcaccccatacgcagcaacaatagatctagcattcctgaagatgaactatagaaaaataaccaaggaaagtactataataaaacaaataatgcatattccatttatattataaattgaagtaatatggtaattagtccaagggaccttcatttgtggtttttaccaaagaaaaaagcattggaagtattattggtgatttgtcaatagagttttatggcacacaaaataatcattggtgattcatcaaaatagaagaacatatgcacaatagagttctactgagccgtcacagaatcacctccctaataacaacatcagcatgctgagaaacatacaagtagaaatggtgattcttgaagattggaaccaactatactagttgacattaaagagaatctgtggattcctgattcatacgcataacaagcagaattaagcagcgaaagatgaaaaggaattttgcgaaaaaacaaaaaagaacaggcatcagccgcggagttcgaggggacggcggatatgacggcgacctccaagacggcgaggacggcgacggaggcggcgacagaatcctaggtaggagacggtccggtgagaaccaagaaccctaggcttcaagaaccaagatccaaagttccaaaccctaggtagtacagggagaagagaggggaatgaagagatactcaccggtgggaaggtggccagcggaggggagagcgccgccgccggggagagcgcagtgttgccgtcgcgccgtcacgcggttgacactcgcactcgcgcttgcgtcgccgccgctgccttctcgtctcctccatgcgagatgtatttttccacgcctccacagtagatgattttttcccgggcctggacaatagggaaccccgtgatgggccggattaaaatcagcgacagggcttaaccgaacgcaattttttgcctgggccgggattattttcacaccgggatgacccccgtgggttgggccacattcccggccaaccccgggctaaccgaacaggcccttatatattacccggaaatcgaagggtttttttcacaaaaaataccaccccgcgcaccgtgcatactatagcaaaattctgacgtggcacacctcctcgcccgcccaacccgcgcccctttatatattccgatgggagaaggcaggtggcgtagaaacgattccctgactcgagccgagcgccacgccgtctcgtctccatgatgcgtagcagagcggtgcctcgtcgtcaacttgccggtccagcggagggagtagccacaacctcaactcaatgtcattccccaattaaatttgaaaatatactgttcatttaattttttctcagaaatattcgtgattcaaaagtttttgtggaaatataccgtcgatatcgcataacctttgtgcaaaaatgatgtggacatgacgtcacggacggtatcacgtgataaaagtgcgagaccgcgcggtctcacgtagcaacggtgcgagaccgcgcggtatcgcggaatgaaagggcgacaccattcagtctcgctagagcaaagagcgataccgctgccgtgatgatttaattagtgattataattaattgctaatcaggataattaattactaattattattagttaatttttatttgagtaattaattacaaatcaagtggagatattgcacggtgtcgctgtttggtttcgcgagagcgttcgctctccctctttcattctgcgagaccgcgctttcaccgcgcgataccgatatcgacggtatattttcacaaaaacttttaaatcacgaatatttctaagaaaaaattgaatgatcagtgtattttcaaatttaattcggtcattccctgatctgaggcggcgagctcgatggtttggcggagggtgttcatggaggagggtgttgacagagccctagcctgcactgccacggcggggcgggaggcaggtgcagctgtcctgtccgaggcggagatccggcagctctacgtcgaggtcaagcgggtgctcctatcgcagcccaagtgcacaacctcctgcgcatccacgcccccgtcaagatctgcggtgagcgacacccctcccctctctagctgagcgccttgccctgatccgcgagggttttgcgtatttcggggtggaattgcacgattcctattgccgatgttgggtttgttttttcggtttttgcgtctgagctgccgcgttcagggggtgattaagggcaaatgctgggtacctgcctctctggttcgctagcaaatttgctgtcctcctacgaaggctagtacaagtatttttattcatcaaaagtaaatttgaaggaaataacctgctgaattgatgcactatatgagtatatattttgagatgcaaacaagatttgggaattgcattttatgtacaataagttgttcgagcgagtccaatctttgtgtgatgttctgtgttacatcactctttggagtgttatatcgttgttcttcagattaaggcggaagtagtctgacatgaggttcctttttccttaaatttaatttgctcactgccacttagctatccaaggtgaagaatgaaatgcaaaattaccgaatgaaagcaatttgtgcttgcttgcatagtgtggatatggcccaagctctttggactgttgtcctggaaaattaattaattaccaatcttaagggattaggttaaatgcctccttacataaagggtaatggttactgtttgtggctttttaagttccacatattatttagatgttctatagttcaggacctttaggtgttttttttagactggtcaccggggggggggggggggagagcttccccacctgaattttcattaaaagggaggaacagtacagtagcttaagttacattagagtgaggggggatgataagataagtttccaagactctacaacagccctgtcagcgtggctcaatctttcagcccacaaggttgcatcctctttacattttgcgataagacaatcaattgaaggtgatgcacccctaaaaactacatcatgtcgatggttccagagtccccagagacaaaggaagaagaaaactttgaagtgttttgcaggcagaggaccttcaggtgttagagtaatgggatgaaagtttagggtgactcggattaatttttcctctactagagcacactttctaagatagttccacgctgcatcctttattttcatttttcatgcaacccagtttaacagccaatttaagaaaagtcgtaaagttaatttggtttcaaaatgttctgtacaaaacttttttaacagtaattaatgtagtcttgctcacaaccaaaagctatgttagcccactttgaggcacaatttgtacccctcgccttaattttaaatgctgagtttcattctagacaaatgaagttgcataaacactcatcgagtcatggattgtcatagtttacatctttgagatttggcaatagcttgtgtagctcaatcagtaatgttgtaccatagcgatggtgaatacaaatgttaaattggaaaaactgaccctctgacaatatacgacatctaattagctatgtttccatctacgcagttcctttagatatttagtaagtttattatgttctcagctgttctgttctgatattccatatcgtttgctttgaagacttcactcaagtgatctggaattatgcatgcttacatatggttgaattcactgtgtttttggacactggcaccctgttttgatgcgttgcaacggatcccaactaaagatacaaataagtctaaaatgtaaaatgcattaattaattagatatcctcaaatatgtgcttgtatacatgattatatgaggtgtctaagcaaccacttttcctcgctcacctgggccatctcgtctatgatgttgcctctttttctctgcccttcatccccagcagctatagagcgagctcaagccgctgtagttgcaagctcccgagggaggagatgctaggagccggcctcaagggaatcgttattgccgctgcttcctcacggtttgcattgtcttgcatgcacatctttgttgccacagaaaaaaaaggtcatgttacatgacattgtttctgtgtttacaacaggtgggagaagaggatttgaggaagaaaaaataattacatttcttatcggtcatagttttgtagaggaaaatagaaaacacgtactttgggcaatctattgtggacgatagtaaagggagagtttctcttacagtcttactagactaaacagtttccaatttactacttcctccatttcaggttataagacttcctagcattgctcatattcatatagatgttaatgaatctaggcacacatatatgtctagatgcattaacatatatatgaatatgagcaatgctagaaagtcttataatatgaaacggaggtagtattattattcagcaatataaactgacaataacttgggtttactttcaagtaaaaaaatcttgtgctcaatgtatctgaaattttcatcttttatcttatttgacagttcaacatctggtgggatactcgatagagctatagatgcagaaaataggaaacatggtggattctttagattggtaattaccataggctgtagtacaatagaacttactttaactggtagagtacagtattaatggtctgttatttgtctgtaacagcgaaatatcttggaatatctgtcgattgctcaggatcatgttgaaagaatatctggagttggttgcaaagacaatcattttttgtgaaatccttgtccaggttggctgcagagtgctacattaaagtggatgttgatctacatgtaaatataggtgtacgaactactgccctatgatctaacatcatcttccttctttaagtcttaattctttcctgcttaaatttgacctattcagacatttcatttgtattaaatttcttctaagtatttgatgcaaactatacattctaagttcatgaaatctcatatatacatagtcttcagagatgttgcttctgaagctaaagctgaaaacttaggctgtaaaattttacctcaactttagcgacactgtactaataatattgcaaatattgcagcaactcttggaaacatgctaagcattggtcgaaacctcgagcttacattggctgcatgaaatctggtccagtcctggctcagaagtaagttcccctgtttttgtcatgccttggctgatattttaaactgctgaccaaatgctagatcgtttttcattctcggggtgtaagatactatcctgagcctgagtattggcaatttggtgaatggggggaacaaatactttaggcatgcaaccgttcagttctatgcaatctccaaggatctggtttcttacatatcaatcaaccagtaagcaatttcttcagacacggtttctgtttatctacatcataaatttgttttttatctaattcttacccatcattaggagcctggttcaatggcctagatgtctagcacattgatgattgcgactacacaaccaggtatagataaatccttcccatcttttaaactgatttccttcctcttacatatccctatttggagtactgggactgaatacagcttggttgatctgtattgaatcatttggtgaaacagttcagtttttcaaaaacgtatacttaacttattacttcctccgtttcatattataagactttctagcattgctcacattcatatatatatgttaatgaatctagacactaacatctatatgaatgtggacaatactagaaagtcttataacctgaaacggagggagtacctatgtattattagcttattactgcaatgcataactcatgtatttcagcattgcatttctccttgcttttcaccaaataatgtatagttttcccttgaactgtgtagtttccccttcaagtcttgaatttgaaaagaatctatacttctatactaatataaaaaggaggagttgtacccctccaatcctacaggtgaaatcatcccctctaatctcatccgtctatccaccatctgatctaatctcatccgtccactatcctctacgccatttatgagcgattccaccgattcctctgcctcgcgatgactcggtcgcataaatccccgccgcgctgactcctccccgcgaatccccgccgccctcctcgctcctactcgattcgcgcgcatcctccctcctcgtgacaggccaacgaagccgcacagccggagacgagatcttccccatccgccatcgccgctgcagtccaccgctgcccccgaggtcgtcccttcccccgccgccaccgatttctccacccatccgctgcgaccaccgccctgccgatcgcgcccccatcactgtttcgcctgtatcttgccatccaccgctcctacagccatctccaccgcgccgccagttcctcatgcttgttgctgagtccgagacgatccggttggttccgccgtcgaggttgccgccaccagggaagcccagccgatccggcatctgctccatctgctgccccctccctgttctctgctcctgaaaccgtcagacatcaaccaccggccaaccagccctattccccctaaaccctaaggtaataccaatttctcctattttacatgtttttgtgatgtgtcaatttgtggatcaccatttgttttcttgatcattcacaattgccaatcagaaattggccatagagtttgaagattttaacatattgtctcctccttgcgtgatcatatatgtcttggatcaggagaagctcttccaggaattaggtagccaaagtcgattaataggctagccttaaggatggcagctttggaaggcgtctatccatattcttagttgatcctgtgcagcccctatcaatggatttgcatccattctttcttctgaactttacaaaggaaaattttgtctggttctattattattatttctttgtttggaggtaatgtgatgttttcagatcactggaggctctaaattttgcttgtaatacagatgattaccactaatcactgtgaagccatcctattgttcttgttagtagttattgagaaatatataacatttgtcttgatccctggagaatacccaacttcttgaagagaaaaaccatatatataggagaatctaatcctaaactaatcttttgctctactacttttcaggccgtatatgcatatcttgggagtaatagatgttccatgtgtcaatgcatcaactaaaatacctgatgaacatgtatacgattcttaggaaattacatctgcaacaaccaacttcaatttttttttctcagcatctcagggcattattttcatcaagatttttggcctacgctaatgaccgatgttgtgaccttaggtcacgaacaagatcggggataggccggaaagaagtgttttcccgcctatccttagaaacgagctcgaacagcaaacacaacttttgaggattacttttgtattaaagatgtcttgtcctgctacaggtttttgactggcttttataaccggtggtcgtacacgtgagattacatttttacccctgtgggtctttgtaagtttactctaatgcccctgccacatcagcgtctgtgggggcattctagtacatctccaggggtcttttagtcttttaggtgctagctggcgagagtggttgaaggtggaccccacggaatcttcccttggcatcttctcttgttcgaggagtgctcttcctcgaactcttgggaaaaatgcattttccgtcctggaccgtcttcttcctcctgggaattcgaattcccctttgccttctctttcatccttggaaaccacctgtgaaattgtaacttgtccaaaatatgtgtagttgcattagcgattatggaatgtccctaaaaaaggtgttcttcacccgaagaggtattttctattcgaatgagtgttcttcctctgggaaggtattttccttttgggaaaggtgttcttcctcttggaaaggtagtttccactcaaaatgagtgttttcccctctggatacttaggtcttgcaaaacctcgtagtgttttgaccaaattggaggaaaaggtgtttgtaccctgctacaacaagcccctcacgggtaagggcgatgtgtgttttcggccgaaaccgtgcttgagtttatggaaaaagggggaaaaccgccgtcctcctattcggtcgaaacacactattcaaatatgcatatatgccacgtttactattcattatttttatttttattcttattatttttcatttttatttatttatttattattttttaaatgttttttatgccacgtgccggtatttcattggtgcgcttaaggggtcgcgtcgcttcgggtttcgtgtccgctcgtaaacccgcgacccttaccaccctgcgctatataaggccaggaggggtcgctatcacgcgacctacgccaccactcgttttttctgccatcaactcgaaatcacaaaagactcgaactaaatctctttcttccttcttccattcgagttttggtgctttgcttgatttcttcctttctcactacacaacatggggaaaaacaagaaaactgcggaaaagtcgaagtccaagaaatcaaaaaaccacgaaaatacttcttgtggtattggtgcctcttcgattaaggacaaaaacttaaacgatcttgttgatgttggttggatatctggtcgaaacgttgtaatttgaccagtgggagaatcaaggccttctcccaagctgggatacactcttgtgtttgaggatttcttctacgccgggtttaaattcccgtgcagcacttttttggtcgaggtcctgaaattgttcaaacttgagtttcctcaattgactccgaatgctttagttcgaattgggcttttcgaatggatggttcgaagctgcggtgagaccccccaagctgaagactttgcatacttccattgtactcggcactacaccaaacagaactcgaagtttgggtgtgtaaactttgctcctcatccgaagcgcggaagtccatggccagctatgtctgctattcgagcaaaatgggggaacaagtggcagtcgaagtggttttatcatcaaatccctgttagcctgctgaatgataaggattgtcctttttcgttctctgggaagaaaccaaaagctgtctccgagccatcagtctctttgtcgccggagttcactgccatacaacctcgaatcgaagaacttgtttcgaactttagctgccgagacctggtggaagagtttgttcttctcaaaattagacctctttcgagcggctgggatatcactcttggagaaatcccagaagattgcccttccagtcttcctccatttgtggtttcgtctgatcgtaagtttccttttcgaacttgatttttttttgcgaaccttgtttttcttgaaaaagtgatttagttaagaagatttattttctccctttgttatcttcttccttgtagttgtgattccagaggatatggtccgcccagttcggaaatttcttggcccttataccaaggatgagcatttgaaatttttgacacttcaaaacgggaaaaggcaaaatcgggtctttgcctctctaggctccgatatccctgtccgggtttatcctgaaattgtccccaaactaaagaaaaagaaatctgtgaagccttcttcttctgatgatgatgatgatgttgaagtggaagatgttgacgaagaaattggtgaagaaaatgctgaagaagaagaagaagaggaaggagctgatgaagaagagaacgactcgagtgatgatagcgactcgagtaacagttcgagcgacaactcgagcgactcgtctgaatctgatgatagcaaaacagttcctcctcctactgttttagctgatttgaaaaggaagaaaactgccagcagtcctccgcctgaaccgagttctaaacgagtgcagtttgttattgacagtgatgaagagttggatgaagatgatatccgtattgatctttctgccatccatgtcaccccaattcaagctgatgctagttttgccctttcggcaaaagaagtagcttcactgtatgttgttgccccagccaacacggttgtcgatgaagattgttcgacccaagtgggtgatactgttgagacaacaaactctcttcgagctgatagagacttggttgcaaaaaaggcaaaaacgcccgtcaatgcggccgaaaagtccgaagcagggaagagtgctgctgatggaggtgttcgaactacaggtagttcgaacccaactccacctccgtcaccgccgttcatcgcaaccccttccccagagctgatacaaaacgttcttggtggttttagcgaacgatgtgcaaaagatggacattggcttatgggtcttcctaatttcaatgaactcggggaaagtagccatcatggcccaaacttgtgtttgaatgacctaaagtatcgccaccccctgagttcgattggtgatgaactcgagaatgttctgattactcctgatcttgaaaaggagtttttggaagaaaatgatcttatgtcctcttgggcagcacttgatgtatctgctgcacaggtatttttatttttattttttttattatttatttatttttattatattatattatatttttttttgacttaaaacctattttctgatgcgcagactgcgagccttgctcgtcttcaacgtggtgttgctcggaaagctcttcgagctatttgcacgcgacggaagaaatcacttgatcgcatcgctaaactcgaaaaggatcgggattatcttcgctgcaaacttgatcgaatggccgacgagaagaaaattaccaccgatctcgtgcgcaagttaagcggcgaaaagaaagagctttccgaggaaaagaagttgcttactgaggaaaagaagaaattactcgctcgtgaaaaagcattcgagcgaaaaatcatcgagtatcaagacgtcgcacgacaacgcgctgaatcagaagacaagatgaaggagcaagttgaggtcttggagaagaagaataaagaactcgaactcgcctgcaaaaatcaaagcgagaagatatctgctttagagctcgagaacgaaagttgccgccaacttcttctgaaaagttgcgagaccgttcgaatcgcgttgcgaagtctaggggctgacatcagcttgctatcggaagaaaatactttagcagctgtgggaaaatggttcgaggaattttccattgggctaaaagatagcgttactccctttgcatctcgctgctcgaaaactgctgtggagagcctttcggcctgtctgctttcaaatgggtgtgaacactttaccacccttaaagctgatatacaaggtatgcttaatgatgaggccaaatttgcacagcttcgagatgcagctcaacccgtcgtaaaggctttccaagtgctttactggaagaagaaaggatatgaagataccctgaggtctctccgagcatctcttgcctcaagatcaaagtcacagccggccagttcgagccaacaagataaagacagtagtactccgaggtcgagcgcacaggtgtgacgttcgtgaaaagaatagttaaggatgcttcgtatgttcgaaaacaatgctattttgctgcttcaaaaccgttatggttgagagcctttattgtaaaaatttatagtgtagctgactataatgcttttctcttattgcatgcttttcacggaaattccctttctttggggggctgcaggttaactcgaatcgaaaacttgtgattcgacgcaacaacactttgcctactcgaaatgtgaagcacttagcatttcgagaccctgcaaagctttcttctagcaggaccgccatctccgatgacgaactcgaagcctattatgataatacttgtatatttgcttttaagtttttccgatggcaacgaagccatcgacatgacagtttacgtgactttgtacttgagtttagggaacggcgttcgaacaataatcttgctagtaaagccttttggcaaaacttccaaccatccgaacgccaacgtagaatatggaaaaggcgttattcaatagttccatatacagaatgccttctcctctcaacattgtttatcccgactcttttctctcttctttgtagagtttgtatgtaacttgttataccttcttaacatcaaataaacccttcctttcttcttttctttataaatgctctttatttcaattgttcaagcacccttaggtctgtcttcggagtaaagcgaaaaaaaaactacgtcctccttatctttggaagaagttacgaaatcgaaacgtactttatctcgtcacgtgcattttccgtcttttgagctcgagcgaggggaaaatagagttcgagcattctttagttggttttttggactaaggcaaaatagttcgaaaaccgccgtcctcctcacctttcgaaggagtgatgaggtcgaaacgtattttacctcgtcatgcggattttccgctttttgagctcgaacgagaatagagttcgagcattcctgagctggttttaggactaaggcaaaatagttcgaaaaccgccatcctcctcacctttcgaaggagtgacgaggtcggaacgtgttttacctcgtcacgcggattttccgctttttgagctcgaacgagaatagagttcgagcattcctgagctggttttaggactaaggcaaaatagttcgaaaaccgccgtcctcctcacctttcgaaggagtgatgaggtcgaaacgtgttttacctcgtcacgcggattttccgctttttaagtaatcgagctgtattcttcctccgaaccgtgcgaagttatgagttttctttgattgagtaatcaaggtgtatttgactcggagcgtgcggagttcaaatttatcgactttgctagtcgagagtatttgactccgagcgcgcggacttctattttgtcgactttgttagtcgaatgtatttgactccgagcgtgcggagttctattttgtcgactttgctagtcgagagtatttgactccgagcgtgcggagttctattttgtcgactttgttagtcgaatgtatttgactccgagcgtgcggagttctattttgtcgactttgctagtcgagagtatttgactccgagcgtgcggagttctattttgtcgactttgttagtcgagagtatttgactccgagcgtgcggagttctattttgtcgactttgttagtcgactccgagcgtgcggagttctattgcaatcatacacagaggcatgttttttatacaggttcgggcctccattatggataaaaaccctacgtcctgtttatatacattaacttggatatcattcgtatttacatctgagtgagtatactacaaactcgagctcccgtgttctcctttttctctttctctctcttttttttcttttttttaggcataaaatttctttaaagaaatagcattccaagtatgctttaactcatcaccatcaagatatgctaacttgaatgctcctgtttctgtcttctttttgactatgaatggtccttcccactttgactcgagttttccaacagctacctcattgagcactttcttcaagactaaatctccttcttcaatcggccttgtctttactttttggttctaatagctctttgttccttctgtgtatgatgccatcttctccaaagcttcaacccttatttcatctagcatttcaagagttatctctcttccttcttcatctttttggtcaaatatcattcttggagaatgtgcccctacttcgcttggagtcattgcttcatcgccataaaccaatctgaaaggggtcatgccagtcgaccttactaccgtagttcttagtgtccaaagcactgatagcaaatcctccggccattttccttttgctgatccttctaacctcttcttgatagcttccatgattttaccatttgccctttccacagctccatttgtctgaggatggcctacagaggcaaagttgatttgcaaattaaggcctttacacatgtcttgaaattttccagattcgaatttctttccattgtcacatactatttgctttgggattccaaatcgacatattatgttcttccaaacaaacttttgtactgctgcagaagttattcttgccactgcttctgcctcaatccatcttgaaaagtattcaattgcaacaatgacaaagcgcaaatctcccttcgctcttggaagaggacctactatatctattccccatctgtaaaaaggccagactggcgggattggttgcagttctttgggtggtgcttttgtcattggaccgaacttctgacatgctttgcacgtcttgatgtatttctctgtatctttcataattgttggccaatagattccttgtcttatgacttttgaagccactgaccgtggtgcttgatgagctccacacaagccttcatgtatttctaccaccatcttcatgccatcttcccttgttacacactttaacaaaggagcagtaactccacttttatacaactgtccctctaccaccttgtattttttggacgttagttgtattctctttgcttcttcttccttttctggaagttgtgcactgacaaggtatttcaagatcggttctctccaatctccttctctctgtatgcatgctacttctttcttttcgtaacttggctgggtgattatatcgaaaaatgaattttccaatggttgacctgttgcggctgccttagctagctcatcagcttctccattttcttcccttgttatggcttttaccgttattcccaagaaatgtttctcattcagccttgcttcttccagatatttagccatagtttcctcctttgcttcaaaggatttggaaaagtgacctgctaccaactttgagtcagttttgactattaaccgccgagcccctagcgctcttgcctttctcatagccaataaaacgccttcatactctgctgtgttgtttgttgaaggaaaagctaattgaacagaatacttcaacgtttgcttcattggtgttttcacaattgcagcggctcctgctccggcggcattgcatgctccatcggagaatactatccatggtttttcgacttcttcctgttgttctacctcattgggagtccattctgccacaaaatctgctagtacttgtgactttatggctgttcttaatatgtatttcaggtcaaaaggtaagagttccattgcccattttgctattctccccgcgacttccttgtttgttaacacttctcctatcgggtatgccgatggtattgttatgtcatgcgacagaaaataatgcctcaactttcttgaagccatcacaattgcataaatcaacttttctacttctgagtatcgtgtttttggtccttgtaatgcttctgagacaaagtataccggcacttgcctattttcttcttcttgtaccaaaactgcgctaactgtcgctggagttgctgccacatacattaacagaggttgaccttttggcggacttgctaatgttggcatttcatgcaagtatttcttcaagtcatcgaaagcttgttggcattcagcagtccactcgaaggtgtttgcccccctcaaagtcttgaagaagggtaatcccttttctgctgatttagatagaaatctactcaaagatgccattcggcctgtcaacctctgcacttctcttgtgttttttggcggctccatttgatggattgctgcgattttgtcaggatttgcctctattcctcttttggacaccaagaaaccaagtaactttcctgctctaacgccaaaaacacacttttctggattaagcttaactgagcattttctcaggttttcaaatatttcttgcaaatctttgccatgggtaaatgcttgtttactctttaccacaatgtcatctacgtatgcctcgacattccgtcctaactgcttagccaaaacttttcctatcagcctggcaaaagtcgctcctacattcttcaaaccaaatggcattctgataaaacaataagttccaaatggtgttataaatgatgtcttttcctcatcctccttcaccataaaaacttggtgatagccagagtatgcgtctaagaaactcattagttcgcatccagctgtggcatctaccaactggtctatccgtggcaaaggaaaatcatcttttgggcatgccttgttgaggtctgtaaagtcaatgcacattctccacttgccatttgccttctttactaacactggatttgccagccattctgggtgcatcacttctcttatgactttcgccttcaacaacttttcaagttcaatttttgcagcttgttgtctgtctgtagacattcttctcaatttttgttttttgggcttgtatcctgacttaatcgctaggttgtgctcaattagacttctatcaactccctgcaactcatctggtgaccatgcaaatacagccatgttttcttttactacctttaagatttcttcctcaacatgtttttccaagttttctcctatcagaatgaactttccagggtcatgttcatccaactgtactttctttgttttcccttcaggaattggcttttgtatttttatgtattctccctgtttttggtcaaccacatgtactcctttcacacttggtgttccttgaagctcatactttcttgctgcaagctgttcttcctcggaccgttattactccccttggtcctgggagcttcatacatatgtagttgtggtgtattatggcctcaaaaatattgattgttgaccttccaagaattgcattgtactgatatggcatatcgaccacatcaaatagtatctcttcttttctcacattagtgccttttccaaagaccacttgtaaagatatttttccaattgcatgtacttgttgtccaccaaaaccttgtaaaggtactcctgcgtttgttaacctatcttctcgtatttgcattttcttgaaagcatcataaaacagcacatccgctgaacttcctccatcgattaacactctttgcacttcgcattgtgctatttccactgagaccactaaaggatcttgatgagggaaaagtattccttctgcatcttcaggcccaaaggaaattaccgtttttgagtatactggtggatttgactgatagcttgtcccgacatgatttacctgtctgacatatgcttttctttgcctttttgactcaactcctaatgaagagcccccagttatggcatttatcactctctttggcacttcttcaattgcctctatcttcataacttgcggtgcttctatggcgttttgtcctcgttgatcacgagctccttcatacttgttctcatatcgatttacgtgtttttccaacaagtgagtcatttgcctgcattcttctgtggaatggcctcccggaccatgtatatgacaaaacttactgtaacattcttctgtggaatgacctcctggtccatgtgtttgacaaaatttggtttggtcaggtttattttctcttccttttcctctttcattgttccaccatcgtcctctacctctgcctgaattccaccattgtcctcgaccttttccagattgcccccaattgtcctcgaccttttccgatcctccccatcaaatccggtggagctcgcacggtcacgtgaccatacgatgacagagccaatcctcccccatcaaatccggtctaatctttctcgatctccaaaggtctaatctttctcgatctccaaaatttgttgatagcttttgatccactcgatctcctctttccgttttctagtcaaaatcgaagcaatcagagataaaaacaacgacgttaaatggtgggcgttggcaataaagaaaaccagaacaacatgaacaggtcgggcaacgacgtagtcctgatagagagaaacaacaacaacgagctttgttgatgaacacgaccagatgagtgcatcaaaacatgtttccggatgagaggattccgttttccttaaatgcgcaggaagaacaaaagatgaagaaaaaacgaataatattgttcattgtcttccctagccaacacaacaaatagaagaggagggaagatgggcaacggtgctccagcgaccaaacgggggtgagtaaggtggtcggacgtgtcccacgatgtggctcgtcatagattgtggtggttggcaacgaagaaaaccagaataatgggaacgtggctaacaacaacatggtaccgatagagagagaaacggcaacggggagttctagtggtgaacatggccggatgagtacgtcaaaacgtgttcccgaatgaggaggttccgtttttcttgaacgcacaagagggtaggaacgcaggggagaggagggatgccaagaagaagagatgtcacgggagagggggagagcgtgccgcaagggatagatgtggggtgccgtgagggagggagggaggcgggagaggaggggcgctagggagaagaaggccgcgggtaggggaagcgtgtggagatcgggacaccgggaggggggagagagagagacgaaaacggatggggagtcgcggtggggggggggggttgacggacgaagggggggagcggaaaccttacgtattttttaattaggtatatatatatggtcaaataggttaaataagcaacggtaagatagagcagaattgtattctgctaggagagtttataaactcaattttcaatctctccatcctccaagatcttttatctggttgtgaaaaaccagatgtgtcatgaagatcaaggtttttgcttgacttttgctcaatgacaggtttaatactcaagatatgctagatcgccggcactgtgctaaggacaatgatgatctttcatgcgtgctttgtcatggagggaaaagagaaacaagattgcacccttttttttttgggtttagggttggcgtcacctgggtattgagat

SEQ ID NO: 4484 - DNA, 39156 bp, Oryza sativa
cccccccccccccccccccggtgagttagtcaaaaaatttatatgggttctgtgatgtgcaatcctagttgcttactgtaagattttatcacgtcttgtgttgtgaggacttcaccttcttgtggtggcttgatgctcttgtgcatgtttctgtaaaagattgttaagtgcttgatgatgatatatgtatatgctccaggccgggtgcttcatcaggcatacttcttggtgccactactctgcctagtgtcatgctttcacggttaattcaactttatagggtcttactagcagatcctaatggacgtgaaggtatccatttttctattttgtcaaatttatcagatccactgctaaatggaaatttccctaaatcttcatcaacatttcaaatcttgtttgacactaagattttcggtgacgcatctggtttactaactacatatgtgttcattgtcagaatatgcataccttgaaatgcagtactgggcagtatctgttagctgccttggcatgttatcattttttgtttggcatctacggcagtctcccagcaatggaaattctatagcttcgaaatacggcttgttgctcatcattttatatcccctggcatacttgttccaccttttactgaagactgatggaggtacatgcatattttatctgcatgcaaacataatctcaccctttctttccaaaatctggtggaagttcatcagaagcaaggaattacaaactaatctaggttgtcttaacaggtctgctggtgatgagtaatttggtgtatttgctgtgtcatggagtggctgctgtgatcttaatccagcatattctagagaagttcccttcatgttcatcttttggtttgtacctgaagtctaagatgtagttagatctttatttttttgtttatatctgactgcatatgtttagactttagagctatccatacgattgctagttatcctaccagttttccatgcaggcatagtgcattatatctacactgttcattttttaaaatttaaattcagctaatttgtgtggttcctattggccgatgcaatgtatatgtctccttttcatcatgacttgaagctattgctttttttaacttatctttacattttctgtgaacttaggggaggccattttggtctcaagtggtcttgttctttactgtggtgatatgctggctcatactctttcaaaggtgtgatttattcctcgaactatgttttaccagcaaaatggtagcaaatctgatacttattttgttgcctgcacatttgcaaccgtgctgctggcagatggagttctccgtatcatcagaagcatttattcgcgcacctggaactcgaagcgagataggcacagttattcaggtagaagctattgcgttctctggcttcagtttcttagtgcataatacccttcccttttttttcttttctgcagggggttttgcttggtctttttcttctccccttgttatacaaaagctcccttcaagttttggcttactgtagaaaactggagagtcaaagaacacaaacagttgaggaatgcacacagaagagaattgactgtggtgtattttatgtttcattgttggtagcactattgttgttagtgccatcatggacgcgtcttattcaaggttttgaagtgcatccatttgtttggtgagcatataagtttgcatttcattggaagggcataaaagcatgcactctgttagtcaaatattgaaaaatttcttcctgtgttgcttctaaaccttgtgcatttttgtacgtattgaattttggttcacttaatggtttatattcacagggtttttaactatattttcaccgattcacgtgaacggcttgctttatgcgcatactggatatttgtgatatatgtatcaattagaaggttctacagtatatcaaaacaaagcaaaacggagaggattcttttgcgcaagtattaccatctcgttgctgtcctaattttctctcctgcagtaatatttcaggtaatatatgttttcgatattcgatccccatcagattgtttgaaacacactctcaataaattgtttctctttgcagcctgatttcttggacttagcatttggtgcagcatttgccgttttcttaatattggagatggttcgagtaagcattttctttatttgtgtccctttcttttcccccctctttctgttttttggcagtttgtatgcccacatgtgctaatttctccgacgaaatgtttcactctgacctcaggtttgggaaatataccctcttgggcatattgtgcatcagttcatgagtgccttcactgatcatcgcgattcggaaattctaattgttaggtaggtctggattaatggtcgttgttttccagattttaactcatttacatgttcagtgcttggataggcctaatactatatttgttttgttcagtcatttctcactcttgctgggatgtgcacttcctaaatggatgtcatcaggattcaatgaccgacctcttacaccatttgctggaattctcagcttgggtattggtgataccatggtaggttctatgtccagtgcgtgatcagttaatattttcttatgttagctgcgttcagtatgatgaattctcttgttttacctaggcatcaatgataggttataagtatggtgtcctaagatggagcaagacaggaagtgagtttaatttccattattatttattccatgattgataattgatctcttatgcacatacttttgaaatgttagagaaaacaattgagggcacagcagcaggcataacttctgtattagcagcctgctcaatcctgctgtcactcttagcttcaagtggatacatactttcacaggttttacttccccccctggcattaaaccatttgaagcttttattctacaatatactaagcaagcataaatcctgaccatctcttttatattaacacagcattggatatcacttttggtagctgtgacattgagcggtttattggaagcatatacagcccaactcgacaacgctttcataccccttgtcttctatagcctcctatgtctataggagcaaccaattgtacatcaaactaccttgaggccctattcttaccattactaatatctagtgactagtgcagtacagtataggtatagcccttcgaattttttttttaaatcctcttattggtcgcattctctgtattcctggaccgagaaattgtgtccattactaaaaagttgagtttaggtttaggaaataaagatgaaaatatgaaaggttgtttagtgaatccttcagtagagagcatctttggtatgatagacttctgagcctatctggaggcatcaatgtatcatggaaggtatgttgtctttcagaaccagaacttcttctgcaggtggtgagacctatttcaccccacaactccacaagcagttgggcaagaatagcaagctgagagtaaagccatatgctgcaaggagcctgaaatacggagacttggttcagaattaatgtatatggtaccttatttccatggacatgcgaagtgtaattagttgtagtagctaatctcctgtaagttttgcgtcatcactgtacggagtaaaagatcactactcagattgcaaccgcgcattgatgtaaattttgttcttgacctgagaaaaaatgaaatcgaagtaagcaaagctgcaaattaatgttctcttattgtgagattggcaggtttgcgatgtttgagttgtttgtgtgatctgtttatctatcaggatacctccacctgccgacttgctgtgtcaagttcagtcagatgatccttgcctaattgtctaattgaacaaaagttcagtcagtagtctttaatatggtattctaagtagtttttttttcaaatcaagctgatgaaaataatccatgtccttaatatggtattctaatgtcagaatgcataggccaaaatgaattcaattatcttaacatgaacttctatgatccaagccccatgtcggttgcgttgagctgtccgcgttggaactcgcaacgcacccatgctccatgttcttgcgcgattgctgtcgtgccgactaattaattacttgcccgcaacgcaacatgacatactgcaactctgctcaagttcacatccggtccatccaaaaagtactgaattttgcatagtttccttcttttccttttctcaccgtgtcaaacaacaccaccttgttacccaaggaaaccccgggagtcatcgtcgcaatcacagaaacttcacagaaaacagtaagtattcaattcaagtacgtctagaccaaaaacacaacgaaacctaatcaaactccagccgaatttcgcagaatttcgaaccacctttggcaaccaaccatcccacaaacacacacagaaaggaaatgtccatacgtactaaaatttccttacaaaatacttatagactatgatgtgatgagctctaagtaaatctagatctcttgtaactttcatccatctaattaaattaaacggttataaaaaatttgttagtatgacttttgtaaaaaaaattaggctgtgttcttccccccattttccgaacccacctctttcgttttccgcgcgtacgcttttcaaactgctaaacggtgtgacatatgcaaaaactttctatatgaaagttgttttaaaaaaaatcatattaatctattttttaaaaaaatagttaatacttaattaatcatgcaataatacaagtttcgttttgcgtcctcccgaacacaccttagtacgttatctctctaattgctacattttaggatgagggtggtgtaactgtgcttataatttttttttaaaaaaaggaaaggcccacacggacactaggcccaaggcaagcccaccactcgtgctcgtaacggaacggaacggaagcaaaccctaccccccgtcttactcatactccacactccacagtagcagccggcccgtagaacggaacggaacgggaagggggagacgagacgaggagaagagaagagagaagaggtcgagccgcgctccgcctccgtcgggtcccctttataacctctctctctctttctctctctctcctcccaaaccctcaatcgtcgcatcgcctcctcctcctctcgccgctcgcagcgaaaaagccagcgcctcccagcgcccacgcgatcccgacgaatcgaatcgagtccgagacgccgatctcggattcgagaccgttgatttcaaccaacacaagccctcctccggatcgatccgctcctcttcaggtaacaatgaacgatgggatgggatgggatcccgctgaggatgcttttttttttctgttttgtttgtgctcgatctggattcgggttggtccggcttggcgctggctcgatctgggtgtcgccgggtggtgggggcgtggatctgggttggttcgatgtgattttggcgagtctgtgagagagaggggtttgggtgggagatgcgtgactttgattgctttaatgatgtttagattgttatatctccgttggcatgtttgttatccttttgagcagctatagaagtggtatgtggtgcttgacaatagtaattgatgttttgggtgtcctagtgtttgcaaatctaaaatttgtaacatgctagtatatgtacttttttttaatgactgcgttagattatttgtcctgctaagcacttcgatgtcctgctttgtactttgatgactgttagattattatcctttgtatgccaaggacagtggaggaaccataggaagtcgaaggtctttatggaccaaacgaaggtcttttttgggccaactagtttggtctgttcgcttattgagtatgctgtgttaggaggattccttagattaagctccacatgcagtatccattgtatactgagcttgatctctaacctgttaggtcgattaagtaaattctggactgttgcgagtttgtgtttcccggttcgaagatttcatgttgtgtgttgtgcataaaccctgttcgaagagatcatgttgtgtcgtgcatagacttcaactatgggtgctatgttccttgtgtgcagcagaaagctataaatgtactaacatttattgtgcgggtcaagactgcttttacaactgagtttactactactttgtgtccttcaaacattattgccattcatcctttgtaacctgctcttttttttcccttgaatacagccatggcaggaatggcacccgaaggctcccagtttgatgctaagcactatgacagcaagatgcaggaactactgtaagccatcgttctattctaccgtatttgtaatcttagtagcagctaatggatgtttgatttctcatttgcaccactcgttatgctatatgggtttcattatggactttgtgtctctcgcaacatgcaggcaccaaggtgacaatgaggaattcttcacttcatatgatgaagtttttgagagttttgatgacatgggcctccaagagaaccttctcagaggcatctatgcttatggtatacaaaaagtcttatcccttttccattgtttcaacaacacatattttggtgatgttacaaatccctgtactttgatgtgtaggttttgagaagccatcagctattcagcaaagggggattgttcccttctgcaaagggcttgatgtgattcagcaggctcaatctggaacaggaaaaactgctaccttctgttctgggatcctgcagcaacttgactatggattggtggagtgccaatccctggtccttgcaccaacacgtgagcttgcccagcaaattgaaaaggtcatgcgtgctcttggtgactacttaggtgtcaaggtgcatgcctgtgttggtggaacctctgtccgtgaggaccaaaggattcttgctagtggtgtgcatgttgttgttggcacacctggacgtgtgtttgacatgctacgtcggcaatctctccgcccagaccacattaagatgtttgtgctggatgaagctgatgagatgctctcccgtggtttcaaggatcaggtttgcttctgaccagcccattattctgctataatacctccaacagtttgtatggctgatcttttacattatgtcttctgtagtgttcatgtttgtgtaattgtgttttaagagtgtttcaagcatcaaaatctgatataagtacaacatatttatggaattgttatctgagtgcgcgctatgcttatgtttatgacttaatgttactattcttgaagaaatcataggtgattactagtttgtaaagctggtagttcatttttaggactcttttaggacttacagtttctctctctctttttttttacttgctgaccttcacctgcttcattggctatctgttaacgcaacaatatgactgcatatttttaatacatgtactatgtgtgtctaatggttgatgagctattatggaagttgtatttcatttctttatgctgtagtgttgcatggtctgaacttacatatggtgttcccttttcagatctatgatatcttccagctccttccaccaaagatccaggtcggagtgttctctgctaccatgcctcctgaggcccttgagatcacccgcaagttcatgaacaagcccgtgaggattcttgtgaagagagatgagcttacccttgagggtatcaagcaattctacgtcaatgtggagaaggaagattggaagctcgacactctttgtgacttgtatgagacactggccatcacccagagtgtcatctttgtgaacacccgccgcaaggtggactggctcaccgacaagatgaggagcagggaccacactgtctctgccacacatggagacatggaccagaacactagggacatcatcatgagggagttccgatctggttcttcccgtgtgcttatcaccactgatctgcttgctcgtggtatcgatgtccagcaagtctcccttgtcatcaactacgacctgcccacccagcctgagaactacctccatcgcattggtcgtagtggtcggtttggcaggaagggagttgccattaactttgtcacccgcgatgatgagaggatgctgttcgacatccagaggttctacaatgtgaccatcgaggagctgccggccaacgtcgctgaccttctctagattatgtcttaggaagtaaggttctggataaaagtttgtttttgtttttgttttaatatgaccaactttctcgtttgggaggagtggtaaggacggggtctatttgaattgtggttaaggacggcttccatgtttttctcttttccgtatgcaactatgtttggaaatttttgtagctgttaggctgtgctgcttcctgggctagctgggagagggagacactactggaatatttactttctttattaagctatgcttgccttgtgttattattccaatctgctcttacattcttcagctgtttgcaatccgtacaaattttgttcttattggtaatgtgaaatctaacttgtttcgagaaaaagtttatgttcaacttatcaagaattctgctttatcagcatttggtggtgagaagatcttgtgcagttacacgttgtggatcaacctggtaaacattattgcagtactggttggctgtgtttttttggctgtctggtccaaccacagcaagatcacaatagcaaagcaagaccacagcaagatcacaatagcaaagcaaagcttgtgcatcagtaatggacgtttggtgagtactattacaaagcgaaagcgatgggcgttgattatgattttattgtgcttgctatccgattcagagcctcatcagcatcatcctgtcttttgcgccttttcctctctggactggagtcactggagtgatggcatggggcatcttattcctccacttgctacacaaaagagctagtactatctttgatagggacactggactggagaacaactctatgtgcctggagaacaactctcctataggctgtgtttagttcagcgcgcaaagtttggatttttattgaaattggaaataatgtgactgaagagctgtgtgtgtatgacatgttgatgtgatggaaaaggactgaagtttggatccaaacttaactttagatctaaacacaacctgtaaattactacactgataggagcactatatcatacagcccttgacgccaacaaaataaagtactgtccatatatatatatatatatatatatatatatatatatatatatatatatatatattccaatttgtgttctctgacctcctcgatcaaaaagctttctataacaccgaaaggtgaactttcaattgtcatttttgcttttataaccctgaaaagtagaacattcaaggtcatcttttggctaatttgttagacaatggaagctttttaattgaactccccaattacattgaaacgatacaattgtactaacactttcgatctctacatagcaaggatatacatggccaaagcactctcacaccctctcgtttgaattcgatacatgaagttttaaaacttatcaatccgtagactagatcatcctgggtaaaaagttctctaactacattcttcaaaggcagacatgtcgcaagttccaaatcatgtgtacctggcttgagaagtactccctccgtcccacgatataagggattttcagtttttacttgtaacgtttgaccactcgtcttattcaaattatttttacaaatataaaaaacgaaaaattgtgcttaaagtactgtagataataaaataagtcacaaataaaataattaataatttcaaatttttttaataagacgagtggtcaaacgttgcaagcaaaaactcaaaatcacttatattatgggacagagggagtacaacgttttgataagtataaacagtagccttttgtccttttgtgggaaaagtattccccacatttttcgctaatacaagaagatgcacccacgtttgctatcacatcgtgcgttacgcacacataaatctccttgttgtttcagctagaaatttcaaccttcctattttattaatactactaagatagtattctgatttagtttttgtaatttgtaaaatcttcaacaaaaagttcttttgatttgaaaacttgaacttttgagttcagtttataatactaaaaccttgaggtagaaatgtgcagctttctatgtattagcactaggagacaatactaatgatttagtttgtgtaaccagtgatatattcaaactaaaaagctttcaactgaaaattgtcaactcctgagttcagccaatgtccaacttttggttcttctaaccaaagtttcaccatacacttttgtcaacccatatttttaccttggaccatatgaccctatattgtttgaatttcattgtggacctccttttctgttctcctgatgtcctcattaactgctctccttagtcctagcctcctaggtttcaagtatttcttaatcatatcgatttgtcaagggttggttgctttttccctatagaaccagcatcgaagtctcgaacttgctcatattttacctagattaaatgaaaggtttgaaaatatgtggctagtcctatcctatcctaattacatcggatggctagcttctcctaatcatctcagttttttttttcacactcagtcctcacaccaacactgcccctaaacatctccactgactcataaattatggccacgtggcgcgtgattttgagaagaggaggataatgggggtccaaagtgaaataagaaaaataaacacagacaaaaaaaaaaactaaacaaggcactaagaggaaaaatctgacaagccgaaactgaaattcactcgaaagacaaccagattggttctcccttttgggccactcgccacagaatgagcccatcaaagccgaagccttccctttcttggcccaccaggcccggcccacccgttcgcgaaaaaaatccaaggcccacagatccattcttggaggagggggcaaatcgagtcgaaacgaagccccccgtcgcctccgtcgcaagcaaaccggagatcccctttcccttctttgctcccaccaccgcctccacctcgcacacccagcggcggcggcggcgcccgcggatttctcgctcgcgcctccgaaaccctagctctcgcccgtagtagccatggcgccgcccgagaaccccaacggcgcgggccccgcggcgccgtccgaccccgcgcagccgcagccgcagccgccggccaagtccaagtggaagaagaaggacgagaagaaggatgacgatctggtgagtgtccccccgcgtccgttccccggcgcgcaacggccgatgggagggagatcgagattcggaacctcggtttttcgtttgctggattcgatccgtggttttgtgttgactgttttttttggtgggcagtcggaggaggatttggcgctcaaggagcagctcgagctctacgtggttcgggcgcaggacgcggatcccggcgtgcagaagctcgcgcttgagagtatgaggtgctgttcgcttgctgaaattaattaaccgattcttttttttagggtagggtagcgtcgcgtcgtttcctgaatcccagtaggaaatctaggtttagatttctggtctccaggcaaattttgtaaatgcagtggttcatagggtttattttgatccaccatagttagatttacttggttaagaccaaattttgttgctttgatttccatcttctgtcactaaaatatcatcctccctaaaaggcaggagattcgttccgccacaagctcaatgacatctgtaccaaagccactgaaattcctccggccacactatggaacactcaagtcttactttgaaaccatgccagaatcttctgatttgaaggtatattgtctgttgatttcccagttgtgcagtagcctaactttctctttgtcacagcgatgaatgctgatagtaatttcttactgtttttagaggtacatggccgacattttatcagtgttagctttgacaatgtccgctgaaggagaaagagtatgttcctgccacaataaaagctttttgtatctaatctgaacaagatatttctttgtttgaaacttcagtacttttcctaatgtttttttgcctattacttgtttcaggaaagccttaagtaccgtttgttgggctctgaaggtgatatcggttcatggggtcatgaatacgtaaggtaagggcaattttacatgtttttgacattcatattttgccttctaaagtggtatgatatgcttgtgccattattctaaagtgataatagtgttagttagctgtaacttgcatttgtgtcatgaactgtcacttcctactccacttatatttgaaaagtttttgttttttcattcttgattcttacttctgtccaagcatatgtttgaactccagagtccagacaatgtttctgtccgtgcttttattgggaatgtcaaagcgtgcctagtttatattttgaggtgccaaataattgagattgaactaaacagctttgtcaattattgttaactaatattcctgcgaccaatatactgagtaacttgtagaatcatgggacagaactaactttatgatagtcatagcactgtattgagttctaaactatacagttttgtttatgattaggaatgttttttttgaatcaatatgtcgattgtgactgaggttgtatcgttggaaccttttaattagtgtctttgacattttattttgcagtgacttatccctgatttatgtccaaattacctgaattttagctatatttgatattttaacagtgtattcaaactcaatatattatactaatgttttttttttgttttcattacatatttgggttctaatgaaatagctgtctcttgtacagaaatttggcaggcgaaattgcacaagaattccaaaagcgtcaggtaccactctcactttcatgttaatagaagctctgaaacttttacattttttttgttaccttgtatttatcttcccttcatgactttgttctgaagttgtgataaattgtttcttttgttatttggtgacttaattcactacttcctatcatggtccctttctgattccagctatttcaatagctacgtatttgttccttcttgtttttttgttaaagcttgttgacttttgaataacatgcccagagacttgcattgatgactgttggatagctgaaataagttatgaggttaccatgttaagaaaccgtcgtttattctttcttgccccctatgtgattctctcgccatgcatactatttgtccattttaattccatgatgcctgtaactaggacaacgtttctttaaatgttttgtttgagtggttggaacctttgattcaataattaattgtttcacaggatgatgacatgccgattgacgctcttatggaactagtgcagcaaattgtttcattccatatgaaggttggttgacttgattcttatcagagattttggttttggtatttaatttgatgctctgattgatgccacttagtagctgtagctgttgttatttgtttgacataattaatgcattaatggtgctttattgtaatttgtaatgcagcataatgctgaacctgaagcagttgatcttctgatggaggtattttcatatagtgtactaattaactcagattttattattaccacaatctgtctactgatggctatgctgatgcatgacatttcatctcctttgaaggtggaagatcttgatttgctagttgagcatgttgactctacgaactacaaaagaacttgcttgtaccttacaagttcatcgaagtatgtaaacacatttttgttttgttttttgcctccattatatgtctctttttccacgtgttgtatacttttttatgctgtagatcctgtggtcctaatctggcaagatttccttggagtagctgaattttgtactttagtgttaaatttcaattgaattgaattaatagctgcatctttgaatgtaaaaccacagatacctccctgctcctgatgacatgttggcgcttgacattgcttataccatttacatgaagtttgaagaccttacaagtgctttgcggattgctctgctccttgacaacaaggtgagctgcttgccatgctattcttctctttgtatgactgaattggaactgacgtacatctccatcgtttctagtcaatgcagtatgtgaagcaggtctacaccgcaactgaggatcttcagctcaaaaagcagttctcattcatcattgcacgccatgtataaatctctcacgcactatctaccttggttgccaccttttgcatcttatgctaaaagtagcaatcccttaaatttgacccaagcgcttctcttctgcagggtttggccatggagattgacgacgagatagctgccgatggcaatgataaggagggtttgcaagaaatcgttaataatagtaagctgagtgaggggtacctcacccttgctcgagatatcgaagtgatggaagcaaaatctccagaggatatatataaggtcatctatattttactatcaatgtttattaaggttgcttttttcattcataataattaatatttgtatttaacaatctacaggtccatttaattgatgggcgtggtgccagctccagtcttgattctgcaagacaaaatttagctgcaacatttgtaaatgcattcgtaaatgctggatttggtcaggttagctctacaaacaatatgttacttttagttctttccgaggaaagaatgaatctcaagaccatatcttctgtgcaggataagttgatgactgctccatctgattcttccagtagcggagcttctggaaactggttattcaagaacaaggaacatgggaaagccagcgcagcagctagcctggtaagttacattgttattgatatttgacaaactctacaaaccattgacaactgagttctttaactggtcaacaataataacaaaagtactgtttcaccttttcagggaatgattctcttgtgggatactgattctggacttgctcagcttgacaagtacttacatagtaatgatgctcatgttgttgctggagctttgctaggtattggtattgtcacatgtggtgtgaagaatgattgtgatccagtatgtgctccactgtctaagtttcccaacctccatcctactgattaatattgcaaatcttttcttaatacccaaaattttgcaaatactttctttaataccctaaatttgctgccaggcacttgctattctcatggagtacattaacaaggatgacacaaacattcggattggggcaatcttgggtcttggtattgcatatgcgggttctcagaaagaggaggtgggatttaagaattgttattctgtgcttttacaaaaaaaaacattttctatatgttccacataacctgctatctgaaatttcagcttaaatcttatctatcaactgtgttgggggactctgagaaatcaactcttgaggtcctgatattctccgccatcgctctgggattggtgtttgttggttcttgcaatgaagagattgctcaatctatcatatttgccttgatggagcgcagtgaggctgagctggcagaacccattatacgcctgcttcctgttgcgcttggtcttctgtatcttggaaagcaggtactttttgagcaaccttgaagcttagttccttttgattcattttttttgggctgtgtgcactagcatttgcttaaaaaaaatccagtattccctgcttttatacatttgaaatactgttcaatacctgtggattcgaggatttacctagtgtgtcctccctttattttattttaagcaagtgcttgtttctgttggttttgtcaagcgccttacctgctgtaaatgccatgtcatggttcccacatgatgtctgacctttcgcattgtaatgttgtccgtattgtttatatattgtatttctattcctaaatgtactgtatgcatatactatagctgcctttgtttctaactgttgtttatggctttatgcagcccttttagataaatgtaccttttatgattgtttggcaatttccatttcaggagagtgtagaggctacggcagaagtttctaaaacatttgatgagaagataagaaagtactgtgatgtaacacttatgtcactagcatatgctggaacaggaaatgtgctcaaggtacttcatgtttaatgcttagaggttcttgtggcttcaagcttgtttaaatttcgaggttttgatatgcttggcaattttacgcaggttcaaaagctccttgggatttgctcacagcatcttgagaaaggtgaaacccaccaggggccagctgtcctaggaattgcgcttattgcaatggctgaagaattaggagctgagatggctgtacggtcacttgagcgtcttttacagtatggcgagcagaatattagacgggcagttcctcttgctcttggcatactctgcatatctaatccgaaggtatgcaacatttgaccaacataagttttgttaaggatcacgatctaagttaaatttgaagtaatgctttgatgattaagtgtaaaaaaaactttgagagaggatgcagaatctaaactccagttcaatgaaagtgtgatcaattgttttatgtttgaaaagagtgttaaaaaaaggagttgtgctcaaattctcaattgacaccataacatttagtacattggaacaagtaatggagttattacttgaaagtgctaaactttgatgttccattattcaatatcttattccaagcaccttctttagctatttatttcagcgcttactgttctgtcaaattactcatattttgcaaggatattgtcatgcttattcggtattaagtgtttgtttgatggtccattctacatctatttggttgcataatttagcaaagcaatttatgccccactcagtgttgttgtatctacttacaattctattatcccatcccaggtaaatgttatggacacgcttagcagactgagtcatgatgcggatgctgatgtgtcaatggtttgtattcataactttttaacccacgacatacccaatatattttgtcctaattgatggcttacgttttatacctgaattaaatttctctaggctgcaatcatttcattgggtttcattggtgctggtacaaacaatgctagaatagctggtatgcttcgcaatctttcaagttactattacaaagaagctgcgcatctgttttgtgtaagttaataaatccacaatgatccttttaaacctgtgctccattctgttgtacctggttgtatataatgcgtacatatattgacaaaattttgcatgtattcaggtaagaattgctcaaggacttgttcaccttgggaagggtttgttgactctctctccataccattctgaccggtttctactttccccgtgagtatagctagtgctatttacatctactgtttattgcattcaatattaatccttcaattttttgtttgggtgtagaatggcccttggaggccttgttactgtattgcatgcttgcctcgatatgaaatccaccattctagggaaataccactacattctttacattatcgtcttggcgatgcaggtatggtccatttagttaattgacagttttgttgctagtgcaaactactatttggtactaaaattgagttctcttcttgtatgtacagcctagaatgcttttaacggtggatgaggatctaaagcccctatctgttccagtacgggttgggcaagctgttgatgtggttggtcaggctggaaggcccaagacaattactggtttccaaacacattcgacacccgtattgcttgcagcaggggaacgggctgaattagcaaccgaaaagtaataagagctcaattaacaatatgccatttctacaagtttccccatgaaacctaaaacctgatccgttgttttacgttttgcagatacattccgctgacttcggtattggagggctttgtaattctgaagaagaacccggaatataacgaggagtgagggacatttccaggcttgatacaatgctgatttctggggctcacaggcgtggcatactagggaaccatgctgcaacatgggacaggatctttgcctattgggttccctcctcggcgcctcctggtgttaatcggataggtcttttatctcttctaccggagtctcgagtgttggagcagagctctttgaattctgaaatcctttttggttgtgcaatgactgacgtgacgtatcacttgtacccaaacatgggcatctaggagttgaactgtttccttttacctccagtttatttatctgtatgtagcaaagtatgtactggaaatttgaggtcgaagtattattcttgatttccacaagatctcatcaaggaagctgacatattggtttcatgcttatctgttatggcagctgccatttgttttgttgtcactagtattagtttttggcacttagaccgccatctgatcagatgataagtatttcaggttataaatgtttatttttcaggtccttaacaatagaattgcatccttgaaatcattcgtctctactaacagagtttacatagctatgcaatgcatagttttaaaactaaaaaactaaccgatgaatagttttaaaactaaaaaattaaccgatgaatatgtatgttttaaaactaaccgatgaatatgtatgtttatgtatcctgcataagagcaggattaatgaaataagggtttttattaggatagcactgagagcaaagtataatagtatagccaactataatatagtatcgattcatacaatagttatctataaatatatattacacttaatatatagtctcatctgtcatacatacattgtattttacttatatataaatatatactacactattaatatataaacccacttgttgtacatacattatgttctagagtccgtgttgcatctgacaataaatttatagcctgccactcctcttttatcttctcgactgcgtgcacgttttttaaactactaaacgatgtgtgctttgcaaaaattttctatataaaagttgttttaaaaaattatattaatatatttttcaataaataaataaatactaaacgatgtgtgctttgcaaaaattttctatataaaagttgttttaaaaattatattaatatatttttcaataaataaataaatactccctccatccctaaatgtttgacgtcgttgacttttttaaacatgtttgaccgttcatcttattcaaaaaatttaagtaattattaattattttcatatcatttgattcattgttaaataaacttttatgtatatatagttttatatatttcacaaaagtttttaaataaaataaaggatcaaacatgtttaaaaaagtcaacggcgtacatttagaaaagaagggaatacttaattaattactagtatgtgctaatgaatcactctctgtgctgaggaaacgagtttccaacacaaggaaacgaacgcactcgagtctactagtactactcgttagagtggataatcaggggtgtagtcttggccgaagttataacggcgcgacttgtgcttgacgacgcggagcttcccgccacggccgcgtaccacctccacgccggtgagcatggcgaaatttatttcacccctttctctgcgatcaacactgaacatcttggcgacgcacagcttgccgccgcccaggtggacgacctgcgatgcgtacacctccaactccctcctcctccggtcgtcgctgtggctctccaccgagaaccccttcacctggaggctcgccaccggcggctgcggctgctggaacgcggaggacagattccacgctccgagaatggtgccatccatgtcggagatgccgaaccagaggccgtgctcggggacgtgctcggcgcggccgcggaagggcagctcccagtcgccggccttgctccacgcggagctcgcggtgtcgaaggagtaggtgccgttggtcgtggtggatatcaggatgtgcgtgccgccgtcgccgtaggtcattgtaggtcgtggtggatatcaacacccgcttcttagcatgcagttaagccatggatatagaatcagcaactggtcgcaggcaacgtataggagggacgggtactgtcatagaactgaacctggatctaagtatttgatcgttcaaacgcacaggatatatcaccagtatttccctaggacactcccagctatgatgtggggaatggtggctctacgtcagcacaaggtgatagattttgacaggttattcaaatgaggggaacggctagccaggtaaaggtcagcagttcattcccctttcattatagtaggtcattgtgctctctgatctcctgtagtacatgaaacaagattttactaactgaaataccttttgctttgcttggtataggtatatcttgggagacaattgcatagcttctcgatgaaccaccctgttcctgttgctttgacagggacaacgtacagttgatgttcggttcacactcaacagtcctgttcctgttttctttgacaaggacaaagtacgggttgatgttccgttgacacagtagtcaattcgcagtatctgtactgcaggcatacaaattcgatgtcaaagccccatgctctgtggttacattgcctttgttagtacatctaccactgttcattttactaactgctagtaaaaacatctaatggtatcagattgtcagttttggaagaatgattacacagaattaagtttggtgttttgtttggtttatagccttagttaaaatatttctgtaagccaaatacgagcgttgcaaaatttgtgacgaagttaggtttgttgccaatttttcttggtaaaattgctttgagcattgtttaatttgagatcaattagagactaaacaatgtacactaccatttcattttctgttggcaacaaaccaaatgtgtttgccaaattgcattacccttgcaaaagaattgataagattcatatttgtgcatcaatccaaacaattactggatcaattcaacctcaagtttttttccctgcctttattcttcgggtcactctccggcccggtgcctctatcttagtcaggctttaggaaaactagataatgggtttgtcgatgcagcatgcatcgttaaacaacattgactcccatgatctgcacctgtggcgaaaacaagaccaaagaggcaaagattgtcgcatcaaatgcaaatttagagactttttctcccttcgttctaacatggtgagtcattcgcttgatctgaaaatatagcatagagcaaatctggttgaatgcaaatgtccacatgccatgggcacagttagctgacaagaagtgcctggcagacagtagataattacatgccattttcacatccatattcacaaagataatgcactggcaacagtatacactagactgcaagatgaactatacttcccataatcattttccatcatagtaagtaactacagacatagctgttacttgaacaatgacacaaatatgatacaatacacaaggataagaagagccttatagtgtctacgttgtttgacagaaacgtgaatgtgtaaatgaaatttgaaagaacattgtttgagtaattcagctgtcagacacgtaaaagttaacaacatccaatgatatggaagggcacgtactgcttgtatcagcacattctttagagagacctaccaaacctaatcaacaaatcaggaaacttcagattagaaaaattaaggtcgaaaagaagcatatgtgcaatgattggcatgatcacaacatcacactgcctatcagaactttataaatgacaatctccaactatgtagatttatttttctgcttgtgtgccttagatacaatagtttcagttatacacggtgtccatatcacagtccaacatcacgaaatgaccaattgaaaaggatatgtagtatctaattacaataccatgctgacaccaataggttcaaacatgaactgaaacgtcatattgatatgcatacttaatataaaaatttaacctctcctcaaaaaaatatatatataaatttaaccttattcctaacaatgttttgtgacttcaacaataaactgaggacttgagatggagatgaaaagacaaggaatcattatagactcacaggagatagtaccaggcaatattggcatgttgtacttggatctaacgcaatgtaactgaattatgaggaaagaattatgcagaggcattcattgaaataatgcatgtgatatactcattgaaaagtatattagagtaggatgcacagctaaacttgtaagttacaatggagcaaaagaaaacaaaccccaccttcaaagagccttgctaagatccatagtgtttcccaaagttatctagtatataacctttcttgaagttcactgactaactgtccttaaagaaaagactacattgatcaaggatttgtgccagacaaatttcagtatgactttcttcaagttataagtacatcgacaacagtgactaaatgttttggagtgccataatcaatagagagaaaaaaaaataattcactagagactattttcattttagtaccaatatgatttttgttaagggggtggagtgtatgttaacagtttttttgcccaatgatgatttaagcattgtgtttttctcatcgtcaatactacatgcatttatgcagcctgttaaaggaatgaaaattatagagagacgagctaacccgcatggccacatatgcatcatcaaggaagctgacatattgctttcaggcttatctgttatggcagctgccatttgttgtcactagtattagtttttggcacttagactgctatctgatcagatgataagtatttcaggttataaatgtttttttttcaggtccttaacaatagaattgcttccttgaaatcattcatctctactaacagagtttacagagctatgcaatgcagagttttaaaactaaccgatgaatatgtatcctgcataagagtaggattaatcaaataagggtttttattaggacagtactaagtaggagtactctactagttagagtagataatcaggggtgtagtcttcgccgaagttataacggcacgacttgtgcttgacgatgcggagctttccgccacggcagcgtaccacctccacgccagtgagcatagcgaaatttattttacccctttctctgcgattaacactgaacatcttggcgacgcacagcttgccgccgcccaggtggacgacttgcgatgtgtacacctccaactccctcctccggtcgtcgctgtggctctccacggagaaccccttcaactggaggctcgccaccggcggctgcggctgctggatcgtggaggacagattccacgcgccgagaatggtgtgatccatgtcggagatgccgaaccagaggccgtgctcggggacgtgctcggcgcggccgcggaagggcagctcccagtcgccggccttgctccacgcggagctcgcggtgtcgaaggagtaggtgccgttggtcgtggtggataccaggatgcgcgtgccgccgtcgccgtcgccggccaccgcgtacccgcagatcatgccgcgggaggagccttcgaagccggcggcgtaggcgttcacgcacggggacggcggcggcggcggcggcggcaggggttgccagaggtagttgtcccctacctcccacttgtcggagtcggactcggcgggattatcctcgaggcgtacgagcgcctcgaagcagccggcgccgtcggggaggggcgtcgtctccatgacgtacaggtcgtcgccgacggcggccgagacgggcatgagcttgggcgccgcgagggcgggcagcgtgcggacggcgcgcgcggcggggtcgtagaggacggcgcggccggtgtggtcgatgccgacgatgctgccgtcgttcctgcgcatgaactccatgcccatggccgtcgccgtggtgcccggggagcagaaggccatggcgggtggaggcaggcgagcgtcctccacctccaccgtcgctcgctccggtttcgttgctagtggatggccatcggggtagaagagatgtgatgggttgactcgccgtagcctgtgggagagggaggggcctgtaaagcagtggtcagcaatgtacaagaatcgccggatcatcctcttccctgctgccaatggcggccgccggcggcgatggcgacggcgacggcggcggcggcgacgatggggatcttggctaggtttccacccgtacaagggcgtgaacgattaggaaaggtatactcatagattacttactcgtgggccgtatcctaatccagcatcgcgtgtttggcccaccacactcgtgggccggcccggctggaacggggcctcgtagcaacagctctgacgcacgtgacctctctttctcctcgagcgcagctgcgcaggtcgacgacccgggctccgccgccgccgcctcgcctcgccgccggcgcgctcgctcgctcggctggtccgcgtagtgggctgccttccatagtcggctctggaggagttttgagggagggaggcgcaggcatgggcgaggaagaagaagaccccgactggctccgcgcgttccaggtaaccatctcttctcctccgcctcccgtggccgtgtgatgtgccctagctaaatcctgccaggtctccgtgggaataaggtccatcctgccgagcggtttcgatttacccatttttctctgtggatttaagttgagaattgaactgaattagtgggcgcgctaataagtttgatctatgtcatttcacaaaatggcattccgtgttgtgcttctaggctatgtgttaaatatgctttgtgatgttcgtgagaatttcgtgctctttgataatccttcgcacaactcgatgcgaattttcggtattcagaaaacgttgtttgtacatgtgtttaacaacttgtttacttggtctatgccaatggttttgctaaacggtcccgctatggtatcgccgattcctagtttaaacacaacgaacacatgtcttgattttggttccgatgtccgataggctccgatgtgaggcagcaagcatgttctgtatctagtacttgttacactttctgttcttggtacaacttctctggctttccaagattgtgacttgttattggtgataatatcaccaattttattttgcataatttttcgtagccaccaactacatcgacggtgatgctttcttcgggctccgatgattctcctgaaaacagtcctacaaggactacaccatctggagaagaacaaaagggggaaaacaaggctagttcagaccatgcaggggatggagatgctgctgcactaaataagggcaaaaaggcaacacctactaggaggaaaacccctactagtcaagaaggtatcattagtttactactccctccatcccaaaatataacaacatctagccttcataatttgccctaaaatataacttcttctccacatacattctcttcttagccaatcgcaactttccaccattcaaatcccttcctacctcctcttctcaatcaatcacaacattcctctatttaattccaccatctttcttaatgcctgtattcaaccctaaaactcatattttgggacggagatagtaatatttattattttgttatgacaaacttccaaactagtatctcctttttattcactttctgatctattttctcttcatggttgcctatagatgctttcgacaaagatgagaaaccaaccatggaatcaaatcaagataagcctccaaaacgctcggtaactactataattcttattttgttcttaattgtttaatccctgttcgtggtacctcgccatctggtttctaattagttatgctgctgatatgtgatatgcccatgtaaaaagaacaatttaaaagatctatagatagattacgagctatccaagttcgaatgaggttcagcagattccctttttttctcaagatgctttattcctgatgtaacaccctgaaaattcgaccgacgaaatctaaactctaaaaatacggaccttcaaaaactttttaaataaagttgcatcatgccgattttgttccattattttaatgaattttgatctcggagtttataaatcgcgaataatggaaaattagttaggagaaaaccctaaaaagtaaattgactaagtaaataattaaagagcaatttaaaataatatttagagaggatagaaatgagtaaaatattattgggactatatttgtatcaattaaattaaaaaatgtaggaataagaattaaatctaattaaattcaagaaaatgatataaaaataaaatatgggtaaaattaaccagggatggatccattggttgggataacacacatattgagtaaaatgcatatatgtaaaattaggaatttttagaatcaaatttatatggggaataaattaaaatcgggataaatgggaaaaatgggaaaagtcactattcattgcccgccaggtgctcgagtgcgtcccctatatctgcccctctgtcccgtcgcgcgtcgcgcccgcgcgccacgcgcccggcgccctagccggccttgcgccccgcgccgccgccgcccgccgcgtcgccgctgccgtgccgcgcgccgtcacgttgcctcgcaccccgagccgccgcgcgccgtcacttcgccgctgctgcgccgcgcaaccatctcgcgccccgcgcgtcgcgcgccgctctgccttccctctgccgccgccgctgcgccgcgcgccgtcgcgtcacccgtctcgagccccgcaccgccgcgcgtcgcgtcgccccgcctgtcacgccgctcgccgccccgagccccgtgccgtcgcatcgccgtcgccaccgcgtcgccgtcccatcgcgccgcgcaccgtctcgtcgccactaccgagccgtcgtcgtcgtcgcctcgcaccccgtgccgcgccgcttccccgagccccgtgccgccgctgataccgcgccgcgccgcccgttccatcgccgcgcgccgtcaccgtccggccgtcgcgtcgcctcgcgcctcgcgcctgcgcgccgctcgcccgttccatcaccgcgacgcgagcctgccgcctcgcgccccgcgccgctgccgtgagccgtcaccgcgcgtcgacgtcgccgcgcgcgtcccatcgtcgctccgagccgcgcgccgccgctgccgagccgttcccatcgccgtcccctcgcctctgccgcgccgcgccaatgtcgccatcgccatcgccgcgggtcgccgtcgccttgcgcctcgcgccccgcgtcgccgtcgcgtctcccttctccttttccccccttagctcttcccctcccctatataagcctcactatttccccctcttcccctccatctccacccctctcctctacccacactaccgcgccgccgcctccacgccgccgcgccgtcgcaccgccgccatcgtgccaccgcgccgccgccctcgtgctgtcgtgccgccgcgttcgtgcccccgtgccgccgccccagagtgccgcaccgtgcgccgtcgtcgccgccgccgccgccgccgtcgccgccgtcggtgagccgctgccccccctccctctttcttttgtcgccgagccgagagagaaagagagaagccgagggaggaaaaggagaggaaggaaggaggaagccgggaggaaggaaagaaaaagagaaaaggaagaaaagaaaagaaaagaggaaaagaaaagagaggagaggaaaaaggaaagaaaagaaaagagaagaaaagaaaagagagagagagagggaaaagaaaagggaaaaatttagggggaaatttaaaatacttacaaatattagaatttaattgtaggattaatgaaaatatagttagatgaaatcttactaattaaatacctaaaatactagcatttaaatataggattaatgaaaatataattggatgaattcatatagattatagataatttctagtactctccataagaaatcaattcgcggtattaatttagatgtaattaataattaaacaaatgtatgaattctcgtaaattattgtggattatttctgggtaatctctataaataatcgattaacggtagcaattcggatttaatcactaggatgttagccgtgtattatatttaatcatagactaaattaagtcgtataatattctgggatttcgtccgatgtttagctcgcgatagaaatttctaacctattaattgatatgttactcgggtaggttaagttaaaaactcatgaccacaaaatatttatactcgcaaaatagtttaaatcgaaattgggttggccgtagtccgcggatagtgaagttaacaaaagggaatcgactttcgcatgcgacttttatttggattcatttggatttttatttgaattctaaccgaattcaaatcaattcttgcacgtaactatagagcccgagggagttgcagatccaagcgaaggccaagacccgcaagactttgagcaaggcaagtcatcactattctttgaacatgttgatcccaattgcgaaatggttttgtttataaataaaattgcatgcaatgatgaacaccctacttgtgattatgccatgccttgattattgtttacccttgaatccttgtaaccatgtttacgtatgagtccctagtcaactatgacaattgcttagaaatgctattctagaatcatgcatactcatatttatcaaatgctatatgcttgggcaattacctttgggaaggtaattgagatgcggcatgtggagacatgagcgccacattgccatgatgttgatgacatgatttgtgaaaggagaaataaaattaaacaactgttttcgactggggcggacggaggatttgggtggtatctggaaaaggctagtaccgtccccggtcaattaaggaccgagccatgaagttaagcatgaaacgacccccgtacaaccgtacttctcgaatgggtatagacctagcggattagatagccgagcggaggcagtacccctgcatagtggtttcttgatgtgtgaggcaggggctctacggtggggcagccattggtagaaccgcgaggcgggtgtctacagtggtgtcgccatcagtaggactgccttatgagaacctaaaacataattataacttaatgcatgtgtgagtcttcccttcccgggtgcgccagaactcctctcactgctagaaaccgtgtacgcctagagtgcatgaggatgaaaagttcatggagcgggtactgccaatgcgaggttatcgaaaagctttgccgtgacgcgtctcatgtgttgggacgaggctcatgtgttgagcagtcgcggagtgcgggtaaagtgtacatccactgcagtgtgagtaaaccaaatctattcgaatagccgtgctcgcggttattgagcaccgggacatgtattacacttggctagactctaaactcttaacttgtgtgggatgggatattgcatgatgatttttatgctgatggagccatttcctgagaggtggaaatatggacatcctcagaaaaccataacgactcaatggcgggaagctatccttgggatcacaatggatggtggacagaaccgtcattgtttaatatgaatactggtattaaaacttgatcagtctatgctaggtcttaggcttgcgaaaagaattacaaaacttgctttgtgcaaaagaaccatagccatcctttgaattcccctgtcatgtgcatcattgctgtggtggcttgctgagtacggttggtactcacccttgcaattataaaattaatcagaagcgggagatgaagccacggaagatccttatgcctactaccaggagggagacgaagatgatggcgtccagtaggtcttagtacggtcgttgcctgtggcaatggcatgccgctgcctaaaattccgctgccttatctaaactctgcttttggttgtattccagaccgctcggtctgatgatttaagacaatgcctgcgggcttatgttgtaataattcgtactagactctcgtgtatgagcattggtattccagttatgaaatcgtgtgtaccagactacttgatccagggaaatggtacagtttacacgagtgattcctgttataaaaacgggggtctacacctgatgtcaacaatactacttgaatcttatcttacaactgttctacattatttgttattgatcgtcagataatgctactgttatatttaatactgacttcattgtacatattacttagttgcaaacaccaggtccactcttttgttaattctatgcctaaattttttgtacagactccaaagaagaagttggttaaacccccatctggttctaatgcttcaaaggttactggaccaaaagctggtccagatcaaatagatggtaagactaatgaaaagctttggttgccttttagtgaaaagtcagtttatgaattcttagtttcaatgattgataattatagtcatggtcatgcatagataccttggaacatcaagaagagggagttgctgaagaagaaatgcaggataaacttacagagcactctgtaagatgcctcaacttccttctatttttaatctattttttcctccacactacggttccagaacattgagagcattgacccaaacaaggagcaaagaaaacaaaattagagcccacatcttactgggaatatcccaacatgtgtcatttttgttattgcattatattgaactaatgaaagttgggtaaatccttttaagaaggtataggaaaatatgaaaataaacatcattttgtaaatatttatcaagctccaaccgattagttctttccttgattaccgtaatttttgtagagcatgatggcgtgtcttgttattcctttaactagttacgtcaatatgtctgagatatcttatggactgtaagctcttatgcgttccaggtctcccagaggttgccattaatcattcctgataaaattcagcgttcaaaggtatgataattctaactggcattatcaattagaaaccattgttctcataaaagggtcagtgtgtcaaatcataagtccggaatgcaatgagcaactctgctatcaccccccccctttcccatattttcttcatggaaaaatatcggtcaacttaacattggtggaaagaaattgtacaattaatagaaataccgcagtgacagagccataaatgagaaatggttggggccctttttagtgcaccaggagttagaaggagtataggctatatatattaaagagccatagatccttgataatccaccaaaatgtgttatatgtgctaaaatgcagtaaaatcaacatcttgacctctgcaagtatcatctacctggaagactgggaatcatgactgacccaatcaatgatagtttccctaagtttataaattataatcctataatccttgttctgtttatttctaggcattgattgaatgcgatggtgactcgatagacttaagtggagacgttggagctgttgggaggataataatttcaaacagtcctaacggaaatcaggaattgttattggacctaaaaggtaccagcaagtcgatttctttagtatcatttatgtattatgcactttggtttctgactaggcagggtatttttaccaacaagggatttgaaattaatgtccgtgttatcttactacatgcactattcaaaatactttacccatattattattatttttacttatatacttacacaggaacaatatacaaatcaacaattgttccatccaggacattttgcgttgtaagttacattcaaacttaaagtacagttgtgcatttgccttatttgttagtattgatcttaaatccttgatggactgtctctttttctcaggtcagtgtaggacaaacagaagcgaaggttgtcgatgataacataaatctcttatgagtatttgacttctccataatttttagtttaggcagttctactttctagtatgtagcgtgctatttttgctactaaatccgattaaaatatattattctgatggatgtagctgcttaccttattcaaccatttttccccttttgcagatagagtctatcatggatgactttattcaattggaaccccaatccaatttatttgaagcagagactatgatggaaggttagcattcttctagatggtctaattagaaatcttcagcccatatatcctactgtttctgacctataaagctgagcagcaaactgcgcgccaataaaagcagcacatcttatctttctttaatggagctattaagcaatgcattgtcatttgacagtgtagtcaggaacagtcattctgcatgaagtgatgactaatgaccctatcatttgatatgatgataacatctgctgcaatggttattttctaatactccaggcatgttatctttataggtacccttgatggattcacatttgattctgacgaggagggtgacaagcttcctgaaccgcatgcttctcaaaacgatcaaaataatgaagatggggatcaacctaaggcaaaaaccaaaagaaaagctgagaaaccggcagtatgttctctcctacccttttaatgatcctataagcttcttttcagtttcttttctattaccattatgccatctcagaatttaaaactgatgatggcacatgttagtacaaactgtatgaatacctgattcttgaactcctgaaagcgcattacattaccctatataagtttgaaacccaattgtggatagcttttccggaggttttacttatgtactgaagcactttgcctgttttgtatcatgaaattaaggaaccatgctataaactttgcgacatattatagttcctcatgacaaagtttgcttattcttgtgaaatgtaggggaagggacagaagaaggcgaaggttgcaggaaaggccactaagaagggtacaaggaaaacccaaactacgaagagaacaaagaaggcgaagaaatagacctgttgcgaaaccgggacgctaccagtaaagactagagaatccaactccaaatggatcagacttgagaaattccaaatgttgtatgatctgggttatcagtgtagcataatgtacttcttttaggcgtagaatgaaattagaagggatacacatgattgcaaaatccatttttatgtctatgaactctctgtctatcctcatttgtatgttgtataactatcaaatagccaaatttgaaaaagtctggatatcaaacacttgccattcatctttaaagtgattcgagctatttcacatgtgcaaattgaagctcactggcagcaagaacattctgaccactgttgttactccgtactagtattatacattttgctgttctgttttggcaagaagttgcatccaatcttaggctgtgtttagtttagcgcaaagtttggattttggttgaagttggagatgatgcgactgaaaagttgtgtatgtatgacacgttgatgtgatggaaaaggactgaagtttggatccaaactttggctgtgtttagttcagcgcaaagtttggattttggttgaaattggagatgatgtgattgaaaagttgtatgtgtatgacaggttgatgtgatagaaaaggactgaagtttggatccaaactttggatctaaacacagcatttggatctaaacacagccttacggttaaggctcattgttttgtctcagactctcaaacatgattgctggagacccagaagtagatcggggtagtcaacataaaaaacaaaaatggaagatggtcaattggtcactccataatatttttataaatcgacattttttattttggaaatagggataaagagggaaaaaaaaagcggcgtccgcttttcctggatcgggcttcacttaaaaaatcccatttttaaaagtaaaatagacgttgcagggaaaaaaattaaaatagtcactttgtaaattatttttggaataattgaataaatttaaattatatattggcatttttgaacaccaaatatccatttagctcattaacaacggtattcaggtatagtcaacataaacacggttggcaaaataaaataaaatagtaaagtgggtctaattgatttcttgcgctgaaacctactcatccggattagttcaaaacttagcattttgctcgcatttacgactaattattctttcggcgataaacaacatatctgtgaacaacgaagtacccgtggtgacttcatcaatctcaaaatatatcagcctagtcttcgtagaggtgagtgtgcacatcttacgaaccccctacatatatttctgaataataatgaaagaaatggtcccttcatagacgatatactccctctgtctctaaatataaggtattttgcttggatgtaacatattctagtccaacgaatctggacaggaagctgtccatccattatatttaaggatagagggagtactgttttggaaagtaaaatcaaattataaataaatacccttcagaaatatagagagggagagacgagagagagtgaaaaaaaaaacaaaaaaaaaagaagagcggcgtccgcgtttcctggcctcggtcgggctttcccactgcagcagcgaagcaagtcagtcctcctccctagtagtcgaccactgtgtaaatgcagccgcaacacaagggaattccaaggtttcccccaactcaactcccctccccttcgcttcccttcccttctctcctctcctctcctctcctcttctcccccccaaattcgccgccgcctcctctccccctctcctcctacccttccccgcggcggcggcgagaggcggcgcggtgcgtcccctcccctcccccgcactctgctggtgctggtgctgggctgccgttgggggaggcgggagatccgcccgggcccggggttccgtttcctcctcctgctcggtaagcggcaaaccctagcttcggtcggttgcttggatgggggtggatcgtgtgttcgttcgtttgttttaactccgctgtggcttgggtagtgggagaccgaagattgctgcgtcttcctctcgattcggttggtttagtgagggattcatttgctgtttagtgtgctagttagtggttgaatccttcgtgtaggatttagcatccaaggttggggtgcgcagttcatttccgcgacatttttgggagagggggtttcaactgagccccaatgctccgcgctaggtctgtgctcggtgagatcttcgggtgtgtaatgtgtgtgctggaatttgctgctctggttagagatctagaatttctcattatttgttctatgcttttcggtatttgccctgctggttagggcaggcagccaatagatgtactactactttgtttagattacaagcatctgtctttttttacatgcagcggctagtacattttcttgtctgctacgtactatgtaatgctgcttactgtacttgttatcatcatgtccattcagctctcagattaatactgtaatgtgttctttatggtaggtctcaacctgttgtaatactatccatcaccagcaatgaataccccagaaaagaaaccactgtgctatacttctagaagagcactgcaacagaggacagaatcctcttcggaattgatctctgtatcaaaaagagcaacccgccagaatactccacgcaagccggattctcctcccaaacgaacaacaagaagtagcgctaacctggcgaaatgtatagagaacaaacaccatagcagtcctctgaagcggcggcggggttcagatgcggctaccggaaagtctgcaacagggccaacaaggaggaagcataaacagaaaaggaaaaatgatgagagtgatgaggtcagtcgcatggaaaaaagagcaagatatttacttatcaaaataaaacaggagcagaatttgctagatgcatactctggagatggttggaatgggcacaggtatgcactgcttctctcttactgttgtaagcttctgagttttgactatagaaatattcaaatccaactaatcttacatgccaaaaggggaaaaagaaacctgaaattatttaattcatgcttgcatgattgtagtttttgacggaaaactcaaaagcaaaccagattaaaccttctcagtaacaaagttccattttgtttagggcaataatgagcaagggcttagaatgaggtttagaactactcatgaagagaaaatcattcacatttactgtatgcaaaccagatgagaacttatgttttaaccaccaatagcatcttaataataggaggatcagaatccatccctagctcattggctgtgaccaactcctcatgggtcagaaataatactggtatatgtatctgttggaagtaatcattttgacttgcgtagttgaagtagtgtcttgggatagaagtgctttactgtggaggacctctcaatcatgatatacacatctagtttgccttctaattgttaatttgttactgtcagttgtcaattagctatcaaagaactgttctataacggtctatactgatgctctcagtaagcttcacttgtgttgttttatatctaattctctctctctatatatatatatatatatatcctgatgttgcatagaatgaagtaacagtatgctatttatactatacttactaaagggtgtgcctttcctaacagtcgagagaaaataaagccagagaaggagctacagcgtgctaagaaacagatcatgaaatacaaaatcgctatccgtgacgtcattcaccaacttgatttgtgtagttccagtgggagcaaggatgactctgtgattccaccagatgggtgtcacgagtctgtcaatcctgaacatgtatgtatgtcatcaagtgaatatcaaactccctacttccataggattatatattgatacaatgttctcttttctagacaatatgttcaaggtgcaaatcccacgagtcatttcctgacaataacattatattctgtgaggggggctgcaaactggcgtgtcatcagaaatgtttggagcctccttttgataaaagtgggtaatcatttctcttaacttctttcaaaatatgaggttccacctttttggtaaatgaatgtagttttgtttagtgtcaattttttaatatatatttctactttatgtagtgaccagtgcagtgtacgaactcaaccataatctgaactttccaatttcctcaaaaataaactgaacttagcactctactatgttatgttgtggtccaacacttcaaaataaatgtaggacatctctagtgtgtagagtctagactctgctgtcactccatgcataacttgtcttctactttttagcatgtgatgattctttagcatgaataaacatttatatgcctttttaaagaaatgaaagtatggcatgagttcctataaaataatgtatgttttaagttattgcttcagaataatgtaatgtggtgtgctgtaccaaacatcatagtgtaccttctattctgatgattatgcatccatgtcacctgctgcagttgctccacctgatatgttgctgcaatggctactttacagtttgtgatgtatctaactttgttttgtggtatctctcagttcttccaactacccgccatgggcggctttgcaaacactgttcttccaagatgaaaattttagacgccattaatgcccatctggggacaagttttacagtgaagtgtccctccagtgtaagtttttttgttctttacgttcaagttttgatcaccttttagttctttacgttcatgttttgatcaccttttactcaagtggtttaattgtgttgaataagccttgattctgcttgctttctataggatattttcaaggaagcagctgaacatttcaactctgatgatggactgggccaagattggctatctgagtattcaggtgatgaggactatgaccctgaagaaaatgaggccagcagcagtggtgaagagaataaatctgccgattccaattgttcagggagtccactttattctccaaatgatgatattccagacttcatatcagcagatttcaatgatgctgaaggattctgtcgtgaaagttcaaatctaggaatcgattttggtgaagatggtttggctgagattcttacccaccaaaggccaagaagagatgttgactatacacaacttaatgaggtgtgctttatcaacaggaaattgtattctatgaatagcggagtttaaatagatgtgtctgttattaactgtgaatactgtattagtaagttccttttcatcactaagatggatcaacgctattatgaccacttctctccattcacagcaaatgtttggagagcctattggcaatgacgaacagagtgaagatgaagattggggtcttaacaagagaaagaaaagaagaactggttcaactggtgttgggactaattccgtagagggtcgatcagatgtcaaatccaataagaaagcccaacctcggagaaaacttttcaggattcctcctgcggcagttgaggtaacttggaatgtttattatctcaaaaaacatattatcagcattacatcttaattctatgatcgcgtatttgctgtaacacaaaacagaaagtcaattgatggtgaaattcactgatctactgtgcctgtagctgtgaccgtgtgtttttttcaaggacacttgcttaatgcctcgtattattctctgttaaattaggtgcttcgga

SEQ ID NO: 4485 - DNA, 5124 bp, Oryza sativa
  unsure (1)..(5124): unsure at all n locations
aaacatcaatttccacttatatatggtgaccaattgttttctactagcaatatttatgtatgtacatacatattgtttttaaatactttgatgatcatagttatatttcattaaacttcctgtatacgcttctaatccaccacgtggcaccctataaacacttatgattcatcacgtggagttctaaaaaaacagagaaattcaaccgtcgattttcattgagattaataaaccattattctccctctttccatgcctctgtgcggcgttctcactctgtaccaaacctaccattcctccgttcctttcttttttttcttatttgataattaaacttataattttctttatgggcctaaaaaattttatagatagacatcgaccgactagatctagcaagctcttactctatactctctttatagtacgttaaacatcataaaaatatttctaaataaccacatgacacactaaaattagagaaaataaaaaaataaaacattcgaccatcaatttcttcttaaaactatcacatgatataaaaaaaagtttgagatttatccacgtcatcatgagtaaaacttttatttccagtatacctctacaaatgcttgtaggccatcttatagcgatggacataataaactactatgattgttttaatgcctaattcttttaaaaaaagaagataaaattgtataggtattgcaggcttcgcattgaagattatgcacaaacacaccgtgtaaaccaactaacacacacacttttgaagaccgtgtatatatatattgggagcaagaaaaaaaaacataattctaagacagttatactcttaagaccgcaatgtagcattgaagcttttacacataaaactattttagtggagcacttaacccgtaagatagtattgaatcaatatactcccttcgttatagaaaaacatagctcattttacatcataatgatatttttattctttcaaaatttttatatttatcttcatacaagtcatattaaacacaccaagagacagataattataattcaattcagtaaattctatcctttaaagtaacttccatgggtttctctacaacctgcatgtataagcctctaaggtggcaatataaaataagtagcctttcttataataatattattaaaagttattttttcctaatatattattattttacgattcatgttggctaggtcttttccttaaaaagaagcgctatataatatatgtatatttgatcaattaaaaagagggcgtagcaggatggtaaaaaaattaaatttacaagcaataaaagtttctcgagtcttcttaaggaaaaaaaacttaacaatgaacattcaattaaaaatgaaaaataccctattttactttcaacttactttgttagaagtattttcgaaataaaataatatggatgcccgttagaagtattttcgaaataaaataatatggatgcccgcgcggatgcgcgggctaccttcttagttatatgctaattgtctttcacttaaattggcgggtccaatattataaaccattagattcgattaatctgaaaacaaaccatacactacatgaacggtaccacctatcctccttccccgtaggaaatagaatccaacttttaatctacccttaatttagttgtcacccccatcatgagttcgttagaagattcaatcacaggaactttgagtcccttgctcttagcgattntcacttgtaaccatattgcaaggtatatgtgcagatggtatgcatgataattagctaggagtagtttattactttgttgatacaaaaacaattcaaaacagttatcaaattagtctatattttattcaaaattcgatgaatggtttttttatatatattaagaaaaacataacccatgaatcattttaaaatgacattgttcaatctttagtttgcccttaacgtatatataggagataatttctgagcaaactataatcttacatttcaacgatccatatgcccgcgcatgcatgcaggccgccttcctagttctggttaaagcaacatctaaaacaacaagcaccatttttttttcgaacattacttgtctagtacataatcggagaacaacacaaaaggctgcaacatgcagtctgcccgtacaactaaaagtataattgtattaaatacaactctatctcaaataggcatataatttctcaggaagttcgactagttgtggtgaaagcaacatgtaaaacaacagcacagtttgaaattttgttctaagcttacttgtacagtataaagtcgaccaagaacacaaaagattgcagcatacaattgggaaataaggggggataattggatcacacacctgggtccttgatttgtttctcaaatctttctacccaatgatcaaactaacctagctagctcctcttcttgatctttctcttcttaacatctgttacgagcaaagcgatcacctgtttgttcacaaaaattgtttgatcaacatgaatagagattataaaagaaagaagagcacagatgcgctagttccagatatatagaatgttaggaaagttaatctctcggctaaggaaatcgggagaaaatcacgcgttatcgttttccacccgttaaccagcgtgattagctaaatcaaatcacgattaaatttccttaattgcacgcgcaataatcggtagcgcttccaacgtttccttttggagcagcccccgattccctcagcgcaaaataaaaggggaggccggcccgtgagaaagatgacgatctcactcacggttccaatctccccgacatcccaaaaccctaatttcccgattctcagttgcactggaagggattcgtagtgctattcccggacagtgtaggtggcgaccggaaggccgctgccactccgcaggtgatcgccggtgacctcttcgggatcaagccggtgtactcactgctacgaccacttctacaccgacaattcgcgaggtggttcgaggttctacatcctctacatccaccccgaaccaagcaagaacaattgcaatggcttcaaacaacggtcagttatcctaaattccgcattagggtgatcatgttaggcttagcacttatgtcttagtagattcgcaaagtctacatagagtaccaattttgtctcccgaattcaaacaaaaagaactaacagaaattgggaagagtacagcccccaattttagttacttcttttccgaggtagaatgaaggactaaactcgcttttgcggctatacgctgcttccacgcacaagcgctcagctaactttctgagaaattacttatatatatagaggaactgatgttcgttcagaacacggtaggaaattaaaagaggccgctgttttgccaatatataggacaaaggcctggtttagttcttaactttttttttttcaaacttctaattttttcatcacataaaaactttcctacacacataaacttccaacttttccgtcgcatcgctccaatttcaatcaagcttttaattttagtgtgaactaaacacacccaaagaaaagatgccagtaggaattgttcatttcaatccatatgtttaactcaccagtcagcttcgttgcaaagtcagaactttttaatgtaagagcgtcacgaactgagagggaacgattggactaatatatattcattgcttaacggtaatagacataatcccatgcgcagatcaaaaacagcgcattgacatcttaatatattggatgaacagatttggcctctcagcccgatgccttcttttgagtagttcgctctcgagctgaaatatggacttctaaaacttagccttttacatcttggcttttgacactacaaggaaagacaaatagatctaatattatgaatgatagcagtatcattgtgtcaacaacacccatgggtggacctcatccagatgctgttacgggaaggagaaaagttatccatgtcctgagtatgtaaaaccagcaagcttgatgaccatagtaatcaacggaggtacagcaaaaaaaaaaaaaaagaaagataagataatatgccacttggagttgtccatttcaatccatatattcaactcaccagtcagcttcaatgccgagtcaaaccttttcaatgtaagaattccatgacccaaatgtggtatgtgttcttggtttaagaaattcgtgtgctgaattcttagctttggatgttgcccttgacaaaccacggcaagactaggttctgtcacattgagcttgtctcggatcacagtagaattgtgttatcccgatttggttctgtcacattcaaaaaataaaagatagttcagtctattgaatgcaccatggagttgatagtgaactgtactagattaggagttttatatgagttcgtttcgttgataatgaggatttttattactgattcttccctttttgaataaatacaaatcaacctagcatctttctgtacatgtgtttaactttgtgacagaaaaatattctccctcgtgaatcattcaaagttactgcgtgtaacaatttctactgctctgaaattagagcaatactggcaaatttatctagcaatatctgaaacaatttctagcaatttttaacaaatttatctattattctagttaggaaaaaatatgaattaccccccgaattatcgcggtcggccgaatttcccctctgaaccagaaaaccagacatgactcaccctaaactttcaacaccggacgaattacccccctcgacccaatccatagcggttttatcctatgtggcgtacgcgtggcaacccagtcggcattttcttttttaaaagatgttggggcccatctgtcatatactccccctctctcactctctccctctccctctttcggcgagcacggcaggcggcggctgcagcctgcggcgtgggatgcggaggtggcgtgggacactaaggcggcggtggtggcagcatgggatgtggaggcggcgccggcggcctgggatgggaggcggcagcagcgcgggacaccgaagccgctgcggccgcagcatgggatgctgtggcagatgccaaccatatccc

SEQ ID NO: 4486 - DNA, 3040 bp, Oryza sativa
ttgttcaactcacgcttggttgtagattttgctgagactatgcgcagggaatttgagatgagcatgatgggtgagttatcgtactttttgggattgcaaattaagcaaacacctcaaggtacttttgtgcatcaaacgaagtatacgaaggatcttttgagacggttcaagatggagaattgcaagccaatttcaacaccaattggttctacagctgtgttggatcctgatgaagatggtgaaactgttgatcaaaaggaatatagaagtagattggatctttgttatatctaactgcttctaggccagacatacaatttgctgtgtgtttgtgtgcacgcttccaagcttctcctcgtgcttcatatcgtcaagcagtcaagcgaataatgaggtacttgaatcatacacttgagtttggaatttggtattctacttcatcttctatatgcttaagtagatattccgatgctgattttggtggttgtagaattgataggaaaagtactagtggaacatgtcattttcttggtacatcattaattgcatggtcttcaaggaaacaatctagtgttgctcaatcaactactgaatctgaatatgttgctgctgctagttcttgttcacagattttttggcttttatctactttgaaagattatggtcttacttttgaaaaagtacctctcttttgtgataatacagtgctattaatattgctaagaatcatgttcaacactcacgcacaaagcacattgatattcgctttcactttctgcgggatcatgttgagaagggagatgttgaattgcagtttttggacacaaagttgcaaattgctgatatttttactaagcctttggattctaatcactttgcttttcttcgtggtgaattgggcataattcatccttttggcatggtttgagggggagtttgtacctcatggttttatcaagcaataatatgataatgagaaaaatttataaacgagagctttgtttatgcatatggtattttcttgtgcatgctagcaatactttgaaggtttatttgtctctagcatagcttgtatgtattctagtcttttcatgagatttagattttgcttttcagggagatgatgcatgacacttaaattctatacttgaattaagaaaatatgcaatgttaatgctagcatatggtttgatttataaatgctctatatatatgctttattgccttgttattcctcaaatagttttaattgcttattgtgaaaaagaaaataaaaaatataaaaaaatgaataccgaatccttggaaacagtcttgacgacaaggacgtattcgatgtgagcaaaataatgggtgccgaatccctggaaacagtcttgacgacagggacgtacccggaataaaaaagagaaaaatatgagcaaaaaggctcaagaaaagaaaaagttaaaaattctctttgttgttttgtgctaaaggcttatttgagaaagagtgataattgcaataggtatatgtgtttagtgtttattcttcaacctatgtgcttgttaagatgttgcattataaatcgtatgaaatcatgaattatgattgttaattcaagcttaactgtaaaatctttggttcatggttatactttaattcatgtttgttatgttatagatgggttcattttctttttattgcaacacatgacgtaatatgctatatgtatgctaagctcttgaatattaatgaacataattcctatacttgatgaaatcattgtcaaaagggggagaagtaatgtgaaaatttttggagaagcaagattaatttttgagagttgttgagaagagcaaagagcatgttttttgttcaattgggaatttctttcttttaaaaagggggagaagttttcttttggatttttgagcacgatgtgtacatttgtacgaagtgtgctttttaccacttttgttttttttttccaaacaccaaaacatttttatgaatttgccaatgtgttcatcaagggggagattgtaaaatcaaaggtgtttttgattattattctgtgatgaacaattgggcattggagattattggttttgttatttggaatttattcacgaagtggttttggagatgattggatttcacaggtgaatatacaggtactgctggatttgggtccggtcagaccgggcacgggttgccggtcggaccggcgtgtattgcgcggtctgaccggccgacgctgtgtcggtttcggtttcgagttgtttatttggatatccgtgattatttcatgattatgacttctagatggatactatacgtatgtaatactattgtttgctgctaatgagtcaagttggagatagattggtctcggaatatggtttctttgtttgttccatgtgtaggtgattcgatgtctctggagagtatttgcggtgatggaccgggagtcggcttggggataagacgacgtccgtggtggtcagagatcatgcgggatactaaggctagagttgatgtacgtggttgatggagattccatatggcatacgatggagttattgtgtgcgtatgggatgcggagtcgaatttggaagcagtccaaatttggtacgattggttatctaaagtttctttcttgtactagagggtttcctaaggtgtttaggactcctagtatgagtttggttcgtggctttaggctgcctaccttgggtataaatagagggggagcgtgaggcttcccgatatcgtttttgagagcaattgagttgagttttgagttagggtttcgagtttagtcgaaatttttgtaaggagtgctgttggtgcactttgtaaatacaaagagaagtaataaagtcgtcatccactttaagagttcttcgatttgtgcttcaccgggtttcggcggtttaactggcaactaaccggcggttagaccggtggcatcgtggcggtccgaccggcgggagcaaggcgctcaaaccggcggcggcaacagcaagcggcagatgatctcggtggtcagacc

SEQ ID NO: 4487 - DNA, 1922 bp, Oryza sativa
ccaaggtaacgcaaatgttttgagttgcctatgctctcaggtaactttctcaccgttgaaaatttaaaaatcaatacacggatactcgggagttccttgaaccaacaatcaatcacgggagcgaattgtttaatacttcggtaagattcattgcatattagggaccgcagttttttattttgtgtgcaaatagtcactatttctgtacagctgatatttcccttggtgaatattgacagatggcgaacctttgatgggattttagctaggtcactcacatgttgtatgatgaagcactcatccttggagactagctgtgcagtatcatgtatcaagtcatgaattacgtacatatcactatagccagctgctttctgaaagaatgaccgatttacaaggtcattaaagcaagatgatgcatcttcagcctccacatacccttgtgctacccaaatgtctgctaaaaactccttgtcaaatttatgatcctttggatacagggcacatattgagaagcatcttttcatgtgtcgtggtaggtaaacgtaactcagtcgaagggctggcaaaatgtcagtctcctcttgttccaatttccacaattcacttctcaatatgtcctcccagtgctctacacttaagttacttttcaacaagcgtccaagagttttggcagccaaaggtgaacccttcaacttgggaagtatagctctaccaatgcgctccaactctggacgaatgtgctccagctctgggctattgcgagagctgttggatccgaatgcgcatagtttgaagaaatcccagaaaacatcattttgcagtccgttgagctcatagggatcactgttgctgactaggttagcaactttggaagatctagtggtgaccaaaatcatactgccctgaagaccattgcttaaagttctatgaaatgttctccatcctctctcatcttttaagacatcatcccacatgtcatcaaggacgagtaaaaacttctttgacttgacactatcacgtaaattaaccataagagtatcccttgtatcagaatcttgtgactttactccaagagacttcagaacatctcttgttaacctgtttacctcgaattcatccgagacacatatccagagtatgcagtcgaagtgattccgcaccactctatcctcacagatttgttgtgccatggtggtcttcccgatgccgcccataccaactattggcagcacaggcaactctgtcctccttgcttcagctgtagtgctgcatgccacaggtctgcctctcttgcgtccacgtactcctagcttttgcttcaactccttcagttctttttcacgaccaaatatctcatctggctcgtctaggacacggcatgtctctggtctgactaatcgatcaaacttctttggtgttttgtgaaagcctaaacccttggattggtcaaaaacctgctttagtctatttttgattttcattactttactgaagttgacactgttcaggaactccaaaaagggttcatgcgagtgatcttgccccaagttcttgctcgtgtccaccttcaccttgagagcatagtaattgtactcatcaaggaggtcctcggcatcgtacgctacatccttgatctggcgaagatgccagtcttctgtatccttgtggctatgccattcaagacgatcgatgaggtcatacattgtggatgtagttgattggatcagccataggtcgttctcgagattctgaagatcatcctcaatctggtgcagtggagctgttctgttgtctctagctgatgctgatcctacccctcctggatccacttgcagcagatgctgctgctgctgagaacgtacggcagccaagacacgtggtgcggcccagttgaagaactcacggaaggcattggcatc

SEQ ID NO: 4488 - DNA, 25757 bp, Oryza sativa
ttgaccatggtatagttgaaatataagtttactggacatatctgcaaagttaattactaggccgttattttacataataaacgactacagtgtaatatcttctttgcaacgtacctaaatttttatatattctattgcaatgttactcaacaacatttaaaactacaaacctaataactacaaatactacagatctactaagttacctacatggctacatctaacaatatatatttatatagtaccacaggtaaaactctatttcatacaatgcatttatcatatatttagtcacgtatataatctacgaatattacctgaaatcgaagtttgaaactggcagggcttcgcctcttcttttcttctcctccccttctccttttttttttttttttgatgtggagaggttaggagggaatgggctcctcaaaggagccggctgggctttataggcggccaggcctgccgccttctgtaagggcggcaagggggtcctgccgccctttgccagggcggcaagagggcaggagggggcaggaggacggccgtcccgcgccgtccagcgcgccgtgtgccacgtcggcttgccgcccttgcgaagggcggcagggtctagttttgcaaattttttcggcgctataatatttctgtaaatattaaaaaaaaaaatctaaaaatacaaaaaattccaaacaacgcgagggtttataccctctccgccgccgggggaaggggaagagctctccgccgcccgccggtgcccgacattgcggcatcggcgagcgcgagcgattcatccaagaatcgatcgagctcgagcgggggctttcctccaccgcgatccgccgcggccacacctactcctccacggtcacctcctcccccgcctcttcttggttcttcttcaaggaacaatccctcgtcgaggtatatatattcatctctatgtctcgccgttgctcctctaccttgctctttcagttcttggctgagaactcgggattaccgaggaagaaaccagtgcgttctgtgatacaaaaaaaaaaaaaagaaattttgatctttggctcagttgcatgatgtctctacctgggcgcttcgaaacatgttaatccagcagattcgtgttgcagtttgtcttgtgattttgttaaacttaggctgcttgtttcatcaattgcctcgtaaattccaggttttagtttgtataaatgctgatgttttttttattaattgatttgtggaatattcgtttgttcttttggacaagcaattctaagattgtaattcgtttagtagtagatcacttgtttatcaattgttcctgtaaaccaagatactacatagtttgttacattaattcccttctaggtttgcaaagctgctctgtgttaactgatttcgagataaattaatatgtttctgcatttattaataattttatagatgaataaataggttacatacttgatctatttgtgaagataagcaaacgaaccgtgaagcccaaacatgtacatgaaaaagcgaaaagttttttgtttcgtcagtataaatatgcgacatgaattttccatcatatattcatgcggttcattatgatttcattaattttaatctagggctctggacaactgctacaccttgaaagacctaactagctctgctgtatttctcaatggagcgtctctccgaggaactgatcatagagattctcaagaggattacaaggacaagcgatctgaattctctttctcttgtgtcgaagcagctctacgccattgatgcggagcaaagggctactatttgcattgattgtggactttcaacagaagatttctcagcactctgttctcggtttcccaatttgctaaaagtagagatcggtaactctggttcgacacctggcaatgggaaccatattgacaaccaaggtctctttgttctttcatcttcttgtaattcgcttaatgatctcaccttaagcttctgctcaaagatcaatgatgctggtattgctagcctaacttactgcaagaagttgatgtctctgaagctgaactccataccagatgtaacttcaagtgggcttctcttggtagctttcggttgcaaggctctatcttctctctaccttaatgattgcaagggaattgcagccagcactgagtggctggagtaccttggcagtgatggatcattggaagaactcgtcgtcaataattgcccgggaataagccagtatgactttttaaagtttggtcgaggatggatgaagcttaagaaatttgtgtttgtaaacaaggaaaccatggtgaaccacttcatcactcgccatgacccctcatacaatgctaactgtgtgtataaatatgatctgtgctgtgagaatttggaggatttaaggctggctcgacttcgaacagagccagaaggtccagaaataggactacgttttctgctaaggaagtgcaaggcgttagagaaactatgcctcgagtatgttggcggtcttattgacaaggacatgattgtgctatcccagagctgcaagaaccttaaaagcatctcactttggatgatgcctcgacgcttccatgaacatgaggttcttaggatgggtttcaccgatgaaagccttgagatgctagcccacaactgtccattacttcaggatctcgagctcacatttgcaggtgttgaggacttggaatatccggaaataggcttcacacaggagggacttgtgaagctcatgcattcttgtccaatccgttctctcacactaaacggcaccctcttcttcaatgacaaggggatgaagggactctcatctgcaccgttcctgaagacactccgcctcgtcgattgcaagaagataactgattacggaatgtgcttccttgtgcactacccatgcctggctgatctcaagcttcagtattgttctggtttgacagatgttggaatagctgagcttgtacatgcacagaaattacagtctctggttgttgaaggctgctctaatatatctgaacatgctgtgcagggctcagctagatcagtccagtactttcccaactcggccagatcaggtgctacccatcttaaaagactcgttgattgaggctgttaattggttgcttttgctgttaaccctattgtctctgtgatcggacttttcagttttcaccgccatttttgaacttgattttacttttcccttttgttcctgttattcgctctaaacataagaccaactgagcaaagtatatgtactagtagtactctgcaagtctgcaggcatctcatcattgtgtccccagctagtgtactgaattttcgtgtcaaacttggtgttggtggttttcagcttgtcataattttagttgcaaatatatatttcattaaacttgggaatgcttgatcagttcttacacataaacaacatttggctggtcctaagtgtaaatgtgtaattttgtcttgagttgacccacactcctgagtgagcaaacatttttttacagcgtaatgtgtacaaacttgctgcacttgtgctacaggctcctttttttttcttcgattacacggctgatgcatatggatttacaccactacacacgcacatccacgaattcgctccttaaaacacgcttaaagagacgaaaacctgtagtacatcctaatctcgctaaatttctattgaaagctcacttgcatgtgtaatatttgtggacactagagctttgacatgatgggttggtgatcttgttccaaggggttagccatgtccatgtacaatacaatgtagtggtatgtatatccactctgatgtgtttttagacctaagctctataaataccagttgttagagtgtgtaacttggtccaccacctatgggccacaaagagtcatgcatgttgggtttgctatcccataggttcaatcaactcgacctacaatttcacatcataagcttacataacctaaaagattagtttgacggagaaagactctacaccttttaagatgtgctacttcatcattaattagaaaatttggtccgaattcagtttactcttaaatcaagaaacatttagaactgaagtattacgatgagcggtgacagcaaagatctgattagtagcattatgaacctatgggcgacgttactcttaaaaataatgagttcggagatgaggggaaataaaatgctaaatttgactacgacagtatttggatgtatttgaaaagattaaaaatgaaataagggacgtttttttttaaaaaaagaaagtctatgttactctcccaaaatattttgttggatgacttaacccctaaactatttttttctcattttaccattaaactattaaaaattatttattttactgccgagtagcatttctctttgtgcaacttatatagatagaaaaaaaacagaaattttgttacgagtaacatgagtcattttaaatagtttgagggtgtaggttatgtgatcggctaaataattcaaggagtaagataaacaatttttcaacaatgtttagtttacatgaaaaatagggtttcacacaatataagaggaaaaaaaagagttctccattttttttaaaaaaaaagttgcgataaggtgaattttctacatatactattaaagtttaatttcctttcgaaaaaaaaacatatgctggtatttttattctaacaaataaagaaaatgaaaaaaagggagaaaaaaaaacaaacgacccaatgggccaggaggcccaggaacgcgacacgagcgacgcgagggttttatcgctctccgccgccgaccggagtaaggggaagagctcgccgccggtgccccgacactgcggcggagcgggactgcgggagcgaggtggccgcgcgcgagcgaggctttcctctacctccgccgcatccacccctcctcctcttcctcctccacgatcacctcctccccaccctgcccagttcggctggtcctctcccgcccgccttcttcttggttcctcttcaagaaacaatcccggccatcgatcgccgattccttcgaggtatgtatctaccttgcgctttcagttcttggctgaggactcgagattaccgaagaggagacaagtgcgttctgagattgaatataaaaaggaaatttaatcttcggctcagttgcatgatggctcttctacctggacgcttctaaatatgtcgatccagcagattcgtgttgcaatttcttgtgatttttttttaaacctagccctgcttgtttcatcaattgcctcgtaagttccagtttttagtttgtataaatgctgatgttttttattaaattgatttgtggaatataattcgctcgttcctttgaacaagcaattctaagattttacttcgtttagttgtagatcccttatttatcaattgttcctgtaaaccaatatatacatagttgctacatttattcccttctaggtttgcaaagctactctgtgttaactgatttcgagataaattaataggattctgcctttattaatcgttttgtagatgaataaataggtcacatacttgatttatatttgtgaagatcagcaaacgaaccatgaatcgcaaacatgtacaggaaaaagcgaaaagttttatgtttcatcagtatgaatatgctacttgaattttccatcatatattcatgtggttcattatgatttcattaattttaatccagggctctggacacctgctacaccttgaaatacctaagttgctctgctgtatttctcaatggagcatctttccgaggaactgatcatagagattctcaagaggattacaaggacaagtgatctgaattctgtctctcttgtgtcgaagcagctctacgccatcgatgcggagcaaagggctactatttgcattggttgtggactttcaacagaagatttctcagcactttgttcccggtttcctaatttgctcaaagtagagatcgattactctggttcgacacctggcaatgggaaccatattgacaaccaaggtctctttgttcttacatcttgttgtactttgcttaatgatattaccttaagcttctgctcaaaaatcaatgatgctggtattgcttgcctaacttactgcaagaagttgatgtctctgaagctgaactccataccagaagtaacttcaagtgggcttctcatggtagcttttggttgcaaggctctatcttctctctaccttaatgattgcaagggaattgctggcagcactgagtggctggagtaccttggtagtgacggatcattggaagaactcatcgtcagcaattgcaagggagtaagccagtataactttttaaagtttggtcctggatggatgaagcttaagacatttgagtatgaaaacaaggaaaacttttttagtattcacccacgttatggctcatcagtcaaggctaacacacatagatatgaactgtgctgtgagaatttgaaggatttgaagttggtgcgtcttgtaacagagccagacggcccagaaataggacttcgttttttgttggggaagtgcaaggcgttagagaaactgtgcctggagtatgttactggtgttattgacaatgacatgattgtgctatcccaggcctgcaaaaaccttaaaagcatctcactttggctaaaaccagaacattacgttgttggtggtcatatagagttcaggacaggttttactgatgaaagtctcaaggctctagccctcaactgtcctttgcttcaggatgttgaactcacatttacaggttgtgcgcactgggatccccctgaaataggcttcacacaggaaggacttgtgagtttcgtcgaatcttgtccaattcgtgttcttgtgctaaatggtgccctcttcttcaataacaaggggatgaaggccctatcctctgcacaattcctggagacactcagccttatcgattgcaacgaagtaactgatcatgggatgcgatttattgtgcattttccaagcttgattaacctcacactccggttttgtcataatgtgactaatgctggtctgagcgagctggctcatgcacaaaaattacagtctctggacgttggtggctgtggttacatttcccagaaaggtgtgctgggagctgccaaatcagtctactatgaagtgaattgcaaaagtcttggccattataagaggatgtgttgaagctgttaagtcattgcttagagtgcatcattagcattaaccagttatctttttctcgtcttactattcaccatcattttgtacttgccagtacttaattgctgtggaaagctctagcataagaacgtgttatggtgtagattgtggaatgaacgaaaatcctcagtgacttccagcactagtgttctcaagatggttctgcttattttgtcttgaatgaagttcagaattcatctttcaccatcattttgtacttgctagtactatcagttagtctttttattgctgtggtccgctgtagcataagaacggcttcttgtgtattttggaagatggctcaatgaatgaaaatcctcaatgatttccagcaatgatgttgtgaagattattctgtttattttaccttgaaattcatataattcagcctcaggattttcgttttctgcaacctttggagtcaaaactcgctattcctcattgccttctgacctaatttaatgcggttttcagtaggatatatcaataatcaatagttgaaaatgttggatatgtatgtacgttcaatcactagggatgaattgactgtgtgggaataatgtatttgtacaaatttaccatatttcttccgagcaacactctgagagttaactaatagagactctttcaacggaaagtttcatttcaaaatttaaaattccgacattaactaaaattttcaaacttcgaattcaaacttccaaactcaaaatttaagacattgtacattttttaaaaaaacaaactcctgctaaaatatactccatccatctacctttgatagtcatatttcatcttaacacatgaccaaggataagtaattttacttatcatacatttgaatatgctactaatcattcctcgtaaacaagcgattcattaatatttacatttttcgatgcccatgtagccaatcttgtgtggaagaataaagagtcacgtattaaatccgagaaagtcattaagaggataggttgttggattgaaatatgcctatcaaaaataaatttttcagatttggaaatatgactataaaaaatagatggatggagtactaaagttattaacgtgattaatttagagaaaaaaagtcgctaagcgtgtcattatggcggatgtgagatagcggatgtactagccgccctctttaaagtgagtggtgattattttgaaaaatgggctcggagataaagggtgataagaaattaaattttagtagcatgatatttttgatctatttgaaaagctaagaaaatgatttaagggacaatttttacttcacgtgaacaataggctttcacacagtgtaagaactaaaaaaaatagaagttccttttaaaaaaataatgttgcaaaatgtacatttgcaatatattatcaaaattttcatttgctttggaaaaaaacatatgctagtatatataaaggaggggaaaaacattgaaaaagaataaagagaccatagggccaggagcccagggcccaacaagaggcccaggacgcgagggttttctcactggaataagatcactttgactccctcaactgaccaccgaatctaaatcgtatccctcaatcgcaataccagaaatcttgaacccccaacttacagaaccggtacaatttgactcccttggtggttttggagagtggttttgctgatgtggcgcacacctggcagtgttgacttggtcttcgtcccacgtggaattgacatggcgcttacgtggcattaaaatttaaaaatataagcagggcccatttgtcattcacacaaaaataattgtaggccccactgacatgtgggtcccacatgtcatcctctctttatcccttcttcctcctccctctcctcccttctctatctatccctctttctcacatgtgggccgccggaccaatcaaaccggaaagccatggcgaccacgccgaccaccaccaccaccaccccctccgccgcctgcctcctcatccccatcgccgccgcatcgcgcgcttccttctccaccctcgccctcccgcgatctccctatccctctcccgctccgccgccgccggttgccgcggccacctcgccaagccatggcgaccacgccgaccaccaccaccaccaccccctccgccgccgcatcgcgcgcttccttctccaccctcgccctcttgtgatctccctatccctgtcccgctccgccgccgccggctgccgcggccacctcgccggcgcggcctcaaagtgcaagggcgcaggagcggaggagaacaagaaagggcaggagcaggaggagcaggagtagtaggaggcgtccgcgacggtggtggacggcgcggaggaggccgggaaggaagaggggggaggaggaggaggggagaagagccccgaggcggtggcagcggtgctgaaggaggcgaaggccgcggccgccggtggcgggtggtgggccggcgtcgcgttggagatgttgaagatcgactggtgtcacgccctgaagtttcccccttttcttgctttaaaaattggttaaataaattgctcgaagaaattgtttaaattaacctagagctaaaaccctaattaataaatgtatttaataatcgatttcggcgtggtgggatttttcttgagtaccccatgtcacaatatattaacaagatttttagtggaattttcagagccttggaaataattttaaccaactaaaaatgagcaagcgcaatattataatccaaggaaaatcctttttctctttttttcttttcttttccctccttttcctttgttgggccgtcggcccatccctctcccgctcggccttcctcttgttgggccggcccatgcgcccctccctcctctctctgggacgtcgacaggtgggccccacctgtcggtcgtctcccacctccagccgttggagccggagctccaactgctgccgccgaaaccgcgcgccgccgcctcctccgcgtctcccgcgcccacgccgcgccgctcccgcgtcctcctcacgtcgccgcctcttcccccgcatctcccggcccgcgcgcgcgctcgagagggtgggattctctctctctctcctccccacgtcgccggccaaatcgggagggttcccggccacgtcctcccctccctcgcccataaaagcactctcccgagccccctctttcattttccctcatttgccacgctctcccgtgcctcctatcgcgctcgcgccgctcgctgctagcgccgcctcttgccgtcgccttcggccgcgcgccaccgccgctagagtcgccgccgcgccaacccgccaccgccgttagcttcgccgccgcaagagctttcccggccaccgcctcgcgttgccggaatcccaccggagcgcctctcccctcgcgagccggtgagtttttccctcccctccatctccggccggcaattcaagccgccgtggtcgtcgtctcctctcctaacgcctctccatcttctcctagggtgtcgccgccgcccgtccgtgcctccgcatcgccggtcatcgccgccatcttcatccttcgcgccggccgccgtgctcacggtgaggagctcctctcctctctccttccctctgtcccgcacgcgctgccgctccctgcgctcgccatcgccttcggccgccgccgccgcctcccgcgccgtcgcttgccgttgccggcgctcgcgcgccgccgccgctcgccatggccgaccggccggttttgaagccgagccgagccgtgcctagccgccgccgtgccgtccgatcggcctcccggccgatctggaccgtcggtcccgtggaccggcggtggaccacccgcgtggtcccggtccacggtggaccgaccccctttgagccactgacccgtgggccccgcctgtcggcgccgccccctcccctcgctgacgtcagccctgggtattattgcgcaataattgattaaggacttttttctttattagtaaaaacacagtttatcttctaaaatttataactaattcatccgagctcagtttaagtccattcaagtctcagtaaatcaagaaaaatgcaaagaatccattaaaaatggttttgtttcctgtttcagtagtcttatagcatgttttgcttgtgtgctttgtttgtcgcgtagatttcggccgtttcgtcgatccgcggtttcgttgctgaggtctcatcagtgcgagagcaaggcaagtcatgcattataattgatcatattgtacccaatttacaaatatcccgcatttctattaaatgttgcattcttttacaatgtcatgtgggatgggtcctattacccagccatatattgtttaccttatgccattgataacttgggtatcaaaatgactagatgttggtttaggaaatgcttaaccatgcttagttcaactagcacacacatggggatcacattattacattgactttgaccatgagcatagctttggattggtgccaccgcaatggtgttagttaattaaaatacactgaatggtgggctgtgggtgcatggttttgctggtcgcacccatggcaattaaggaccggttcacgggaaaccctgggagacttaccgtgcttaccacaagcgggagtgggtaactgcttgatctgaggtatagctcaaccctttcctaggcaccggtggcgagggtgggcgtgatggagttgggtcggccggggtatccggttgtccagctgccggattcaccgcggcgcaagaagggaccgcccactgccttttgaggggtgggggtgaaaccttagcgtggtgtggatggttaggggagggttatgcggagggtcttgtcacgatttccccctttgcagtatcatggtgatacttcggggcatggcgacatgtgtggaatcgtgtcttgtgggtacagttgtacacctctggccagagtaaaactattcgaatagccgtgcccgcggttatgggcgaccaaccagattcaccgtgattagtctcaccccaagtttagtttaataaactggtgtagttcaggtggttggttgggcctgttgcaacgtggtgtagcgttggactgtttaattactactactgttttattgctttcaactactgtttttaaatgctagccttatgcaaaagaacccctagcctcctttggttatatcctgcatcatacctcctcttccggtatgacttgctgagtacagtgggtagtactcagtcttgctctcttttcccacacaccagagctgaagatcttactagttggagctgttttgtcaaagttggtttcgtcgctgccgtcaaggattgcctgtggagtggagtcgcccgctgctgaagtcaagcttcccggtttagctcgcttttatcttttccgctgcatttgtaatcttttctatttttgtaagacgtggatctgtatgtcaacaattgtcgtttgtgtaccctgactggttctggacagggatttaatgcacattcagcttagaaattctggttcgagaatttctaggcgtgacaactggccggcgcctgcgaaggtggtgggcaccacaggcgtcgtgctcggcgtcatcgcgggctccaccgccgcgctgctctccgtcaacgcgctcctcgccgagctctccgaccgcaccgccgctcgagccctcgcctgccgccggctcatgtcaaggggagagagagagaaataagggagagaggaggaagaagggtggtgagagagaggatgatatgtgggacccacatgtcagtggggcccacaattatttttgtgtgaatgacaaatgggccccgcatatatattttaattttaatgccacgtaagcgtcacgtcaatgccacgtgggacgaagaccaagtacgttaacactgccacgtgtgcgccacgtcaacaaaaccactaagggagtcaaattgtaccggttttgtaagttgagggtttaagatttctggtattgtggttgagggatacgatttagattcggtggtcagttgagagagtcaaagtgatcttattcctttctcactctccgccgccggagtctggcgagagaaggaaaagaactcgccgtcgcccaccgcgggcgaggtggccggcgacggcgtcccctcgagcggcgctctcctccacctccgcggcacatccaatctttgtccacgaccgccttcgccgcgccctcctctcctccccggcgacggcgcccgcctcttcttggctcttccgccaccctcagccccggccactggttccttggaggtatatatacgcatatatgtctcgtctcttctcctataccctgaactttcagttcttgtttgggaactcgagaatcgagatgaccgaggaagaagccagtgcattctgaaatagacaaaaaaaaaaaagggataagtccattttagaccctctaattctttagcttgtctaaaacacaccccacaactttaaaaccgggcatttgaccccctcaaactttcaataccgtgcaaaaggcccccttgagtggttttctacactgtttttgtacactaggatgccacctatatagattagttagtcccaaatgtcagtccggtccttcttcctcctcccccactgtctctctctctctctctttctctctccttcgacatgggcgcatggctcatccatctgcccagcgaggaccgccgcacacccatcgacaagctcattgctacatctcgtccctgacggagctgcagattcgccgcctgcaaccaaatcgagctccagcacctacggcggcagtgggggcggcgttcttcggcgaagggagcggtgcagggacgaagcagctccgagtggagaggcagagctcgccgaagatacacgcgtggggaggagctcgagcgccatgaccaccgcgagtttggcgcacccatccgcctagcttggtggaagcaagctcgagatttactcaatgaggagcgggctcgcctccatcagactgtggtcggcgcgaccggcgtctacgagctagctctgtcatcgctggccgcctagctcctcctctgcaatcgagctccatctccgttgccgcagaccagcgcattctccggctcagtcgagtactactcctgctcctgctcctgctcgtgctagtccgtcgtctcctgcagtcctgcttggaggcatggaagccgaacagctttagccttgggattgacatgctcatgactgcaaagatgagtagctagcagcacaacgtactagcttgccgagattagtaatagtatatatgagtagttgtgataaacaggagaagcatcacacacaggtcacaagcgacaggtcgaggtgacgaggtctatatcgcgcttgtgtcggagctgcttcttccttgctccctgcttagccatctctgcggtcgtgcgcggcttccgccgacgaccgtgcgcagcggcttggagctgctactttcccgcgacaactcctccgccgacgaccgcagctgcttgttggagatgcgcgccactgaccgctcaaccctgccttcgcagtgccgctaccgccgccgctcgtgaaaaagcaacgtcaaaacaacccagcaatatgggcttagcccgcataatcataagtgctgacgtggcgaagggttgatgtggcatcctacatttcatccacgtgtgtaaaatccatggtaaaacagcccaagggggtcaagtatccggtattaacagttagagggtgcattatacctggttttgtagttcgggggtgtattttagacaagcataaaagttcgagggtgtataatggacttttccaaaaaaaaaaccctactaatctttggttcagttgcatatggtggctttacttgggcgcttccaaatataacgtccagtggattcttgttgcaatttttttctaggcttctgttagttgcaatttttttctaggcttctgttaaacctagtctgctttgtttctaaaaccttggattcctcaattgactcatcaattacagtttattttcccaaatatatcagttccaggttttagcttgtataaatgtagatgcattttattagttgattgatggaatgcttatttgttactctgaacaagaaattccaaggtttcaattcgtttagcagtaaatcctttcgtttcaaattggtgctgtaaatcatacatagtttgttagactaattcggttctaggtttgaaaagttgctctatgttaactgattttgagagtttctatcttaattaatcatttcgtggatgaataaataggttacttctttaaatcgaatcgtgaagcacaaacatgtacagcaaaaggaaaataagttttaaatttcgttagtataaatacgttatgtgaattttccatcatgtattcatgtggttcattatgatttcaataattttaatccagggatctggacacctgctacaccttgaaatacctactagctagcagtgctgtatttctcaatggaacatctctccgaggaactgatcatagagattctcgaggataacacggacaagcgatctgaattctctttccctggtgtcgaagcagctctacaccatcgatgcagagcaaagggctactattcgccttgattgtggacttgcaacagaggctttcccaacactttgttcccggtttcccaatttgctcaaagtagagattgattactctggttggacatctggtaacgggagtcagatcgacaaccaatgtctcctttttctttcatctcgctgtaccttgctcaatgatctcaccttaagcttctgctcaaacatcagtgatcctggtatcgcttgcttaacttactgcaagaagttgatgtctctaaggctgaactccataccagaattaacttcaagtgggcttctcttgttagctgttggttgcaaggctctatcttctgtctaccttaacgattgcaagggaattgctggcagcactgagtggttggagcatcttggcgctaacggatcattggaagaacttgcagtgaagaattgcaaaggaatagggcagtatcactttttaaagttcggctcaggatggatgaagcttcggaaatttgagtttgaaaacgagcaaggcttttggagttttttccaccgagattgggatccatcatacaaggctgatacttataggtatgatctgttgtgcgagagtttgaaggatttgaggttggcgcatcttgtaacagagccagaaggcccagaaatcggacttcgttttctgttgggcaagtgcaaggcgttagagaggctgtgcctggagtatgtcagtggtcttattgacagtgacatgattgcactatcccagacctgcaagaatcttaaaagcatctcactttggctgaatcccgaacactacaatgttggtgatgatatagttttcagacatcaatatgaatgtgagaaatgctagaatgacttacattgtgaaacggaggaagtagcacttaattcctgtggtcagctctagagtaagagcatcttatggtgtactccctccgtttcataatataagtcattctaacatttcccatattcatatggatgttaataaatctagatatatgtatatatgcgtagattcactaacatccatatgaatgtgggaaatgctaaaatgacttacattatgaaacagtgggagtattttggaaaggatccttcccatgaatgaatatcctaaattctgctaattttcatattttgcattgaagttcatatcattcagcctcaggattttcattttgcactacttttggagtcaaaactcagctactccccatcgtcttctgatctaatttattgccgtttttaataggaatatgatatatcaataatcagtcgttgaaattgttcggtatgtatgcacgttcaatcacttgggatgaagactttgcgcataatgtatttgcagaaatttacctgattcctgccgtgcaataatttttgagatttaagcaatagatacattttgaacggaaattttcatctcaaattttaaaatccgagtataaattctactaataacctggaactttgaacccaaaatttgaaactatgaattcgaattttaaacttacaactcaaaaagtatcaactttgtactaaatattctttaaagaaactcgaggcaaaatttattttttttatagaaagttattaacatggttaatttagagaaaaatgtcgcttggtgtatctgcatcgtggaagtgacatagcgcgtatactaccgcctctttaaaagtgaatggagattagtaacattatgaacctctctatgggaggtgttttatttttccaaaagaaaatgagtttggagatgcaggtaattaagaggctacattttattaggaacagtttggacctacttaaaaggttaaaattgaaacaaagggcagtttttagttcatgtgaaaataggcttttcacggtgtaaggattaaaaaaatagaatatttatttttgaagaaactttacgtgtggttcctttgcaatatattatcaaaattctcattttatttggagaaaaacctatgccagtattttatacttgaagaagcaaaggagaggggaaaaaatggaaaatgaataaagagaccagagagggccacgacccaacagagggcccaggaggcccagtacccaacagaaggcccaggaggcccaggacgcgaggcgatggttttattagcactctcctccgccgccggagttggccggaggatggtggccggcctccgctcgagcgattcatccaataatcgagcagcactcttcacacccagaaattcgctatccaaatttcaagcagaatgtgtattaaaatctctttccagaactagctagagtacagaaacgacaaattgataaatagatccacgtcttatacaaaaaatattaaataattcttacaaacacggtggaaaataagcaaaaactctaaactctgatcttcaggataaagcatagcttcctccgtaaaccacaggcatccttaacgtccgaaacaaccttaatcctcatagaactcaccatctaaataattctctgcttctggggaaaaataaagcaagactgagtaccaaccaccgtactcaacaagtcataccaatgagaaggtatgatgcaagatattcacaaaggataggctataggatatttgcataaaagcaacatttataaatcataatttgaatatagtttaaataatagatataattaagcaatattaaaatatcactacccaacactaaaccacgttgcaataggcccaatgttggtatttcttaacgacattactagaaatattcattcccagcaatgacgtagaaagtcatgatatatttatggttacagaagtaatctacaagctcatggatataccatggtagcatttcacccggatgtattctaaggtatcatatttatcttatctcaagggaagatttgaaagagagaaccatgctaatagtcatatacaaatataatatttgccttcatcaaagtctaagtagaatgacacaaagcaaagcttttagattcattctaataaataattctaactaaatagaagaagagatggaaagtaatcaattcttatacttctaatacacgctcaatctctaatttacatttgctagtatataatcatgtggccaataccccctaacagtgcgttcctggtgtttcaagagaccatcccgggttgccgtgtttatgacgacagcctgtcatggccgtccaatcggggctaaatacggaggagtaccctccccaagaatttgtcttagaaatatatactaacgtggaggaatatccgtactgagctgtcaccatcaacggcccacctctacagtcccgtagcatatatgcccagatagtgatatttagtaatctaagcaccatgcttacattaataaatactactctacatgtttgcagatgatatagagcaatcgataaatcagacactaaacccacaccaacatattcaagaatcttttacaacacatctaataaacactactttcacatatatagatagctgtcattattagttttattacaacacttctaataatgtttgaagtacctacttatagcattacattattgtcttgagggatctttgtccttatgactaatgttggagctagatcttccacctccataagtattgaagaacactcaaacctaacacaagcgtacaagcatacaaagtaaagcaatcaatatagcacacacacaatcgatcatctggcaaattctgtgctcatcacggttttcttctcaagatcataaactccggtgctattgccctcggtgtacaacaaggaagttgtacacatgctacccatcactgcaaagttgagaccctcgagaaccagaggcggctgtgggcattgctgcacttcatctgatagtgctaatcgacgaagctcctttgcgacttgctccatcaccggccttgacattccaggaagagccaagcattgaatcgccagaaccgcaatctgatgtaggactcccatgcttgcttcatctattatttcgctatcaagaagctcatggaatgttccatccatcatagcctcctgaaacattgacgccaatgtcttactttcttttgacaatggcctcttacttgttagaagctcaagaagaatgacaccaaaactgtagacatcattcttggctgtgagctgatactcaagcaggtactctgggtcaatatacccaggtgtgcctttaagcatagattgtgttttctcatcaatagttgaacacccaaagtcagacacctttgctaccaatccttcagcaagaaggatgttggctggctttacatcaccatggagtattgggtgtggtagtgagtggagatgcccaagtgcatcagctgattcggcagctatccttaggcgggttcccagcgtgacatggaacctcttgcttctctggaggtcaagcagctcctgtaatgttttattttccacgaattcatagacaagcataggcgcctcaaactgtaggcagcagccgagcaacttgacaatgttaggatggttgacacgacaaagtatgaccaactcttgcatgaagtccatcttcctactctcgtcaatctccttgcacttttttatcgcgacaacagttccatctaagactgccttgtagactgttccttgccctccttcaccgatgatttgtgccttgttgaagttttttgttgcggtctctatctccactctcttgtagagtgtgaacccgatattgccttctgctttcatcatttctagcaatagttggcctccatgttgttgaaaaaactcatcagtctgtcttaacaaagcttgttttctaatgctccttttgtgccgaatcacttcccatccaaggaaagcaaacaggccagccaacacacatgcagcaattcctagagagcgaagatttatcattagtaaaaaaagatttaagcaagcattttagcaccagtacagtttttatattgatgttattgagaagtccaggaccagatcaagcagatcttaagatgcaacagcaactaagttggaataatatgtgccctaccaattgccagctgtgcttttagaggtaagaagtccttccgacatcctccaggaatagttgcatttccacggctacccgcacggcagaaacaatcaaaatcgccaggtttgttatggcattctccgtgacaagggtaattattagaatcttggcattcattaatatctacaatataatcaaattcaaaggcatttagaaagaaaatatatagttatacggtatacttataataagtaaagaatgtatgtacaaactatacagaactgtaaaatattccccccgtcccaaaaaaacgagtctagaacaggatgtgacacattctagtacaatgaatttaataaaggtacgtgcatattcgtaatactaaaatatatcccaaccagtactacagtactaggttagttttttattggatggagggagcagagaatagcaggaaacaaggtggcccactctgctaactgttctgccctctctcctttcacgtctttagaaaatatatagaaaaataagataatttcaagaaaaaagttgaatgcctagacaactaattgaatcaactatacgtttctgaaaattatgaaaattatttataggctccttgcgtgacatagaagtttatgtatatatattttatattttttgcgagattaattattttggaaatataatttgcctcttatatgctacacaaaaatattttcattgttttcgtgtacgtgaatcatctttcataagctgcccaaaaacattttgtgctattatcattggtgcaaacgattgctcttcatatgctgaacaaaaaatctaattaaaaaaacaaacttaattaacaaatatacaagacttctatactgcacaaattggctacatataatattttcttatttgttggaaatatgtatactgaggcattttagttgtcaatatgtagtggaaatcatatatttggtgcaaactcgtaaacttttgtctagacttcaaaaaaaaaatcaaaatattcacacatatagataagatgatattagacaaccatatgcatacaaaaatgtactaccaaattcaactttgtctgtgagatataaattaaaattatcaagccgctatgaaataacattattcctaatgtttctctttttcttcactatttactatttttatgtcacaacagtcaagtttggtcttgtagttttgtatgattttctaatatcatattatctttatgtgtgaactttttgagatttttttagaactttttagatgttgtttgcatggttaccaccaggcttcaaagatgtggtctccgccttatatttgccccatttctatttacaaagatatttgaacatctgcaaggacaaattttatggttcttcaaaggtactggggaagtacccagttttaagttaccaaaatttatactacctcctcaacaaccattaaattttgttttctaaaagatcattcactttattggcatagattagaaaaattgacaaactatcactactacataaactttctgtacgaggacctctttagacggcagacggaccgtaattggcggcataattcgacctccattttcgcatacggttccttaagagacccgcatgcaaaaatctattttcataggcggacctcttaaggggtcgcatgtaaaaatgagtctattttcgcatgcaggccttttaacgatccgcatgcgaaaatctattttcggatctctttagggtccgcatgcaaaaatttttccctcctcaccacttcaaaatttttcacctcttatcctcttctctctcaacactcttgatattttcccctctcttacttcccctctatctctctcattttctcctctccctctcattttcttcctctcctccctctctttctctcaccgagcgggaggcgccgggagcgggcaccgcctcgcgacgcggactccggcgcggcagtgggcgagggccacagcaggggcgggcgtgggcggcggcggcggccctcccccacccggatccgctggcggcggccctcctggtgcctcctcgccgtgacgggaagaggacaatgtcgacggtggtggcggcggcttgaggatgacggcgacgattggaggataaggatgatggcgacggtgactggaggacaatggaggaatggcggcgggtgtattaatttttctatgtttggaatttttattttatttcgcgatttttccttttcgagtgcggccggtgaaaatcggatttttgcatgcggttgcgcgggccacatgtgaaaatcgtgatttttgcagaccttttcttccatgcagcccgcccaactgcatgcgaaaatacgttttgtccgtttgcaaaaacgatatttgtagtagtgtatgtgacgtgtattacatatatagagataaattggagtatttaatatgtcccaaaattttgacaaattaaccgttttacccaacatatttgaaaaatatatcgtgccaaaaactaaatcctaaaataaaccacgagctctgcgccaaactcgatggtgcggacatataacgtattggtgccatagatattggcactgagctatggtatgaggtagcgtggttttgtcatgcttgttagcagggctgatcacctctttacagtataaaaagctctacagccagtatttaccagatttactgacctagccaggtgacttgtgatttttgctttcatccacgcctagccccctttttcaatgttttgttgtagcaagcatatacttatactttacaccgtgactctaaccaattatctctctaaaataacaaattctgtttataaatttactttatttcgaacttgagaaactatgaaaaggtcatatattacatgttctagaactttattgagatatttttcattcattataacttgataactacattattttttgtcaaaataaatatattatattatgatataaatatgaaagagatcacaactttcagcgtagcggtagaaaaaatatgcatgtaaagaaaaaaatgatacagttcgaacttttttaacaacatcaatctcgtttggtgaatgtagctgaattttttaacaaccgcagtggaccagaggtcagtgccaatgcttctaccactaaccccatatgacatggcaaaacaacctttcacctcatactatcagcgtcaacatttttggtgctaatacgttatagatccactccatcgagtttgatgctgaacacgtggttttttcttgaaattagtttttggcatggtttattcttgaaatgagttggttattttgtcaaaattccggtatatttcacctgtatgttatttttgaaatattctgctctgtaaaatcctttaaatttattatactgcatgaaacatgcatgaataatgttatgcttttactcactggctccttgccaacagggaaaatgagaacggggaggtcagtaggcttggcaaaggacatgatgtccttccttgagctcgagctccaactcctctgatccaccaccccaagggctgagctcaaccttcgtggcttcgtccctttcgcacgaagccatgaatgttgagctcggccctctgggacacacaggctcatccgccttagcttcacctgtttctcccgagatcgagcgctcaagctcattatttggcagtgaaggaacgaacctcgccaatgttgtgagaagaggggctcaccggcatgcaccgaatcgggcagagggtcctctatttgtggctccagtagtccaaagcttaaagtttttttaaaaaaactggtctaaagtgtaatcaactctttaaacatcgaccatcaatttcctttatatatttgattcaacttttgaaaggtgacatggtttatatttttttttataatttattttacaacaattaatcttaactcttaccctctctgtcccaaattatagcgcactctctgtttaagaaaaaaatcaaacttgataacttttaactaataatcatattaaccatgctaaatattatgctatatcactagattcatatttttaagttactttcatgtgatgcaaattttatatttgttgggaacataacataaaataaattaattgtcaaagtatatcaataaagaccgtgtaaaaaatataagcctataatttgagatggatggagtactatgaaaatctaatttatagtttatttatttataattaataaaatattgtgttggtacataaaaaaataatacactggggcaaaatcttttcatccatctactaacgttatggacgactaacaaaattgcaaataaataaaagacaaaagttgactacaagaaaggggtacacgagccaattataggattgaaaataattaaccgaaccagtcaacttgggcaaagagaaaaaaaattctcagaggaaagaactgtgcaattacaatttatattaatctttcactaacatgtactccctccatattttaatatatgacgccgttgactttttgacaaacgtttgacctttcgtcttttatgtaattataatttattttattgtgacttgatttatcatcaaatattcttcaagcatgactaagacgagtcatacattaaaataaagaaacgttggttataaagtcaacggcgtcatacattaaaatacggagggagtatttgttataggcataatatttaccttgacagccgttggaatcttgaaggtagggattgccttggtatccctttttgcagttacatatgtatcctggtccgttggtggagttgaggcagacgctatagtcacctttgcacgcgtacgacgcaggatttttttgtgcttccacgcagttgttagcagtccggatagc

SEQ ID NO: 4489 - DNA, 9405 bp, Oryza sativa
ggtgttgaacgcccgtgaagttaggtaggtggttgagaaggtgaagctagacgattccatgagcaccgcgtagctacagggggtgcggttgtagatcccggatgtgttcagggtgtagtcgaacatgacctcgtaatagcttaggcccgttgagatgtttgtctggcagcagcctatcccgacgcagctgccgttgatggcgctgctcaagtcacctcgccggcagacggacacgcacccgctcatgtacttgcccacgttgtaatcgtcgaaggtgtaggccagcgtccggcacccgatgaccgtgaacttgttggccgagtcggagagcctgtagggcgtgcccgtgaggttcagataccacacgtccgcagggttcatctgtcgggacgtgcggttgtagcaggaagaagatacgtgattcattacccgggcctgaccattgctgagggatatgacttcgacatttccaacgaacggcttaaaaccgttcgccgtattgttgcagtcgacttcgaagctaggcgccatagcgcagccgcttgagctgatgccgaacgggtatgggatgcgtacgccgccgcagacggagtcctggcatgatcgggcgattggcccgcccgccgcgagctttatgctgatgagaaatagcactattagtaggcaaatatgtccatcgactgcgccgcggatagctgcatttctgtggggaggcatgggtgcatggatgaactactactttttatttggctacctctctcgtcagttcaaatgagtggtataagaagatgagagcaaggtacagcactgataatttctacttggatgctaattaaccataattaacaaaagggaaaatacatccgaagacttggactaaatcaagtcttcgcttatcttcctaatgatctgtacccatcgtcttccactccctccctggaaaacttgatggcgttgtgattaatgtccatgcagaaattttccacctcacgacacttgtacagattcagccatccttgacgagacatctgtatatgtcgagctaatgtagctcgacccgttcccgataactcatttctaacggttcaaaaggtatcatgtttaagatataattatcggggataatccgtcaccgatataagtcacatttgtcatgtcataattctaacacatcacggatgacctataacgggtcacaaccatgccccatcacggacaatatctcatccgtgacgggtgtaatgagatgacccatcaaagatgagagcactcatccgtgacgggttttaattaacacccttcacggataacgtaatctatgaagggtgacagttacgaactgtcacggatgagaaaaaactttaaatttttgaaattttcaaacaaccttagacagaggcataccctatatgaaagttgtagatctcgagatctataactttaaaactgataacatttaaatttgagatagtttacatgcccgaatttttccagttacgtatatgaaagttgcgcacaacattcccagctcaggttggccacctacaatacatttagattcttggtttcttctttggtgttagcttccttggagacgtcctcctatgggttgagaatttggtgttagctcggggccagctggatccggccgtcgcgacaataggggaggctggatcagccgacgacaccgacgggggaggccggatccgccaccgcgacgatgggggtggctggatctgctgcgcgatgacctgggaggccggatctgccgcgccacgacaacgacttcaaatttttgtgatgctcgaatgtttgggtgaatgtaaatttttgtggatttttttaatgcttgggtaaatttttgtgaaatttttgaatggtggagcattgacagaggcggatggagccgtgtcgctccgtccatcatttttttaaaacttggccagcattaacattagtggctgacacattggcttaagacgaccgccaacgaaaatgaattatcgctggcggtcaataaccgctagcaaagatcttgatttttcacttgcctttgctttgtggcggcttcaaattccgctagtaaaaacccaaaatagccgccacgaaagatggttttcatagcagtgattctcggtctgctaggtcttctgcacatgtttcgggtggatccagccatcttggtaactccttcctttctttatcttcagtcagtttacaatttcaattgatttggctttgtgtttttttaagaacataggagcttgaatttaacagtatgattcattagttctcaattgcattatatgcactaagtcctgtcagttcatttttttaaaacatgttagaaatcgatttttttttccattgcatggaaaattattgagtaagatctctctctttcgtatgtctattttgtccagggaagttcacaaccacttctgaaatggtttggtgtttaatgtttaatttactgaatttttaaaaagaattcaatcttctttaagagcaagccatccttttacgaggagggtttttactatttgttttgactgggttatctgattgatatatccatctaatagggacactatcatccctattgcactacttggccattttatcttatgctcttgaggtaagcgcttgccagctgcaatatgttccaaaatgaaattctgaaatcacgtgtgtataccaatagtaaaatttctaaatgcactaccatagcatttcctcatgtcgaagcaaagcctcggtttgctttaccactgtaggcacgattgccactgtttccaatgtagaaacccaggtgtgccattttcaatcattaggccgtgaatgttacaccattcttatgatttttcattagcctgcgtttcctttgatcaacagctattgatataagcgttttaactcaattttgtttgaacgtattgtttcatggaaaacttaagttaatgttttcatgacatttatggttactagctagcatattaattggctcgataaaaaaggatgccatcacaacgattgcaatttttcatgagctgtcaagtgtcaatactttcttcttatactacagcatgatgtctttgttttatcactaagattgacaggatccatggatgtgatctattgtaattgtatctttattagttttgaactaactgtcctatcatacaatgttagtgttgatctcttagaaattcccctaggaatacgtggaggtatcaactagttaagaatgatgtgtatagttttggagtaactttggttgaacatctgaccggtaaaaggccactgtctaaagaaacgaagaccttgacctcaatttttaatataactagatgaataccccatcgagttgctgccggaaattaagttgtatagtatgtacaaataagctatattatattttgtaaaccaaaataaaatgacttcctatgttttatataattaacacatgattgcaaatatattgcaaggtgaacatattttatgtaattgatacttatgaattttgaataaaaacaattgaggtttgtatggtttgaggagagaagaaagaagagactatttttaccatagatctattatccaaagactaaaaatacttgggatgatgtggcttcatgagataagagagaaataatattaactacatttagtagggataaactatataagtatatatatatatatatataggatgaggctgtaacggatggcaacgagctccttgatagttacataattaatgaagacaacgtgagagtgatccatcgtgctgcagcgctagcggtcgagtcaattcttgactattctaggtacgacaaggccagagatgaggcatgtggcagaggagcttgaccaactagcattagctgatgaagtgcagcaatgtccacagccactgctggtgcttccgggtcttaattaggtttatgacagagatggcaaatacacgttcaacgtcctcatggcaaactgatcgacagcaagactagcggggtttacagccttgagaagaaagccgtgatgagcacagaactggcctagagagagatgatagatatctaactcatctgcttgatccatatcgatgtaagtgagtgtttggcacgcggccatggttgtgaacttgatgctagtgttggaaaatctgtgtggcgttttattggttaaatctagctaatgaccatctcctgtggttattgtggcaataattaccgtaccctgtggtgttgcagctgagattgaagccggacaaagcacaggcagtgttcaggccaccagacggataattaaggaatctctatgccgctccaacttctctcgcagttggctgtaggcctctactctccctatcccaataatagacaaatcgtagttatgtatctcatgttcaaatacataaccaggatttatctttttttttttttacagacggtacgttctagttcatcttccattctactgatcctatcatggcttggacttgttctaagtctatatatgcatgtcttctagtagtagcactactacaatacccattattccgggcggtaggatagattatcctgtgcggtcacccggcctgcctgcagctcctcgtctgggaaaatctctatctccactctcttgtagagtgtgaacccgatattgccttctgctttcatcatttctagcaatagttggcctccatgttgttgaaaaaaactcatcagtctgtcttaacaaagcttgttttctaatgctccttttgtgccgaatcacttcccatccaaggaaagcaaacaggccagccaacacacatgcagcaattcctagagagcgaagatttatcattagtaaaaaaaagatttaagcaagcattttagcaccagtgtttttatattgatgttattgagaagtccatgaccagatcaagcagatcataagatgcaacagcaactgagttggaataatacgtgccctaccaattgccagctgtgcttttagaggtaagaagtccttccgacatcctccaggaatagttgcatttcctcggctacccgcacggcagaaacaatcaaaatcgccgggtttgttatggcatattctccgtgacaagggtaattattagaatcttggcattcattaatatctacagtataatcaaatacaaaggcatttagaaagaaaaatattatattttttgcaagataattattttggaaatataatttgcctcttatatgctacacaaaatattttcattgttttcgtgtacatgaatcatctttcataagctgcccaaaaacattttgtgctattatcatttctgcaaacgattgctcttcatatgctgaacaaaaaatctaatgaaaaaaaaacaaacttaattaacaaatatacaagacttatatactgcacaagttggctatatataatattttcttatttgttggaaatatgtatactgaggcattttagttgtcaatatgtagtggaaatcatatatttggtgcaaactcgtaaacttttgtatagagttgaaaaaaaaatcaaaatattcacacatatagataagatgatattagacaaccatatgcatacaaaaatgtactaccaaattcaactttgtctgtgagatataaattaaaattaccaagccactatgaaataacattaatgttttatatcattcctactgtttctctttttcttcactatttactatttttatatcacaacagtcaagtttggtcttgtagttttgtatgattttctaatatcatattatctatatgtgtgaactttttgagatttttttagaactttctagatgttgtttgcatggttaccaccaggcttcaaagatgtgctctccgccttatatttgccccatttctatttacaaatatatttgaacatctgcaaggacaaattttatggttcttcaaaggtactggggaagtacccagttttaagttaccaaaatttatactacctcctcaacaaccattaaattttgttttctaaaagatcattcactttattggcatagattagaaaaattgacaaactatcactactacataaactttctgtacgaggacgcctttagatggcagacggaccgtaattggtagcatctgtaaaattcgacctccattttcgcatacggttccttaagagacccgcatgcaaaaatctattttcgcaggcgggcctcttaaggggccgcaagtaaaaatgagtctattttcgcatgcaggccttttaacgatccgcatgcgaaaatctattttcggatctctttagggtccgcatgcaaaaatttatccctcctcaccacttcaaaatttttcacctcatatcctctcctctctcaacactctgatattttcccctctcttacttcacctctatctctctcattttctcctctccctctctttttcttcctctcctccctctctttctctcacagagcgggaggcgccgggagcgggcaccgcctcgcgatgcggactccggcggcggcagtgggcgagggccacgtctggggcgggcgtgggcgacggcggcggccctccccctcccggatccgccggctgctgctctccccgtcctgatctgccggcggtggccctccccgcaccaatccgccagcggcggccctcctggtgcctcctcgccgtgacgggaggaggacaatgtcaacggtggtgatggcggcttgaggacgacggcgatgactggaggatgaggatgacggcgacggcaacgacgactggaggacaatggcggagcggcggcgggtgtattaatttttctatgtttggaatttttattttatttcgcgatttttccttttcgcgtgcggccggtgaaaatcggattttcacatgcggttgtgcgggccacatgtgaaaatcgtgatttttgcagaccttttctaccatgcagcccgcccaactgcatgcgaaaataccttcgtggcttggtccccttcgcacgaagccatgaatgttgagcacggccctttggtacacacaggctcatccgccttcacctgtttctcccgagatcgagcgctcaagctcattatttggcagtgaaggaacgaacctcgccaatgtcatgaaaagagggctcaccggcatgcaccgaatcgggctgagggaggaccctctaggccacctatttgtggctccagtagtccaaagcgtaatgttttttttttcaaaaaaaaaactggtctaaagtgtaatcaactctttaaacattgaccatcaatttcctttatatatttgattaaccttttgaaaagtgacatggtttatatattttttttataatttattttacaacaattaatcttaattcttactctctctgtcccaaattatagggcactctctctttaagaaaaaatcaaactcgataacttttaactaataatcgtactaaccatgctaagtattatgtatgttgtatcactagattcatatttttaattacttttatgtgatgcaaattttatattcattgggaacataacataaaataaattaattgtcaaagtatatcaacaaacaccgtgtaaaaaaatagaagcctataatttgagacgggtgagtactatgaaaatctaatttatagtttatttatttataattaataaataaattgtgttggtacataaaaaataatacactggggcagaatcgtcttttcatccatctactaacgttatggacgactaacaaaatggcaaataaaagacaaaagttgacaataaaggggtacacgagccaattataggattgaaaataattaaccgaaccagtcaacttgggtaaagagaaaaaaaattatcagaggaaagaactgtgcaattacaatttatattaatctttcactatcatgtattgttataggcgtaatactccctccgtttcgaaatatttgacaccgttgactttttagcacatgtttgatcgttcttcttattcaaaaacttttgtaaaatatgtaaaattatatgcctacataaaaatatatttaacaatgaatcaaatgataggaaaaaaattaataattacttaaattttttgaataagacgaacggtcaaacatatttaaaaaagtcaacggcgtcaaacatttcgaaacggagggagtatttaccttgacagccgttggaatcttgaaggtgaagctagacgattccatgagcaccgcgtagctacagggggtgtggttgtagaccccggatgtgtaaggtgtagtcgaacatgacctgataatagcttagacccgtcgtgatgtttgtctggcagcagcctatcccgacgcagctgccgttgatggcgctgctcaagtcacctcgccggcagacggacacgcacccgctcatgtacttgcccacgttgtaatcgtcgaaggtgtaggccagcgtccggcacccgatgaccgtgaacttgttggccgagtcggagagcctgtagggcgtgcccgtgaggttcagataccacacgtccgcagggttcatctgtcgggacgtgcggttgtagcaggaagaagatacgtgattcattacccgggcctgaccattgccgagggagacgacctcgatgtttccaacgaacggcttggagacgccgttccccgtgtcgttgcagtcgacttcgaagctaggcgccatggcgcagccgcttgagctgacgccgaacgggtatgggatctgtacaccgccgcagtcgtggcatgatcgggcgattggctcagccgccgcgaggggctgatcagcagcaagctttgtactgatgagaaatagcattattagtactaggcaaatatgtccatcgactgcgctgcggatagctgcacttctgtggagaggcatggggcatggatgaactactacgactttgtttgtgtgtatggtcggtcactcgagctacctctctcgttagttcaaatgagtggtataagaagatgagagcaaggtgtacagcactgataaattctactccctccgtattttaatgtatgacgccgttgactttttaactaacgtttgaccactcgtcttattcaaaatttttgtgcaaatgtaaaaatacttatgtcatgcttaaagaaaacttgatgataaatcaagtcataataaaatatattataattacataaattttttgaataagacgaaaggtcaaacgtttgtcaaaaagtcaacgacgtcatatattaaaatacggagggagtacttggatgctaattagccataattaacaaaggggaaaaatacatccgaagacttggactatcaagtcttcgcttatcttcttaacgatctgtatccatcgccctccctgccaaacttgatggcggtgtggttaatgtctgatg

SEQ ID NO: 4490 - DNA, 15276 bp, Oryza sativa
agtcttcataacttgttcctggtagggtccatctcaggcattgtttatcacagttctccttattatacatgaagccttatgattcaattttctttaaggaaatcagatcactgaaaccttgaggatatcttttgaaaacacagcccttggcatttattgtctggaaatgatagaggcagctaacagatgaaggaagggtctcaaaagtagaacttccgaataagccaaggtaacgcaaatgttttgagttgcttatgctctcaggtaactttctcactgttccccgcaaaaaaaaactttctcactgttgaaagattaaaaatcaatacacggatattcaggagttccttgaacaaacagtcaatcacaggagcaaaatgtttaccacttcggtaagattcattgcatactagggaccgcagttttttattgtgtgtgcaaatattcactaattctgcacagctgatattttcagtagtgaatattgacagatggcgaacctttgaagggattttagctaggtcacttacatgttgtatgatgaagcactcatctttagagactagctgtgcagtatcatgcatcaagtcatgaattacatacgtaccatgctcaccagctgctttctgaaagaatgaccgatttaaaaggtcatcaaagcaagagggtgcattttcaagctccacataaccttgtgctaccgaaatatctgctagaaaatccttttcaaatttgtgatcctttggatacatggcacagattgagaagcatctttttatgtcctgtggcaggtaaacgtaacttagtcgaagggctggcaaaatgtcagtctcctcttgttctaatcgccatagctcacttttcaatatgtcctcccagtgctctatgcttaggttgcttttcaataagtgtccaagagttttggcggccaaaggtgaacccttcaacttgggaagtatagcttcaccaatgcgctccagctctggcctgttgcgacaactgttgctccaactctggacggatccgaatgcacatagtttgaagaaattccagaaaacaccatgttgcaatcccttcagttcatagtgattactgttgctgactaggttagcaaccttggaagatctagtggtgaccaaaatcatactgccctcaagaccattgcttaaagttctatgaaatgttctccatcctttctcatcttttaagacatcatcccacatgtcatcaaggacgagtaaaaacttctttgacttgacactatcacgtaaattaaccataagagtatcccttgtatcagaatcttgtaactttactccaagagacttcagaacatctcttgttaacctgtttacctcgaattcatccgagacacatatccaaattatgcagttgttgaagtgattccgcaccactccatccacacagatttgttgggccatggttgtcttcccgacacctcccatgccaactattggcaacacaagcaactctgtcctccttgcttcagctgtagtgttgcatgccacaggcctgcctctcttgtgtccacgtactcttagcttttgtttcaagtcctccagttctttttcacgaccaaaaatctcatctggctcgtcgaggacatgacatgtctctggtctgacaattttgtcaaacttcttgggtgttttgtgcaagcctaaactgttagattggtcaaaaacatgcttcagtctttcttggatttccatcactttcctgaatttgccactgaagttaacattgcccaagaactccaaaaagggttcatgcaagtgatcttgccctaaattcttgctcgccttcaccttcaccttgagagcataataattgtactcatcaaggaggtcctcggcatcgtacactacatcctttatctggcgaaggtgcccagcttctgtttctttgtggctatgccactcaaggcggtcgatgaggtcatgcattgtgggtgcaattaatggttgtttggatcacccaaaggttgtgctcaagcttctgaagatcatcctgaatctgatgcagtgtagctgttcttctttctccagctgatgctgatgctgatcctgtccctgctgaacccacttgctgttgctgctgctgttgagaacatacggcagctaagacgtgtggtgtgacccagttgaagaattcccggaacgcattggcgtcagcagcaagaccagctgctcccctcaatattccaacgaccttgtccatagccaattgagcactgctgtatgatcataaacgcaaacaaaatcaaactaaacgctaagattttggagcaggtggtcagggaatgttttaccagggacatgggtggcggtctagcctgaagattggtgctccctgatttttactgctttccttctcttgttacaaactcttttgtgggtttgtatgttttggctgtgtgcatcctagttatgcagaggccgggaattttcttagtatggttctatcaacttgatgtaatcgtctgagattaataaaagcttcctttataaaataaaaaagagttccatgtcgggagagatgcaccatgccaaagctacatttactgtatctagtggttcaaggcaaatctatcacctatgtatctactattttttttaaataaagtctagaaattagggcgggtctatattatagatccataactaaaaatggacaggaactttgttttgtgagagtatagcctataggaactaaagatatggttttattaaatacaattctatctcaaataggcatatgatttagaaggaaatttgactagttttggttaaagctacatgtaagacaacaagcacaattttgaaattttgttcaaacattacttgtctagtataaagttgaacaacacaaaaggctgcaacatgcagtctgcctgtacaactaaaagtataattgtattaaatacaattctatctcaaataggcacataatttctcaggaagttctattagttgtggtgaaagcaacatgtaagacaacaggcacagtttgaaatttttctaagcttactactacattataaaattgacgaagaacacagaagactgaaatatgcagactttgggtacaattggaaaaacagtttctgttgataattgtagtactattatctgatactcaaaaaatatcaagctggcataaatggggaaaataattggatcacacacctgggtccttaatttgttcacaattctttctacccaatgatcagaccacctagctagctcctcttcttgatcttgctcttcttaatgtctgctacaagcaaagcgaccacctgcttattcaaatgttagaacaatatgactagagattagataggaaaaaagagtacagatacactagtttcagatagagtaccaatttcatctcccaaattcaaacgaagagaactagatgaaatttggaagagtacaacctccaatttcagttagttcttttcataggtagaacaagggactgaactcatttttgggggcataggttgcttccacgtacaattgctcggataaccctctgggaaattattaagaggaccccaggatgttttcagaacatggcagaaaaaaagagcctgccgctgccggcggtggcctccacgactcgaccgcgcacggttgcttggaatggaccctacattttaacaaaaaaattgagagcagaatttaaaatagattgtgttcaatttttatacatttttatctaaaagtattttagggctaggtaaataagattgtgaaatactcattaccacccttaacgtgccaatttgatattttgccatcctccaaacggggtttcgtttttgctgtctaaaagcatctccaatagcctctttaaattggactctccaaacacctgtatagctaactatctatctgatttggctaatcaaactagatggtcactccaacagactctctattaatcctctctaaaataacaacggacccacatgtcagcctctactcctcttcttcctctctttctcccccttcttccttctctttctttcttttcccttttctttccttcccgtcgtcaaccaggcggcgcatgcagcgcggggaggtggcaggtggcggcgcggcgcggggaggcggaaggcggcgcaccgcgggtaggcggcgcggggaggcggcaggtggcggcacggcacggggaggcggcaggcggcgcaccgcgggtaggcggcgcggggaggcggaaggcggcggcgtggcgtggcgcggcgcggcggcgtccttgctccctctccccacaggatctagaggccgccgctggccttgccaacctcggcccgctctgctcgatgaagcgacggcggcggacagcttcggggggcagcggcagagcttcgggcagggatggcgacggcgagcgcagaggctagcgacggtggcggcggctcgcgacgatgacctcgatgacgacccgacgacaacgactgcgcagaggaatagcatgtggggcccaccatttggcgaggagttttggctggccaaatctaaccagctagctagcgagtttggccatctgttggagctcttttttttttgtcttgaatagctaaaatttggcttggagagactaatagagaggctattggagatgctctgaagagccggcctggctcaacacgacattgacccacaaatggtgcagaccattaaagcatcaccggtacgactcatggaacaatccatgctatgctaaggtcgagttgtatgggcccaaatatgacacgtgggtcgacgaatgtgtattaatatgtttggcatatcaaaattaaaatataagggaaaaaaaggaaaaagaaaaagaaataaatgtgaaaaagatgataaaaaacaggtccccgacccagccttctcagtaaagcagcaacaacatcagtacgatacgagaggggaaaacatgagagagcttgttctctaacatgtgtgatctacaaggggcaaaatggacctattgggttggttgtccacgatggcggaataagtccactttgacttcctcaaatataagtccaatctaattcgtatccctcaatcgtaataccagatatcttaaaccctcgactattaaaaccaggttgacatttcgcggcggcaccgatggcagggcggcctcgctgttgtcgccgaagccaatggcgctgcttagggagtgggatggggacggggagagagaaggtgaggaagaagaagggaacaagaaagagaggatgacatgtaggcccacatatgctgacttagtggttggactaggtcagcgagccacgttagcgaaaatcaacctcaaagccaccgagaaagttgttttgcaccagttttagtagttgagggtttaagatatctactgcgattaaggaatacgaattaaattgtacgtatatttaaggaagtcaaagtgaacttactcccatgttggcacactcatctgtcataccacatagaccaaagtagcaacaaaaacgtaatggcaattaatagtagcatatggagaatggttgtttcttatagtggcaaatagttaaaatttttcggaatcacaaattctcatcttgatgcctcatgctcgcatgccacacagcatctaaatgttcttgtcatgtagtccatctattccataaaaaataacttctggagatgaatctggataagtgattgtcagattcatcccattcttcttataacggagggtgtatgtatcgctcgttgttatcatacactccatccgtcccataaaaattgagatgaatctagatatgtttgttagattcatcccattcttttttaacagagggtgtatgtatctgcgagacactatttcaaggatttcatccccaagaacagcagatgacgatcctattgatcgatgtaattgaagatagggtcgaagtgctcgcaccacaaagtttttcacagtatggaggcacacacgtgtacagtgtggcggagggcggaaaaaaatttaggtgtggccaataaactaccacacgcaagagctagcacagaacaagaattaagaaaaaaattcaatacacaatattgtacaacgcaacattatctcaaataagtcatagtaatgagcactaatcacaagttcacaattcattatccatttgcaaacaaatgtaaatataaaagtaggtataaaaaaatacctcaattcctcaagattcactgatacgctttgaaattgcaatgttctgaaattgtaaaaaaaaagtatatttgataaattttggtaaatttgcaaaaaagtactacggccgtgtttagttgttttggtaaatttttttttatgtacatggatatatatttgaactattaaacatagactaataacaaaacaaattaagattctgtctgtaaactacgagacgaatctattaagcctaattaattcgtcattagcaaatgtttactgtagcaccacattgttaaatcatagtgtaattaagcttaaatgattcgtctcgcaatttacatacaaactgtaccattattaatacttcatgcatgtgtctaaacatttgatgtgacagaaaagttaaaagtttgaaggaaactaaacacagcgtacctctctgtgatgccagtgccttcccttttctctttctgtccattttctgatgatgggagattgggagtgatgcctgatggctgctcctgcttatgcttgccttgcttggtgcttggtgctgcggcgccagccgccctgcttggcgcctgcgcggctgcgcccctggccggctggccactaactcgccgcctgccacgccgcgccgccgtccggcgtggatgccgcagctctgtggctgcgcccaggagcccggcagacggcgggacatttaactttatgtcacttttaagatgttgcaattaattatttgtcactcgttgtctatgacatatgggactatgtgtcaagtagcaaataatttaacaccccttataagagtggcaaatagttaattattccgcaaatggcagccatgcctctcctcgccttcgcctgcccttccacgcgcggcgtgtcgcttcaagactctagcagaaagtaccgcagtagctgctgtcggccgaaggggattgaggattggggagggggattgctggattgggtgttgggggaatcgatggaggtggatgagatggggaaattttggtctagggttacacaaaacaagcccaatggcccgcgggcactggagttcgccaacttcgcgaagccaatgggaggcaccgccatcaacacggggagctcgccacggttcgacgtgttcggcaaagacttcgggtgggggaggccggcgaccgtgcggagcggcggcacggacaagttcgacggtaaggtgacggtgtacgaggggccgaccggcgccgggagcatgtcgctggaggtttgcctgactccggtggcgctagcgaagctcgtcgctgatgaggagttcatggacgcggtgaccgcgccgtgaactgcaggggtgtttagattcaggagtgtaaagttttggcgtgtcacatcggatattatataggatgtcgcatggggtgttcggacactaataaaaaactaattatataatctatcagtaaaccgcgagacgaatttattaagcctaattaatccatcattagtaaatatttactgtagtaccacattgtcaaatcatggagcaattaggcttaaaagattcgtctcgtaaattagttgcaatttgtgcaattagttattttttaagtctatatttaatactttatgtaggtgttcaaatgttcgatgtaacatggtgtaaagttttaggatgagatctacttactacccattgatgtcagtatcatgcacttcctatccgtttgtttcaatttgtgagcagaaaaattgagaaatttcatcatcatgggtggcagagaaaatggtataacctaccatgtgaggtggtaggtggccagactctgacaatggaggatcagatcaggagatcatgggaaatgatttcttttaaactattgttgcttaaactatcacaaatttcatcaccatgcttcgctattgtttgtttgcacagtcgaaccaattagtatcgctgcttgcgtgtcttttaaatagttatgaacatatttaaaaaaattaacagatatgatactcgctatgttctataatattagaatttagtactggatgagacatattctagtaccacgaatttggataatggacttgtccagattcgtagtactagggtatttctcattattactaggtccttatattttacgatggcgtgagtatatcacttcataaatatacgacttggaatttaaattctataagatgcaacaaaattcaagtgtgaatatatatagcactgcacaatgccacggataagctacatcgcacatattctactagtctagcactgtacggtctcgcgcactcaccgcgtgaccctaagtagtctcgcatcctcatcacgcaaagtcgtacggtaacacgtgattttgcactttcattctacgacaacaacatagttttacaaatccctttttaaatgtgtatatttatgtaaaaccaagaaaaaaaaaagagaaggtttgcagccggtctccaccaattttttttgagagaatctattctgtgtaccactgagttcgttcgagttctcaatgatttgccatcaacattgcctctttgtttaatatactggcgactttataaattgttctacaatataccattaggttgagtcatcttttcaaaaatatccttatgaacatataaggttaataattgatttatctcattaggagtgtaaaaaaacttttatggggcctccttatgcacacaacatggaaatttaaatttgtataggagtttcaactttttgacaattctattttttctaaaaaagatactttataacttatctgttatacagtatataaaaatactttattattattatttttaatataaatcatctttcatacactacagaagatatttttatgctatcatctcatgtataagcaaattctctctcatataccacataataatatttgtttagaaaaaactaaatataccagaaaaaaatttaaaacctatgtacaaacttccatgttgtgtaaggaggccacataaaaattttcatattttttgaaacttataacgagataaatcaattgtttatcttgtatatctctaagggtattttgagtatttttaaaaggaggtccagtctaatgacatatcgtagaacaattgctaaagtcgccagtacatcatagaaagagacaatatcgatggcaaatagttgaactcgaacaaactcggtggtatataatagattctctcaattttttttcccacgcgagggcattcccgttagttattaagcaaatattaaaggtctatcacatctctcatccgcaaattctaaaaacatctttagaatgcatgattcaacactggaacataatcgaaatgtaccaataaaatgttatgcgtgttgaattacggagtgttacagaaaccaaaccatagaaaagtttccaaactaatgtttgaatgatacattagaaaaaacaggcaggaactaaggcataacctcattctttttaataaaactttttatggattggcttattataaactaccagtaacatgccatgtacggattagacaaatataaatatagatacctttttataataagtgtaatagggacaaaacattggatctgatgcatatgcatacttacgcttgtgagcgtgttgcacgcggtgggaggaagagaaacggaagatttccatccaaattaattaatccctatagtggaaatggaaggatttaatttatccctatacaggaggggacacggaaggcagtagagaaattgcgaaataatatatagggatcaatcctttatgccaaaggatttcataggattttttttcttactttacaaatcccaccagatattcttcccttttttctttgtttcaaaggagacctgggattataaatttaatttgttgttttgcacgatgtatgttttacaagcaaaaaggtagatttaatattcaacttttagttttggggcatctacaaatttgctactgacactggtggagaaaccctttgtagtcccggttcgtaacccccctttagtcccggtttccaaaccgggagtaccaatccggcactaaagatcgctatctttagtcccgggtgaaataaccgggagtaaagatcgatctttagtcccggttggtgttaccaaccgggactaaagatatagctgacctttttttttttgcatgcccctgttgctgcatggtttatatatatatatatatatatatatatatatatatatatatatatatataaaccatgcatatatatgtttcaatacatatatatgcatacatatatatatatgtatttatacatatatatgttatgcaaatgcatatgtatatagatatatatatgaacaaaatatatttacattatagaaaatgtgtgcacatgcatatagaaacatatgtagtcatatattaattacaatccattatatgtcctagctagctacgatttcgacgtagtagtactcgctgctagctcagaagctaaggaccggtgaattgtgtttccgtcgtagtagaattcacccttgggatcaaggatttcttcgttgatgaatcccatgagttgttcttgaaccgccgcgataaattccttgtgtgtggtcaggttatccctcatgcgaataaactatatgaatgtatgaaattgattagtaattaaacaaaaaatcgctacgtaatgaaattttgaatttatttgtacgtacatcgagctctcttgtggtgatgatttggtctgcaaggcagtggcaatactcgcacacgtaatagccgcacaagttagttccctgcttttgctttgcgcactacaaataaatgacaaacaacgagagatctaattaatatacacttgtatgtatttgaatcggagaaatataaatgtagagcatgtgtactcacaggaaatttgaacttccgcctaagtctttctctccatttgccgcggaccaaatgacggaaccgataccaagccctacatggagtttaaagctatgattcgtagtagtaattaacataacaagattttcttaattaacaaaggaacttatgacggtacctgtctataagttcgaaaaccttgtcaaacgtagactcttttttatccattgagtcatatacgttgacggtgcaggcctccaggtcgatgagtaaaagcacccagtggaatctgcaatgtgcgtgggatgcattacatatgaaacacttagcaagttcgtacgggaatgaaatttggtatgtaggaagacagtaaaattaaactaactctgtgttgtatggcaacagtatgaacgtcttgtaatgctgcgccttcaggagatggacgagattgtcctctgtttcttgtggatattggtcgagcattgcgacgtttactttccgagggtcgatgaatccagtatcgaaaaccctccgccgtcgggccctttgaatctccattctacaacgataaaagggagtatattattttctatggtctacttatatacaaggacctaattaattaaaggagacgtatagtaagaaatctaactgaacgatatacttacaaaatccagcaactcataatagagacgtcgagggcgtccagctggtatagttcgtagattcccctgaaattgatccagagaatgtcatctccttgcaagaagtccgtgtccctgatcctcgctccgatcatctctctaccggtggcgctcatctccatgtacagctgatggaacttgtacatttgtgtgggtagggactgcagcagctcaggcttgacaagcggtttaccgagttcgtacatgtatttcacttccgccttttcgattggtgcgactcctagcaattgatccgtagttagaccggtgtcagtaataaattgttctatcgtcatttctttaccggtcaccaacggctcgatctcctggtttggttgctctccaagctgagggactggtttggactttccagaagatgctttcttcagcgttcgctcatagtccgatagcttgatggcctccttgacagatgcagacatacccctgaagaagttcctgacactggggtctataggaatcttcttttctggacttcgaggcttgaattgtctcttgacttctgatgcaacgtaagcgtcaagctcctcttgcgtgcaatcgtaccccgggtccttgttcttggcggtgtcaactttcgccttctttgttgcccttatgtgggcaagcggtggagctgggggggcccttgactttgaaggtgccggaagaggagcttgcgggggagtaggtgtaggagcacgaggaggagtcggtgcaggatcctgaggagtcgatgctggagcctgaggtggagacggtgctggcggagcatgaggaggagacggtgcaggatcctgaggaggagatggcggagccggaggagatggtgcacgagacgccgcttgtcgcccagggaggatgatgtaccgcctgcgccatagaataatggcatggcatgtgtctcgtagatgcgtctcaccgtctcctccagggtaatccagctcgaggtcctcgtacgcgccttcgaccaactcaacttcgaccttggagtatcctgctggaatcggcctgcagtggtaagtacctgaagggtccgttgggatggccatgcccgacgccaccttcatgttgtgagagattatttattagtaatcaacatatataagcagcaactagcggaatggctaaatcttacctttattgataagtttttcaaaggaatatgcagctcacatggtgtccgctgagtgatgtcatcaatgggacaggtcgattcgtcctgtgtttgcatggcgtccatgctctgtgatcctacctgccccgttgaggcgcagctgctacggtttcctgacgggctcaccattgcaggaggaatggtcggctggggatcatgggaccgatgtgcggccatgtgttcatcaaccttccttgccacctcctcttgcatgttgagttcgtagctcgatacccggaactctaggtctgcaatcttcgcctcgttatctctcttgctcctcatccgactcctgtacgtgtggatgtcctccttgaaaccaatcttccaaggaatcacccctttccctcgagttcgtcctggatgctctggagtctgtagggcgagtgtcagctcgtccctatctctgtctggtcggaacgtgccctgagaggaggcttccactgcatctgttagtcgtcgcgcagcctcttgtatctgatagccgaagaccagtgagccatcagctgggttgagcgttccaccgtgagcatagtaccagaacttcgatcgttccggccaattggctgttgccggttcgatacccctctcaatcaagctagcctccatctgctcccacttcggcatcgcgacgctatagcctcctgaccccaagtggtgatggtacttcttcttggcggcattttctttatttctttccatcatcgccttcccttgttcacctgtcttatatgcaacgaactcgtcccagtgatcccttagctttgggaatgtgtcgaagttcagtgtctgcccctttagtatatacttctggtacagatctcccttgaagctctgaaactgttctgccattttcttcagagtccaccttttcactttgtcctctgtacccgcaggaagggtgaatgtctcgagcattgtggtccacagcatctctttctccgaatctgggacaaagctctcatgatctccgcgtgcccttgttcttcgccagtacaccgtactgacaggcacgttatcccgcacaacccaaccgctgtgacgtacatagttcttggcggcttcggccggggcactaggacgtccatcttcttccacttccgttatgatgtgccgaccctcaagcttcttcgctgcacctcgttgcccgcgtgccctcttctgtccaacggagggttgactaccactagcctcctcctcctggttcccctccacatccctttccacgtgcccctgctggttcccctccgcatccctctccatgttcccttcctcgttcaagtactggtttggatcctcgttcccctcttcttcattccagtactggctgcttccctccgcgattgtatcgtacaatatctgttcctcatcgcggtcagccatctgttgatacaagaaacatctgctaagtcacgagacatttatgttttaacaatctaagtcatgtatgctaagtgtaaatgtcgtacattagaaccctacacaaccttacgtgctaagtctaattacaaatcgtgatataagctaagtctaggtgacgtatattatacaaccctagctagtaaataattatatactaagtctaattacaaataaaataatcttatattaaaactcaaataatattacatgctaatactaaaatagtcatgtatatgctaagtgtttcgtgcgtatatgctaagtctaattaagactacaatagtcaattgctacttgtcgcaccaattccgtagtcaataattacataccaagtctaattacaaataaagtaatattatattaaaactcaaataatattacatgctaagactaaaatagtaatgtatgctaagtgtttcgtgcgtatatgctaagtctaattaagactacaatagtcaattcctaggagtcgcaccaattccgtagtcaataatgtcatactaagtctaatttgcaataaaataatcttatattaaaactcaaataatattagaacactacacaatcttatatgataagtctaattacaggtctaataatcttaattaattgcattacaaatataacaatcatttatattattacgtcacttgcctgctccaattccttctagggctagctcttccactcaggcttgacggacgactccgacaacatgtcttttctgcaagataaaaaaaatgtattaggataaatgcgaagtaacatatatatatatatatatatatatatatatatatatatatatatatatatatacatgtatatatatatatatatacatgtatatatatatatatatacatgtatatatatatatatatacatg

SEQ ID NO: 4491 - DNA, 4740 bp, Oryza sativa
ttattactattagaattgctttttccacctctctctcctatcccaccttcccacatccaagcatccccgcacgtacctacaaacgtacggatggataaaaaaatacctatggactatttgctaaaggaaaacaaatactcaatattagaagtttcagggttggacacagttattaagaaagtaggtagaaatgagtggtgtatggttgtgattggataagtagtgcatgtaggtgggaaaagttaatggtggagggttgtgattggatggaaagagaatgttggtggagaagttgttatatttttggacaaattctgatgactaaaagttgttatattttgggacgaagggagtaaaaaaaaactatttgtcagaaaaaataaacaaagaacatacaggtatgcaagtttgcacctacggttggaaaaaagaagcgatcaatcctcacttctttattttctctggttgttcactatttaaaattttataaagcatatgatgtatcttatctataaaaaatataacatccatattacctatatttaattacagaaagttgtgttttaataaccgacaactaaataagatccgaagccgtcaagtaacactccaataaattagagaaaataatagaaattatgaagaaaaaacaaaaaacatcaatttccacttatatatggtgaccaattgttttctactagcaatatttatgtatgtacatacatattgtttttaaatactttgatgatcatagttatatttcattaaacttcctgtatacgcttctaatccaccacgtggcaccctataaacacttatgattcatcacgtggagttctaaaaaaacagagaaattcaaccgtcgattttcattgagattaataaaccattattctccctctttccatgcctctgtgcggcgttctcactctgtaccaaacctaccattcctccgttcctttcttttttttcttatttgataattaaacttataattttctttatgggcctaaaaaattttatagatagacatcgaccgactagatctagcaagctcttactctatactctctttatagtacgttaaacatcataaaaatatttctaaataaccacatgacacactaaaattagagaaaataaaaaaataaaacattcgaccatcaatttcttcttaaaactatcacatgatataaaaaaaagtttgagatttatccacgtcatcatgagtaaaacttttatttccagtatacctctacaaatgcttgtaggccatcttatagcgatggacataataaactactatgattgttttaatgcctaattcttttaaaaaaagaagataaaattgtataggtattgcaggcttcgcattgaagattatgcacaaacacaccgtgtaaaccaactaacacacacacttttgaagaccgtgtatatatatattgggagcaagaaaaaaaaacataattctaagacagttatactcttaagaccgcaatgtagcattgaagcttttacacataaaactattttagtggagcacttaacccgtaagatagtattgaatcaatatactcccttcgttatagaaaaacatagctcattttacatcataatgatatttttattctttcaaaatttttatatttatcttcatacaagtcatattaaacacaccaagagacagataattataattcaattcagtaaattctatcctttaaagtaacttccatgggtttctctacaacctgcatgtataagcctctaaggtggcaatataaaataagtagcctttcttataataatattattaaaagttattttttcctaatatattattattttacgattcatgttggctaggtcttttccttaaaaagaagcgctatataatatatgtatatttgatcaattaaaaagagggctagcaggatggtaaaaaaattaaatttacaagcaataaaagtttctcgagtcttcttaaggaaaaaaaacttaacaatgaacattcaattaaaaatgaaaaataccctattttactttcaacttactttgttagaagtattttcgaaataaaataatatggatgcccgttagaagtatttttcaaataaaataatatggatgccccggccgattgcgcgggctaccttcttagttatatgctaattgtctttcacttaaattggcgggtccaatattataaaccattagattcgattaatctgaaaacaaaccatacactacatgaacggtaccacctatcctccttccccgtaggaaatagaatccaacttttaatctacccttaatttagttgtcacccccatcatgagttcgttagaagattcaatcacaggaactttgagtcccttgctcttagcgattttcacttgtaaccatattgcaaggtatatgtgcagatggtatgcatgataattagctaggagtagtttattactttgttgatacaaaagcaattcaaaacagttatcaaattagtctttcttttattcaaaagtcgatgaatggttttttatatatattaagaaaaatatataacccatgaatcattttaaaatgacattgtccaatcttcagtttgcccttaacctatatataggagataattggatcacacacctgggtccttgatttgtttctcaaatctttctacccaatgatcagactacctagctagctcctcttcttgatctttgtcttcttaacatctgttacgagcaaagcgatcacctgtttgttcacaaaaatcgtttgatcaacatgaatagagattaggaaagaaagaagagtacagatagagtaccaaatttgtctcccgaattcaaacaaaaagaactaacagaaatttggaagagtacaacccccaatttcagttacttcttttcctaggtagaatgaagggctgatgaactcgcttttggggctatacgctgcttccaagcacaagagcgctccgctaaccttctgagaaattacttatatagaggaaccaggatgttcgttcagaacatggtaggaaattaaaagaggccgttgttttgccaataggacaaagaaaagatgccagtaggaattgttcatttcaatccatatgtttaactcaccagtcagcttcgttgcaaagtcagaactttttaatgtaagagcgtcacgaactgagagggaacgattggactaatatatattcattgcttaacggtaatagacataatcccatgcgcagatcaaaaacagcgcattgacatcttaatatattggatgaacagatttggcctctcagcccgatgccttcttttgagtagttcgctctcgagctgaaatatggacttctaaaacttagccttttacatcttggcttttgacactacaaggaaagacaaatagatctaatattatgaatgatagcagtatcattgtgtcaacaacacccatgggtggacctcatccagatgctgttacgggaaggagaaaagttatccatgtcctgagtatgtaaaaccagcaagcttgatgaccatagtaatcaacggaggtacagcaaaaaaaaaaaaaaagaaagataagataatatgccacttggagttgtccatttcaatccatatattcaactcaccagtcagcttcaatgccgagtcaaaccttttcaatgtaagaattccatgacccaaatgtggtatgtgttcttggtttaagaaattcgtgtgctgaattcttagctttggatgttgcccttgacaaaccacggcaagactaggttctgtcacattgagcttgtctcggatcacagtagaattgtgttatcccgatttggttctgtcacattcaaaaaataaaagatagttcagtctattgaatgcaccatggagttgatagtgaactgtactagattaggagttttatatgagttcgtttcgttgataatgaggatttttattactgattcttccctttttgaataaatacaaatcaacctagcatctttctgtacatgtgtttaactttgtgacagaaaaatattctccctcgtgaatcattcaaagttactgcgtgtaacaatttctactgctctgaaattagagcaatactggcaaatttatctagcaatatctgaaacaatttctagcaatttttaacaaatttatctattattctagttaggaaaaaatatgaattaccccccgaattatcgcggtcggccgaatttcccctctgaaccagaaaaccagacatgactcaccctaaactttcaacaccggacgaattacccccctcgacccaatccatagcggttttatcctatgtggcgtacgcgtggcaacccagtcggcattttcttttttaaaagatgttggggcccatctgtcatatactccccctctctcactctctccctctccctctttcggcgagcacggcaggcggcggctgcagcctgcggcgtgggatgcggaggtggcgtgggacactaaggcggcggtggtggcagcatgggatgtggaggcggcgccggcggcgtgggatgggaggcggcagcagcgcgggacaccgaggcggcggcggcggcagcatgggatgcggtggcagatgccagccatatccccaccgcctctcccattttgcagttccgccacgaccaccaccgacaaaggtgacgcacgtagcgtggtaaacgaggcgatgcagccgcctctcaggtggcccggcgagctt

SEQ ID NO: 4492 - DNA, 3364 bp, Oryza sativa
atcctattttagattcaccaacctgtcgagacaattattgatcgttgtaagattggcattcagcatgcgctggaacctctcggtagaggtttgaaccatcctctcatcacaacagtcatatctctgttgatagctccacattggtctttgaggactttgacaagttcctccctgagcacgcagtccttaaatttatcgttggtgcatgacatggttagtagaatatagaaaatagcacaaggatattatccctatcaactactaggtgatgagagaaagacacttgcactcaagcatcttaccacacgcatacacgtagcaagagatgcaaccagtggcgagaagaatcacagtaggaagtatagtgctactatgcatttttggtggttatcagttgagtacttgagttattttatcttggacctccttgcatcattgtgcaggaagtacagccatcagtaggcatgaaaattcgatctgcattagcaaatgaggtacattactatggtttcctttcagccgagttccaaagtgaatgcctattgatataattttggagcaaaatgcagggaagttctgaaacaggaaacaccgtagatgtcaaatcatctgaaatgcaacaggtggtacattgcagcacgcaagaattgctaccaagtactactatccaagaagaggtatctctttgcaaggaatacaccattatctggttgcagttctgtattaaatacgtagtgcccctgtcactttgttcaggactatgccttgtcaaatatggaaccggaacattcatgtactgacatcagtgacatgggattgacctgctcttctatcactggtatagcatcactcttattatttgttgccaagttcattacgtgaatggaaagtatgatcacatcattacctgactggcactcccagataaccttgctgagaagactcctgccagcagtacccaatcctccccaaagttgagtgaccaactgagagagatttcaaactcattgaagcttcttagcactcggccagtgagcgtgagggcacaaacgtggggcatagaatgcgtctagcgaatcaatacgattgcaccggagccaaaaactcctgaagtgcatttgaaatttgagcaagcggaagatcccaaggatatacttacagcccgcagcactgggattaaggttaacctgttttttaactcactgactcattttattcgcttaatgtgtttgtaccttcttataatcgttttgcctgatgaattctctcttgttttttctgccccacagaaatctctagttcaagaatgcttgacttttctcaacagtgctaataagtgagtttggcattatctttacaaccgacttcacactactgcatttctaatgcatgtttgtttctgtgtcttttgcagggaacaatttgtagggtcgaatcacagcaactaagccaaccagggagggggggttgaatggttggtatacctaaaacccgaaacttttagcggaaataaaagttaccctcaaattcgacggatcgctgtttgactgaagtgtatacgccggtctaaccgcctgatgaacgttggtctgaccgagatcgaactccggtcgaaccgccgagatcgtctgccgctccctgtcgccgccgccggtctgaccaccgtgtgcccgccggtctgaccgctgcgatgccgccgggctgaccgccaaaacccggtgaaacacaaatcgaagaactcttaaagtggataacgactttattgattctctctgtgtttacaaagtacactaacagcactccttgcaaaaatctcgactaaactcgaaaccctaactcaacgctcaactcaattgctctcaaaagcgataccaggaagcctcacgctccctctctatttatacccgaggtaggcagcttaaagccacgaaccaaacccatactagaagtcctaatcaccctaggaaaccctctagtacaagaaacaaactttacataaccaatcataccaaatttggactccttccaaattcgactccgcatcccatatgcacacaatacctccatcatatgccatatggaatgttcaccttccacgtgcattgaattctagccttagtatcccgcatgatctctgaccactacggatgtcgtcttatccccgagccgactcccgatccatcaccgcaaatactctcccggcatcttgagtcacctacacatagaacaaacaaaagaaaccatattccgagaccaaactatccccaacttgactcattagtagcaaacaacagtattacatacgcatagtatccatctagaagccataatcatgaaacaatcacggatatctaaacaaacaacccgaaaccgaaaccgacacagagtcggccggtcaaaccgcgggctgcgccggtctgaccgcgtgatacatgccggtctgaccggaccacatccagcagtacctgtagatcacctgtgaaatccaatcatctccaaaaccacttcgtgaataaattccaaatatcaaaactaataatctccaatgccaatcgttcatcatagaataacaataaaaaacacctttaattttacacaattaaaaagcttaaaggtttgctccgaaccatatcgtggcagcccagattgcttctttcttactattaacccactgatacatgtttagggaatcggagaaaaaagggcaaactacatacttgagcttcgtgaggagtcaccagagcggcagagctatttaaagaggtgagcactctagatcaacaagggagtaggcattaattagacccaagcgaccagaagttattacatgacaatgcaacccagagctgattcctttgcttttgcagataagagcaggtacaatagcaggctattaaccggctataaacatattttaatgatataaacgatgagagagaagagcagcgggctacagatttgtagccagctgcagtacggacttcaagacacactgtgtgtatgacaggtgggaccatatactaatattatagtaagtaactattgtatgaattggctattagattggctataaatgaattggagctggtagtgggctgtactattagacttgctctaagtgatctgagagacatcatcggaatgaattcaaaagaggtactggagaatctgattgcaatgtgtacatttatctatgttctttagggccagtttggtttgaggcctaaattaggcttgccaattttttggcaacctcaacaataattgtgtatgtttggattgaggccaaattttggcatgcctatataacataggccatttcaatagccaaattagtttaatttggcttcaatccaaacatatg

SEQ ID NO: 4493 - DNA, 1004 bp, Oryza sativa
aacttattttgtaactcctgataatattcttctacagatttatccccctggtctgagcgttgcaatttctttaaaagatcacgtctaaaagaaggagcacaaatctagtgtgcatatagttgtctttaagagcaggtataatagcagactataagcaagctataaacacatatcaagaagataaaagaggagagagaagagcagcgggctacagatttgtagccagcaacagcacagactccaagacataatgtatgtgtgacaagtgggatcatatattaatagtgtagtatatgtttatagataactattgtatatattggctattaaattgaccatagatgatttggagctaatagttggttatactattaaacttgctctaacgcttctcatgttgtaggtgctagtccatcaatacttatttgagtccatcacaatgttgcaaaatcattaaattcactagtagcttgcctaaccctatgctcatcaggaataaatgtgcactaaattttttatctacagtcatttctcaatcaaaataagcttcagcattataggcaccatgaaaagagggaatcgtaaacttaactttaactttagcatatggatcatcacacacattatgaaaattacctccaatacctcgacgattgaagctcagcaagtttctatcaatattatcctattttagattcaccaacctgtcgagacaattattgatcgttgtaagattggcattcagcatgcgctggaacctctcggtagaggtttgaaccatcctctcgatcacaacagtcatatctctgttgatagctccacattggtctttgaggactttgacaagttcctccctgagcacgcagtccttaaatttatcgttggtgcatgacatggttagtagaatatagaaaatagcacaaggatattatccctatcaactactaggtgatgagagaaagacacttgcactcaagcatcttaccacacgcatacacgtagca

SEQ ID NO: 4494 - DNA, 12546 bp, Oryza sativa
aaagaaagccatgctaagcacagaactggcaagatgatagatatcttgcttatatatctgcttgatccatcgacgtcatctatgtaagtgagtgtttggcacccagtccatgtgttttctctattcgtataatatttaaatatcaaagattgtatatattcttttcacaccgtactgatctactttatcttctacttatgcttcatttgatctagctggatggctgtaactggatggctgagcttattcaggatacatgaaacgacacatatcattagtgcaagattaattaaatattgaatataataaagccaaaatagatttatttaatttttaaacttttatataaaatatattttaattatacacaagttgcttttaaatatatacgatgtaggttatggttgtcaatttaattatagtgcataaaatggttcagatggatttagatattattatcaaaagatatgtcttttgtaataattcctatatcaatgggtagataactgggaaaacaaggagtaaccaatctgataagtactctagaacttattgcttatttactaaaatgtttaatgtgtagtatataatatactttatgaataaaaaaatatcctaatatataatcatatgccaccacttatccataagtatataaatactatccactaatcgtcaagtcatattgcttacgaggtattcatgcatagtgcacctaataattagctaccatccaacgagcacttatgtcatgaagcaccatatataacggactatgctaagtggagaactatcaacaaatgataggtaaagtaaagcatgccaccaagccacagcaaataataatcgactacaagtatattgtcagtataagcaatagaatttctacacttctacaagaactcttaatatatcacgtaatagatctcataaactagaaaaaaagtataagaaaaaatataaaaaagaaaatatctggtcatcaatttacacttcaactggtagatccattattttcaaccattatattggatatattccagctaaaaaccaactaatctctccctacgtacgtacctatacaagagatgtcgaaaaggaaaaaaaaagaagaatgtatatatgatctgctccgtctggttgtttttttgtttctttctttgcagcactaaagttttcctcaaattatgcatatatatagtgaaactctttacgatgttatcgaaaaagtcatgccactgtggcatcgcttcatgccatcccacaaaacttttttaaaatatttttttaactaatgatctaaaacgaaatcatagacactcatataaatatgtgcacaaccatcctacgaatatgcgcagtactattcacaaaaaaaatacatacgtacaataaaaaatgtcgcatggaaacctattatatccttatataagtatgtcattctcatctaaatagtgttgacaaaattagcacaaataattttgacaatatgaattattccttcgaatattacccatgaatatacgtaggtgacttagatgtatagtaaaagaaaaaaatctaaacccatattaacctgtatgtttacgaaagatggtgatatgcgactttatgtatagccatgacaaagtgaaatttgtttgaatataatagatattatcaattagtatatcaaagtttataatttatttcacataataaatatttcttattttatattataaggtaatctatggttcttaaaataaatacggtaacatatggtttattttagtattctttctataaacaaaaaaataaattgcccgcgcatctgcgcgggcttcctttctagttgatcaaatggacaaatcagaatccagtatgcatgaaggccagaaaaatttgtaggaaaacacaaaaatgcatgaaggcggacaatataagaccaaaccattgtactcgataaaccggatttcctttcgtattctgggtagcaaacggcacaagctctcgccgtagcagatgacacaactggaagaaatcgcatgcatgagctttgttggatggccaatttccaaagcttcaggacaagatacagcagatctttcttcctcaagagtcctcagcaggagaggcaacaatgttatatcattctcacatgcttcctcaagaacataagaggaaattatctctattatgggcattgtttttttcccccaaaggaagtaattagacaagcttcactcttcacacaagttttgtgatgattcactactcaatattatccacgataatctgagtagtgacaagttattgttgtccggggatgacagtttgtggattgctacagagcttgcatgagctttgtattatctccattttgcaacaacaatatcagtttttcttttaaattttgcttgcatagggatctcaatttcaggacaacatctagatgatatttcgatcatttacctgagataatattgcaacctcatttgatgaattgattaaactatttttaccgtgatcttaagatttttcatagccttggtcagataagattccttcttacaatgtaagatgctctgctacctagaacacatgttggatcagagttatttgttgcgttctttagtttttccaaagaaaaaatctttgtgctatcactggcattttcatcttaagatattggtgattctagaagaaggcccttggtatttcttaaaatatttcttctttgcttttggatataccttctatacttgcagaaaaggaatacccccacacaaacgtagaagaaaaattccaaaggcaacacccagaccaattaatagcattacctacaaatagtgtttcccatatgtcttcccttttattttattttcttaattaggtctcttctaaaccgttattacaacactacttgaatggctggtgcaagattaaacttttgaacgttaccttttcctttcttaaagagtgcacaaaaattaccaataggatgaaagccagagttccaaaaggggaaaaaaataagaatctatacaaaagaatttcctgataaatgataattaatctttttctgtaaagtggtgagaatggaaaatgaagtccaatttgtatgtagttttgaaaaaagatccaaatgtatttagttttagcctgacttgtgaatcattcatattgcaaaatactcaaattacaaaattaaattcattggaagagaaaatcaagtacaacacgcattgtatggtcttggacgccacatatgtgctaatgtgcattatgttgtttttgtatttcatagctaatagtattcatagaatatgttaaactagaggtgcaaacaaccttgatcagctaaaaacatggctcattctaatctgtttaaccttagtagtacgtgaaatttaagagacggtggctaactgaattgttgttgcatgtgcaatacttttcaatggactcatttctactctttttataaccttactagtacatgtggcatcatgcaggcaaaagtgggtgcttaccgagcacaaagagcccatttgccacatgctttattagaatagaattgcaaggctagaatgtatttagaactccatgaaaaaatagggatgtatccctgaaagaaagtacagcgatatatagagtcaggggcgtaatagctctttctgcctcaggcaatagaggcatttgtcatcatcgtcgttgctccctcccaatgttgttacatcaaagaacaaggcaaccagatctggccacccctgaactcgtggcggccatatttgactacccctgggctcatcgcagctagatctgacgacctaacatcgacactggaccacactaggacaaagatttctgctagggctgcagtggaggaggtgagggcgaagcgatttccacagcggccacaaagaggtgggggaggaggtctccaccggcgcacacgggacccaaatgatggtggggacatggaggccggcgagtaaagaatgagttggggagaaggggttggagacaacaggagacagataccaccacacttaaagaatatcaccctttgcctggcgcagcttggctcagctagtgctctgcctagattgattttctgcatcgattcctctaaaaaattgccactagtagttgttttggtatgccagttcaactaaaaagccagcactaatgtgggatcatcagtgctagtttttctcttctcattgcacgtatgagtcctagaagttaggaaaccgctatcaatgttggttcttgcttaatcagcattaacagggcatcaagaacaaggagttctatggtagtggcattgtgttctgctccaaaatcacactcggcaaccttactcgcagataattactttatgaactctgctagtgttactttggatgccattacatatgtttcctccatcttgattgtgcagagtcattaccaaacccctatcccccctcctctcctccatccccacaagaaaatatattgcacccaaattcaaatccatagcagattatttttattttgtatgtcaatatttcggtttaaatgagggcctatatagaatatacaactcgcattggagtttaagtagtaacctcaaacaagaataaatgatggataggtggacatcaacatagaatttgcaagctggcaaaaatatttccacactttacgtttcacggaataaattaagagattacattttcattgttgtatttggagggacaaatgaggcattagaaaattgagatgctaagaaacatgcctggatcaattttacctcctgtagaatatttagtacgagccaagtttggaggtaatgcaaacacgcatccccctgcacccctaaaaaaaatactaattagtgtcaaatgtaccaaagtagaaatgatgataggtcagagcagagtggtagtgtagtacatagtacaattgtactaccctatttaatgatggcaataatactagtaagctattcccaaatcaaagatcctacgaaatcgcccacttgtgcaattcccaaatcaatccccttccccaatatccaatctagtctagcttaggggtagagccgccgcaaccatcactatggcctccgatggtgacaccgtagccaagctcgcgcaactctccggtgccaaccttgtgtgccacctccaaaccacaaatcgcatggctgattacaaggtggccgcacatgtgcttggcgagcgtgagcgtcgggctgccgagactgaggcatgtctacaagccaagattgatgtgcttcagatgaagtgtgatcttctagccaaggagggcgcatatagtgaaggtggcaagaagactaacattgactccaacaaaaatgaggtaagtggcaccaatcattcaagttcttcaagcaagaggaagagggtcgacatggacaacatgactatcccaccagttttgcgcaagaattctcattgcatcgacaacatcaagagcaccaaaaaaaagagggaggccatgccagagttcaattaagccagcaccaaccatgtcaaataatttcaagtgcattctacaattgcaactaccactatcatccacagttcccgcatccacagatgtatcattgtcagatataccgattatagccacagtaccccctccaacagcgatcttggtaggtccacccttacttttggaatcagataatcaagagagaaattggaacaagagatcagtattctctgagttgggaagtgttgatcaagagtatgtaattgaagaggaaactgctcccttgttaccatcatctatgcagcaacctccttccatggggctgatatccacgggtggttctccaatagctccagcactagtagcaactagttgtgcctctgtacccgatatgagcccacacttggttgaagaatcaaataagggaaatatagaaatgcagaaccaattatctcatttgcacttgaataatttgatgaaccaactttcttttgatgcttggatggaagaaagtggaggcccctttatgagtgagcaagtacccttctctttggtgctcccatccagcagtaaaagtgcatctctgctgtcaaaaatcgaaaccagcttgtgggagtctgaggaaaatatggttatcagattcatggaaaatgtggagctttgcatgggagctatttgcgctctttatcgccaaaagaagctaatggttgaatcgacatgtgaagaacgaactaagtttacttcactcaatgaaagtcaggcttacaggtatgttaaatattaggtttgaatgctaggaagggaaattattcatattactacatattatatacatactgtattgtatagtttatttacaaactagttatataaatatttgagtatgaatttcagctacaatttattggaatcttgtagttttttagtttttgtgtctgaagctgaactttttttttcactgcagctcatgactgctatgtagaatggttattctaagaaacatttatatggctgtcatatatatgatctgtcattaaaaaaatgctttataggaaccacttattagaaaaatgcttcatcaggctcttcgaagttactattaactgtttatgttgtggaatgcattattaaatgctttataggaattgtcagtatggtgttttttatagagtttctatttagtttaatttatatgatacactaatagtatatccttcatttttaagaaattaaggtagacactccatgattggggtgcattttgttagttcttatgtatagaaaatgatgaatatataccctatgttgcctttgttattataatacaggagaaagaaagatataaaactaaaagtctttctttccttggacaaaatataatggaatttactatgttgattatgtgatgaccttacaagcatgcatgctcaatgccctcactaggttctttatgtggtgtattttatagggtactattatttaattcttgatttttgtactcatttttcaatgtgatgtaatagacaggttcatcttaaattgcatatttggttaactttcctaaaaaattgaaaggcaatgctaactaacatagatttaggtgcataactatgtaacaattttgctgatcatctcaattattgaaaatattctcctcttttgttgttgtgaatagggcaacacaattggcagaatttcttttggatggtgatattaatgggccaatgaagaagaacaaagaagacctagtgaaccatgatgctacagggcccaaattcatccaggaatatgcaatacagtgctctaagcagttgtttgacatttacaggaataaagaggatctatacttttgttgactgaggcaaggttatgtgtgttgttttcttttgaggttggcgagcatcgtgtcattaaaattcaaacattatggaatttcatatgcagcagtgcatattttattgtcatgtatgaataagagatcatggaaacttggttgaagaagttaattttataacagtttcattgatgaatattttcaagtttacttgtatattgttgtgcactttttttcttctacttagcactcaatcttgattttgttattaattgtatcatatcttccctgtgtaaaagcaatattgcacaccatggcattgtcactaacatctgaacaaatggtacttgataatgcatttttttactatttcattttttttatctttaggcatgagaaaagagaacatgtttttactacactagtcaaacagagtaaaatcaatttatatacagtattggcatctaatgttttattatgctagactccttcgccttgatgacccatagacgtgggagatgagaaaataataaattttgtgatatgccatgtgacctcactaatcaatcctctgttggcatttatgccaaccgataaatagaagggcctggacactcctctgtcgtaaaatccacaatagaagctcatcatgtctcacaagttggagatcaagaggagaacagtacagtagaggcttgtcaaatgagagtaatttacaggaaagggagacatcaggaacccgatctcttcagattttacaggagacattacaaggagtggtcactgtggttttctagggaaatatggcctggcacaaccatagacctgagcatcgattggcatgctacttttaatcattccttcaaagtttaaagattagcatgctctacacatcaaaaactatggacaagcctgcattaacagtttcgtatgtaatgtgcacagatcacctgccattttggtagagctctgtcaataacctgggtagaactgagttccttttattatttttactagatgatatggattgtgaaaggcgaaacatacgcacctattgcttgatagttttgttgatagaaagtatataaattgtatagttatttttgttcatgatgcaccatcatgaagatgtttcctttacagtttacaagggatcaatagagagggatttaattaattagtactccctccgtttcaaaatatttgacaccgttgactttttaacacatgtttgaccgtttgtcttattaaaaaaatttgtgaaatatgtaaaactatatgtgtacatgaaagtatatttaacaatgaatcaaatgatatgaaaaaaaataataattacttaaattttttgaataagatgaatggttaaacacgtactaaaaagtcaatggtgtcaaacattttgaaacggagggagtactggaaattactccagcaacaatgaacaataaccctcatgcacactctacagatatttgctcttacagtgtcatactcccttctgatgtggccatttcagtcatggacatagttctcccttgtgtctataaagcttgccagaagacaggctgaactgcctaaggacatcttgacaattttctgcaggcaggatgaactacctaatgtgtgcatgaattaattcaacatcgacgatttcacatgtatgctcttcaataaatggcaatgatctactctttggtagagacagctaatttgtaagcaagcttctcgagttctccacagagattttattcattagaaagatcaagaatatttgggaaattgaagaattagtgcatctaatcaacctgctaaagaatattataggagaaggaggcgctgggaacttgatccgtacaactgttttgcttgatccgtacaataatgtgtttgttctttttttcaaaaaaaaattatggactgagatttaaaagagagtaccatgtggttttctaactaaaagatacgtgaatgtaagacatggaatagaacaatgccattgtgttttttttattattttacaaagagtataaatcgtcaatactcaatccattgaactagcaagtagaagaagaaaaagtgcagagtggtagctatagcttagtggtacattattttactccatatatacaaaaaaatatactaattgctgacaatttgttgcaataataatgttgagtagtacattagtttgatccaacaacaaaggctcatcctctttttcatacccctactacttgattaaagggtatgtcatgaaagaggcaactatagcttgtgtaagcaaaagacggttgatctagaaaagtccatctaatttacaactcaagtacgcatgcacttatatcttgcatgtcgatcatgaaagattataaaataacctcaaaacgtagattatatgtcactcgacaaacatacgcaacactaaattcaatccatgcatctcacaacaaaaaaacacaaattcagctattcagctataaatagctagcctactcaacggttttgtcatccactatcattaaaccagcaagagaaattcgtcatgtctcacacttgaagttcaggagcaagcaaacaaaaaagtataatggaggatataaagtcaactgatagtgtgtagtttgtaggaaagggagccatctggaacttgagctgtacagttatagacatggttcagcaacagtgatttttttagggaaatatgccctaacaatattagaaaccttagctaaaatcactcatcgtccatcatgtccgttcctcctccaaatgatggagcactgcactcattcagcagcgccacatctacagtgttgtgcttaactgcttatgctctcatggcatttacagtttccccatgtactgcatgctgaccacggcatttgtctccatcgatgatccaaaagtgatagggtgaaacacgcaccagttgattgttagatttgttgatgttgctgcagttattttgattttttgtagggtgtactatggttaccctgtctatgatgtgccatcatcaagaaagtgtttcatttacagattataacagtcctatatatatgtagacaggtttaccggtttagtgccccatgaaggctgaagtactgatgtgtatgagttaattcaacgtctttttcaagggtgatgtgttttgttgctctccactggtagtattatacaaccaataaaaataatctaaaccgttcgttattaaggagttgttcagattaatgtcacttcaaaccataccattttttggtaagttgacaaagatatgcatacatttaggtttttaccatactttggtaaacacataaggaatcctgccaaaacatggcaatattgccaactaagtttattttagatacaatctgaacagcctctaaagacatactagtaatgtactaaacagtgattaggggtagattaatctgtgatcatccatttcgttagcatctttcatattccatcgaaaaagtcaaaaaaaagagagaaaaaaggtttcatcactgctaaatgatgtttatacccctccaaaatattgtttttactaccggtaaatagggtggtagtgcaaataaatctaaactcttggatcgaatgagatcaatggttcaagtttcttgctactaccagtagatagcaccatatataaggggctcatgtttcaaatccatgctggccaataaactgaagcaaccaaagcactcgttctctgtggtagaaacagcagctaaatgagttcattacgagagaggaatgctgacgaaaaccaacagaggtatttgaaaaggaagaaattagtcaaactaccaaagtatatatcatgggaaaggggaggcatatgcactcagaaccaaagtatatatcctgtgggaaggggaagcactgggatctttgagtcatagaacttgttcttacatactccctccgtattttaatgtataacgccgttgactttttaacaaacgtttgacctttcgttttattcaaaaaaattatgtaattataatttattttattgtgatttgatttatcatcaaatgttctttaagcatgacataagtattttcatatttgcataaaaaatttgaataagacgaatggtcaaacgttgattaaaaagtcaacggcgtcatatattaaaatacggagggagtatatcgttagacaaaaccgaaagcaggatacaatgtaaatgtagtgcaaccgcctcactcaccggggcgtggaagttgtctagcactcgtttgactgtgttgcgtcatattggcatatctgaaaagcttgcaattcttcctgcaacttcagcaaaagtacatagctgcgaattagttgacacacgcctgatcttgtcagaaattccaattgtatatatgtgctgatccttcaggcctacgagaagattagaccatgacatgatgtcatcgacgaggaaacggactagtataggatgcacccacttgttgaattaatagttagataagaaaagggcatgatgtttacaaatgtgccctgccattgttataggagaatatggtagaatgtatgtacgagttttgttcttaattctggtctggtgttgggataaaaacaagtaccttccatgcctctaaaatgaggaataatatgaccaatgccatttgttatggatgggtagaaatcatcagtaatcaatctagttgcacccaaaaaaaatactgccaagtggtaactagctactatttactctaaaataccttatcgatgcaagcttcccgtgcaccaactacaaatttaaagaaaaaatttataaaaaaattagacacatacttcccaatctaggtgtgaaatcttatcttcaaatttattatattttagctctaaaaaatacgaaattctgatagattttctcttcaaatagtcaaatttttaaatttttttgttacggccaaaatataataaatttgaatatcagatttaacagatatgtgtaatactatcaggagtacatgtcattttattttagaacttttcgtggcatttgctagttaatatgcacggaaattaggttgtacgcatagtacatgttccaaaaaaagaactgcttccaagtaggtgcaacaataatgcttggtacattactaactagctgagctgatataagggaaaatctgtagtgcaaaccacatatgtagtggaaacttggaaactaccgttggatcgagaaatggacgtcc

SEQ ID NO: 4495 - DNA, 12304 bp, Oryza sativa
tccgcacccgccacgacgccgcgcggctcgcctccgaggcccgcgccgtgctccacggcggcgccgccgcgctggacctcgcccgccgctgggccggcgccggggagacgctcatctcgtccatcctgggcggcggcggcatcgacgtccgccgcttcttcgcgctcgtcccggacgacgcgccgcgccgcggcgtcgccgaggtgctcgacggcgtcggggcgctcgtgttcgacgacaggctgtacgcgctgctgcgccgccacgaggagggcggcggcgcggtcctcccggcggagctggcggcgccttaccgccggccgcttgcgccggcgctggcgccggtcggcgacggcggctgccggtcgctgttcatcacgttctccaaggggtcgccattaacgcgcgaagagatcgaagagtacttcactgagtacgtagctcaatctccatttctcaatgcacttggtaattaattacgtgcatgcgataaactttgaccgattagttgtaactcatgcatttattattgggaaaaccaactaatcaccttgagagaataataaaagataaaaaaaggtatttttgcccttgcttttcatcacctctttctatctggaaactttctcgcgttaacattttaattctgtttttgaatcttaatttcttatgtgtaccgtataacatatagaaactctgaatctccaaaccttttgccttgagatcattataatatatttttcgaaagttgagtttcgttgttttataatttaataacgaaaatttcaatttttcatttcaatttacaaatagttttatcttgaatcatgtaaatccaggttatagaaagtgcaacaaaaaaaaaggtatttttcattctgcagtgcgcgatatatatggtatttcacaacttatgagggattaaggtggcattcgcagaattctcttatatatggtcaatgttttttttatttgtttttgttttgaaagagtgtggccaatgttttaaaatatttgatcatcttttgtctatttgagaaccgggtttcaatctccatcagatacagattgagtgttgttttttggggacttcaaacttgagaggtgttattcaggggcggagctagaacgaaatgaaggatggtgccacttgcttaatttactttactttagatcgagtttaagctaatgcgggtgtctaagtttgtattgagggagtgcatacatggtgaaaatagatgaggtataactaaaatattttcttgaccgggttcctaggcacccccctagtatactcaagctccgcccctggtgttatttccataatcatggttttcaaactcttcccatttacctgtgcgtaggtgttgtcagtgtggtggaatttttttctttcctggctattatcttccaaggcaatagtcttgtgattttttcctactccatccaatgaatcatcgcgttgtctggtactaatcgttcgaaaaaaaaaacttttcccatttatgctggttttcagaaaaactttgtccaatccgtaagcagaatgtcaccaagtaccttcagaatttgcaggcatccataagtactaactaacctgcaaacatcatctgcaggaggtggggcgactgcttggagaaggtgatgatggagaggacgccggccggcgagccgccgacgtacgggaggatcgtgttccgccacgcggcgacggcggccgcggtgctcggcggggaacacctggtgaagctggtcatcaacggccggcagctgcgggcgcgcaagtacttccccaggaaagcttcagccttcagccatggcttgaattgatcaagcttaagctagcatatatatatctacttaggcacttacatttatacatatctatatatatactactaccacgtttatggccaccacggtgagatgagtcattccacagtttttgcttagggcatatatataatataagtatacagatgcagggccactaactcatgggccattatcttttgtgatctatccaccatggtcatgtcattgctaagaaaaatgtagatgcaagatgtttttcagacaagagcataaatcgtcttggatgccttgacagaaggcaggtgaattaagcaaatggacatgcaaattttattagatgagtttcattgataaaatgattttgtccaacccatatgaagaaatggtttagctgatggattttgagatggtttggctaaacaactgcaaaacgatggtactagtaaatataaggtcatgttgtatatatgttcttaatcttaatctggcaggatcaggatcagatatgccagagtgcacactatctcatactgcgaaaaagataactaattatcatagaaaaagggttcaaaatgttggtctccaatgctcatatttagccagacggcttcactcacaatatctcccaagtatgaagctcaacttcatgcaacatccatttaagctatattaattctcaggaatgtgtaatgacagaattgatcaatacagtatctcagctgtacaactgaaacaatataacaaatgctattttcagatactatcttttatcagtttgacattcagaaaaagatcagaacaactctttagcttgagttgagcacttgagctaccgtcacgtacagattaacagaaaatgtgctctgtcaagaatcaggtatgatttccagccacagttacactcctctctgttctttacacatgttggcctgccaatgatcaatcttcgtatttgtacgtccgcgggtagcacgtcctcttctgcagccatgaaacaatggtcctaacatcgtcctcggccttgtctgtcaattcaacgtgcataggcagttctacactcccgtcagaagatgtatcagaaaatacgtcactggcccttgttgaggaagatgcatgagtaacgttggggcgccttcgtcttaatttcgtccggatgaaggtattccagatgctctcaaccatctttaagcagttggcatcatcgccaaatgacatcagcttatccagaacctgtgtcatggccagctcaaaaccagtagccttcaagaagatgctgcgggcttcatccactaggttgtcgtcgcgcaacaaggatatagcagcatctgctactccctctctgacaaatctgctccagttctcctgggcctcgcagagactggcgatcgccatcgccaccgtcctcttgacttctctgtctcctaccaagagcagcagctccatcagcgcagcgaagcctccaagttcaccgatcttgatcttgttgtagtagttgtcagccagtaacccaaggatttgagcactcttgactcttgtgtccacaggccctagcaatgcccttgcaatcagcacaggtatggcatattgatcatctcctaatatcaccttattggggttgtaggaagctgtcttcgcgatgatcttgaggataatgtcgtccaatccgggatcagggtccaggcatgtctctggcaagaggcatgcaagttttgcaatcatccctgggctttggccaagcagatgcaggagcgaggactgcgcattgctgatgagttcatgtaggcgtaatatggcatcaaatgttttgtcagacaagctaggggagagtgccaagaggttgatttccctgaacagggcttcctcctcagaagaaatctttggtggttctgcaattgttgtcacatctgtaatgccgtttcttgtacgccatagtgctgtgcacagcataatgaggatattggggatgaatatgctgttgtcgagaatctcatcagttactggacagaggcgtctattttcactccaccatttctccaatgctaaaacctcaacagtctgtagacacaacagatgcaatcagtgagatgaaaaaacaagaattagaatcagggagttaatattcactatggaagctctcttttattcttgacaaaagggataaatcctcggaacagaataagaataagaagtacagtaattagaaaactatataaggggagatttaacaagacaaatgaagatacataaagataaacaaaaatgccttgtactagacgatcaaaagtttaaagataaacaaattttaacatatgtaattttctactgcaactagcttcactccaggcatattgctgaatcattcagacaaaagctccattttgagaaaggggttaacttataatgacagctcagtccctgaatcggctttcgtaaaaggccattgctcaaacctacatgatgaaagagaacaacttgacaacatgctgaaaatcagcccttcagggtattcttcacatcaggataatgtttctttccttgtttgaagcaaacataactcccaaagaaaaacaactcttacaaattgctataatttttattctccttggtgatatcatatcctatggcccaaagaagcaagcataatgtcttctaaaacaaactttaggtggaatcaagtacttcagaacatgtaagcataacaactaggggatctgaattcaccctggcagaaacaacctaacaagattccaacaggaacttgaatgaaacagtctaagaggaaatctgttatgattaacaaaaacacttcttgaatccaaatgaacaataccattacggatttttcttggactgtaattctagataaagttttctgaaacaatctctaggtggaaacaaattattcagaacaagtaataggacatccgaattcacaccctggcaggacagaaacagcataacaaggttcaagcaatccaagaggatttctgttatggaaagaacaaaaaatggcacttcttgaatcgaaagcaataataccattacggattttccttggactgtaattctagataaaaactcagttcctcacagacagaaattgaacaaagctaagagatcgcactaagaaaatatttctacattgtcaccaatccgaagcgatcttgcaacatttgtaccaatccagcactaagaaactagtagtagaaactatcagagaacatcaattacaatgtccaagcagggtatgcaaatgaattgaataccaagaacagcacaagaacaagccacaagaactgaagaaattgaggaagcagcgaaagattcggcacacctttccagaggagatgacgactggattcaccatgaccttgttggagatagggcagaggaagaactccggcacggcggccgggccaacccagcgcttcctgaaaccggcgccgcggtggagctcgtcggagcgcgccgcctgcagcgcccggaacgcggactcgaagagctcgagcgggggcaccggctcgccgccctcgccggcgcagagctccgcgaaccacgcgagctccgcgacggcctcgcctcgccgcagccaccgctccagcccggcgaggtcgagcaccctccggtcgacgaggagctccctcttgaccctccccagccgcgcgctcgccgtcgcctccatcgtcgcgtccaggaactgggccctcgcccccgccctcctctccgcctccacggtggcgaagtggtcgaccaccgccgccgcgtcgacgacgtcgtgcggcgccccgaggtcggggaacgagaagctcccgcgctccccggccttccccttccccttccccatgaccgcgtagaatcttgcccaggcggcgtccctcatcgcggcgagggtctcgtcgacgttgctgccgctgccgctgctgctcccggcgacgtctgatgacccggcgccaccgccggagagggcgagccagggggcgtcgggcggcgccgtcggtggtctcggacgcgcccgcaccgaggtggtggtggtggtggtggcgccagaacgggggctcgacggcggcgacggcagcggcagcggctgcggcattgacggcgacatcgggctcctcccgcgcgtccgcaccgacgagggggaggagggtgagctcggccgccgctgccgatccatgggcgttcttgcgatcttggcctcttcttggcgttcttgcgttcttggcgagagaggagagaggagagagagatggggggatttggggttggttgagtgttttggcggggaaggaggaggcgatttgggtgaagcgcggtgaggggaggtaatatagactaaagaagggtgttgcgatgggataattttgggcctaatttggatgggcggagattgagatctatttagaattgtgcctaaacatattagccagttgaggcccagattgatgggccgaaatcttggttcatttatgtgtaggaaaaagtacatctgaggtctctcattttgtcaccgaattacaaaatcatcccgcaacagataaatcagatatatgatatctctcgacttataaaaccgggtcattctgggtcattaggcggtatttaccctggtttttgtctaacgtggcagccgagtcagcgtagaacccacgtggggcccatatgtcagcacatcaatcctcttccacctctatcctctctctcttcccatctcaatcaaagcatctagggtggccagtgtcaggctgggagaactggagaagggtggtggccgacggaagaggcgctcgacggctaacagtggccttcgctggcggtggcgacgcttgttggtgaagacgggtagggggaagatgaacggggatggtggcgctgcgggagagctgagacaggggagcacgggtggagagcaatgggggagcatgggggagggactcaccagtgaactccgcctctccttgtcgcattcgtgaagggatccgaccgggccgtcgcgggcctcctcctctcccgccttgcccagcccgacctcccctgcacatgggaggtgggaggcaaaagaggtgggaggacggcatgctcggtgaggtcgaagcggggcacgagggcgctggaggacgacgtggccaatgaggtcgaggcggcgcgcgaggaggtgggaggacgacgcgaccggtgaggtcgagccgaggcgcgacgaggtcgaggtggggcgtggggagatcaaggcggggtatggggatgtgtggaggcagccggcgaggtccgccatggatcgcaccaagagcagccggtgcgtcctgcttggcagggcgaggtccttgacggagaccggcttcaccctcgagcttgccgctgccaccttcccgccgagataagtgccgctgtagatgctgcccgactgccgcttttccactgcccaccagccgttgtagactttcatcgacgagcgggtgatcttgaactcgctggccagccagcaccgctaccgcctatctcctctccgccgctcttctccttgcccgccgccagccaccgcccacgcccgctcgtgcactgtaaagagacaagagaagagagaggagaagggatggagaagcttgtttctgcttgagccgtacgagatgaaattctcatatacagttctcggaggggggtttgggttagttacctatctcaataaagtatatgattggtttgaggaacgtcttgagatttaggcaattgcagacaatataactagtaaatatgttcctcctcatgtcaacatattttaatgtttagggggaattacacttacttgttttctagtacaagttgctacaggttttgctatgactttttactatcgcccaaccattacaaaggctttttcctcggttcaatacataatgaccgaggccaactttggttggttaaggttccctaacatgtgggaccgagtgggtgccacgctgactcagttgccacgtcagataaaattggggtcaatacttcttaaggatctagagtgacccggttttgtaagctaagggatattatatatcaggttttccggttgatggaggattttgtaatttggtgacaagataagggacctcatatataccttttcaataatattttttttgggagactaaagaacggtatactgttgtaatggaatagctgacgccaacatgatgtcagcatggtatcgtaagtatcagatatgatatcccgtaggaattagatttggtatataaataacatgacgacatcatcgtgacgtcagctattccgttggaattgtatattgttctgtagtatttttttgttttgtaatttttagttcgatttttctgtttgcaagtatggagtaagcgcaagtagaggccagtgcaaaccgggcagtgtatcctatgcacagtgcacacgctcacactccgtaccagagcattggttgcttatgagtcaataaaacttacttcctccgtcccaaaaaaagataaaccctaggtttccgtgtcgaacgtttgatagcccgtcttatataaattttatttttataattaatattttcattgttgttagatgataaaacatgattaatactttatgcgtgatttgtctttttaatttttttcataatttttttaaataagacggacggtgaacccagagtttatttttttttggacggagggagtaaggtgccacgtgctacgaccgtagaaactacagttcattgcctatcttcaaggtatccaacagcagatcaaaccatcaccttgtttgctttatttcgtcccttccaatggacgagacaacctacagagacccagtagcgtcagctccgatcgagatcgagtcagaaaaaggaggagagaaaaaggaaaaaaagaaagaaagaaaaaaaaagggcaaatgaaaacgctcgtcgtcacgctgccgccgcatcgcgtgcacgtagccgcctcggcttggatccccccctcaaccaaaccatgcagacatgcagtgcagacgcgcatcgcgtgctggcgccactcgtttctctcgacgcagccttagcttagggccagttcaatttgatatcattttcaaccttaccaaatttcggtaaagttgtcaaaaaaaagtagatacatttagtttgctgccaaattttggtaactatataaaaaatcctgccaaaattttagcaactataccaaaattttgacaatgctaaaatttagtaaggttttttttggtattaaagtgaacaggcccttaactacagcctccacacacgctcccttccccgcctgcccgtccatccgtccccagcctcctccggccgctcgccggagaaggaggaggacgaggagacgacgacggcttccttcgatctcctcgtctcctttctctgttccgcggtacgcgttctcgcatcgcactctgttcttgcttcttcttctacttcttctctctgtacgttctgcgcattctgtcaatttgaacacaaaaggggtggtagtataactcggaatcctggtgttaattacaatttgtttgcaacgaatcgtgagtgtcaattaggcacaaatttcgtaacaccccccatcatgatttatcatgatttgacatgtttgtatgtggaactttaaaatatgataaaaatgtagatagtgattgaattaatacttgttagtgggtgtgatgatgtgatttttatctttaatattgagctttaggaactaatgatttcaaagtgggttcctagccgtcttctccataaagcgtggttgctgatggctgtttgtgcattcatgtagccgattaacatgcatgttttgctgcaaagtggtgaacatgggattaaaattttagggataccaaagctaatagaataaatatatgccactagaataaagctagcaggcatttagacatagcctatcaatagaataaatatatacttaaatattgggagtagctatatttatggcactatatttttcactaaaaaatagtcagcatgtatttacattgtaagtctctaaattacatatgtaaatttagtgtgtttataatttaagttttaaagcaaatttaagtatatatttgtaaagacaataaacaataattatctttcagttatttatccttgttcttctagaaatatctggtagtggtagagtaaggaaggaaatgtatcaaatggtagaaacaagttctttttacaatatataaacatgattatcgatgtaatcctgagggtttaagtccaagctatagatgcgcactccatacacacactagcgagtgtcactcttaacccatgttcaaggagagtaagagatgaaagttaacgacaaatttcttaaatatcattactcattgaaagtgcacatatgtctgtgtattttacgcatattaatatgagtatatatatatatattcgaaaatattgtttataatatagtgttgttcaaagtgttctacatgaatgtatgagattccacgaagcatcttggcttaaaatatatttgagttctttaaaacaaatcacaaaactttgattttttttttgcaataaacgatattgtgtgtattaattacaaatgccttagaacattttttttcttttaatttactgttttggaacatcttttttcacacagctgctggtgttgtggagtgctccagagatcgacagcgatgcattgaacattagtttcttttttttaaaaaaaaatcttttgaacaacggccgctagctgcttttgtctcttcccatggacgccaagtactagagatcgatcgaaccattcattatgcgacaccgaagatgcatggggggaggaacaaaataaggctataattggctggaatttcggtgaacacgagagatcacggtcagtgtcatcaccatcgctcgtgccgtgccaagaacagtgtctgtcgatcaccaccggatcgatcgatcgatcgatcatcagacagaggaaatcgaaaatatttgctggaggttgaaggcgactgaatctttccaggagcagaggagagagagtccctttcactgatccgatagatctttacttttcgctgttcatcgcggtagccatggccccaccaggccaccaccgcaggaagtcgccgctcaatggatcggtgcaccaaattaagcaccttttgttattttttgaacattttagcccttcttaaaattattttgtgaatatatctatacaaagtaaaccgttggatcggcgtcaaggtctcgaggcatggagctactatccaagcccttgctcgtgtgacggtcaatgttaatgttagaatttgtgttcattatatataagatgttacagtttagaattggaagttgaaacatgtgtaggatagggatagagttggactatattttaggcttcctcttaaatagagagacacacatgttataatcgtatgatgatctaatatagatgagagggaatgactgctggtggcgtccaacggagggtcgcatgagagagaacgacctagcatagaaatttttggactttaccgatactaatttcgtaaaagtaataataaatgatatcaatactgattgtttctgaatgtaaatttagtttttctaaattttgtgtgttttattgaagctgccactaaatagttaaattcataaatataaaaattctttatccaatcgatattgctttcataaaaaatatatttcctccgtttcatattattataactcattgacttttttctagtcaaactttattaagtttgatcaaacttacagaaaaatttagcatcatctgaaatatgaaattagtttcgttatatctaatattgaatatattttgataatatatttattttctactatattttcttgtaaattaagttaaacttaaaaaagtttgattaaaaaagtcaaatgagttataatatgaaacgaagagagtaataaaatgatgccattttcgaccctttttcacctaggcttatagtttcagaataagctttctcggttggtctattgataaaatcaggaaatgaatatgaaatccagccgatcactcgttttcgccatttagccgcttgcctcgcctcctggtctggatttttcacattttgatccttttagaaaacttatttcgcaaatagacccctaaaaaaacttatcccagaaatggtcctttttggggcgccagagtggctggcgccgttgttaaacaggacggcgccagcctctttggcgccgtcccaccgccgacgtggcggggctatgctgaggtggctagggggagtacgccagagtggctggcgccccccccccccccgaaattttttatttttgttttatttgtgtgatatttttttcacgcttagggacacacaagaaccaaccacagaaaaaatgaactcaaatggacgtaatatgtgacatgtagaattttttctctcctctcctctctccgaactagtgcagaggagagagatgtgcaac

SEQ ID NO: 4496 - DNA, 7288 bp, Oryza sativa
catttagaaaagcacttttaacatccatttgatacaatttaaaaccttttgaagcagcaaaagccaacaaaagtctaattgcctcaattctagcaacaggagcaaaagtttcatcaaaatccaaaccctcaacttgagtaaaaccttgagcaacaagcctagctttatttctcacaattaaaccatcctcattttgtttatttttgaaaacccacttgattccaataatattatgtccagaaggtggttcaactaaagtccaaactttgtttctctcaaaattttcaagttcttcatgcatggcgttaatccacgattcatcagttaatgcatgtgaaacatctttgggttcaaaagaagcaacaaatgcagaatttgcacaaacatcatgagccgttaccttagaccttgtagtccgctcacctatattaccaatgatttgttccggcggatgtcgtcgttgaatgtgcaaaggagcagtgacttctgaagttgagtcacgttctgtatcagtactggtcgaagtagtaatctctggaggaccatctcgatcagcatcaacagtacccgaacccgacgatcctggccggtttgaccgtacgtcctgcgccggtctaaccggaggtgtgccggcggtctgaccggcctggcgcccagtctgaccggccgagccgacctcgtcgtcgtcgtcgtagtcgctctcatcttgaaaaatacgaccatcctccccctgaacctgtgacagtgtacctgtaatttcgggtcttgtacctggactagcctcatcaaaagaaacttcgcaagtctcaacaattttgttagtccctaaaataagtacacgatagccacgagtatgtgcggggtaaccaagaaacaatccatcggtagagcgtgcctcaaacttgtccaaatttctagatttcaagacaaagcatttgcaaccaaaaacacgcaaatgtgaaactttgggttgatgaccaaatcgaagttcataagaagtttttccaagtttagatcgcaagaaaactcgattcgaaatataacaagcagtgttaatagccttagcccaaaattttatagagttttgtattcatccaacatcgttctagccatctcaaccaaaacacgaattttcctttcaacaacaccgttttgttgaggaacacgaggagaagaaaattcatgttcaagacctctttcattgcaaaattgttcaaaagaagcatttttaaaatctccaccattatcacctcgaattcttttcaaagaaccagaaaattcaagatttaatcgaaaaaacaaaccacgaaagtgttgaaaagcttcatccttagttgccataaagaaaacccaagaatatctagaaaaatcgtcagcaataaccaacacataccactttcctccaacggtgcactctagctggaccaacagtgtccatgtgtaatagctgtcccagtgcatccgtcatcacagaaacaataggagcatgtgaagtagaactaccttagcatgacgacacggtgtacaaaccaattcaagatctttcttaagtttaggcaaaccacgaacaagatccaaaccacttaacctagtgagatgatcaaaaccaacatgtccaagtctacgatgccaaaacatcacatctttatcaaacttagcaaccaaacatgttatcacaggtgaaacaggattttcaaaatcagctttaaacactcttccataacgagaaatattcagcacagaatcaccacgagaatcaaaaactttacttccagttttcttaaagtgaacttcaaactcttcatcaacaatttgtaaaaccgaaagcaaattgtactttaaatcctcaaccaaagctacattcttcaattcaaaattttcatttatctttaccaaacctgtagcgacaacggtacttgtagaagcatcaccaaagataatagattcagtcttagatgcctttttgagggaagagaaccaatttttatcaccggtcatgtgccgcgaacaaccggaatccacgatccatacgttctccttccttgccaccaaagcctacacacaagcagaagtcgaagcctcagtactagggttagataataataaaaacttaggaatccagtactgagacacacgaccaaaagatccaataggcatatatccacgtgcaaaatcaattttagaattttcagaaaaattcctccgaggtcggtctgaccaaggtatagtagccggtctgaccaggggccggtgtgaccgccactgtaccgccggtctgaccgatgttcggtctgaccgaggatctgtagccggtctgaccgcgggacccactgtggtttgaccggtttcctcgagggaaaaccagatttttgccactttgattttgcaaaagcaatctctctctcctttttctgtttatgagctaatctgaaacaaaaatcaacaatatgtccatcttttccacaaaaagaacaagtatatttttcacgttgtttagacacattgttaggacaagaagatttagcaacacaagcagaaacaggaggttctgcatgctcaacattggattttgaagaagatgcattcatggtagacatgataccagcagatttaaacacagttttattagtatcatgtttaatcaaaatctcaccacttctagcaccaacagctaacacaataggaggatgtctagaattatgagcataagggtcaaaacctaaaccacggttatgtgtgctaaccttagattgatccaaaatcatgttgaggttctttttaccatcagaaaatctttgaaaagaatttttcaaataagaaacctctttttccaaattagcacaattttcacaatctaccatgacacctttgcttttacgacatttggggcaagaaagcacttcattgtttttcacaacatcttccatgtacttaacacgacctaaagcatcttttagtttcatcttattcaaatcacatgttgagcaatccaaaacaccataaggttgttttaactttttagcagaaatcatgttaaacatcaaactagcatgaaaagcaatttgatattttttttgcaacaactttttagttaaaaacaactcatccaaagtgcgtgtatgcaaggccaaactacaagcaaaagaagatctatttttcaaatcatgtgcagcattaatatctctaatttttgaaatctcattcattaaaacctcacaatttgagcaatcatcatcattaggaataagagattttaatctagcaacttcagatttaagagattcaatgataaattcatgttttctacacatcttctcacacttcttttttttcactcaaaatattaatagcttcctcaaacgcacttaactcattatcttcatactctatgtcagattcaccacgcgccatgaagcaaacatcggagatgttcttccctttatcatcatctccactttcaccatctacatcacttagtggctcgaaagcggcgcaaacttattgaaaagcctttctaagattctccatcttcctcccttgagatgagcccttcgacctgttgttgttgggcatgttgttgttcgtcttctcaccatctttgtcttctcttttgcctctcccaagcttaggacaatgcgaacgaagatgatcaatagaaccacattcaaagctcctatttggaccacctcttttcctgttcctggcattattcacagctcgagcaatacggttagcaaccaaagccaaatcctcctcctcgatttgttcgagttgatcatcggatagggcattaaaagtggcaagaaaagaaggcatagatgaagaagcatcaacaaccgaagaagaagtagaagaaaccaaagcactagacttagaatcagcttttcgagaaagaacattcatctcatgtgttttcaatttggtgtaaagtgaatccaaagtcaaagtagacatattaacagactcctaaatagatataactttcatctcccaaatagacatgtcaagaccattcaaaaagtggcgagagatctcagattgaggataattagtatcataagaagaatcaacatatttaagatcactcaaaattttattaaacctagagagatagtcatccaaagcttctccaggtttcatctcaaatttaatgtactcctttttgaaaagatctcgacgaagctctttaatgttatttgttccttgatgaaaattacttaaagcaacccaaatctcatgagcagtttgaagatgcgcaacacgatcataatcagaacgagaaataccactcaaaagaatgttgcgagctttgcaattttgttcaaaagcagttttttcagcagcagtattaatagcttcaggaatcacataagcatgggaaacttttctccaaatatcataatcttcagccataatgtaagattgcatcctactacaccaatgagaaaaatccgttccatcgaaaacatgaggcttagttgaaaaacgagcgggagtagccatggcaaaaactctagatcgataaaaatccaaagaagaaaacaagactctgataccacttgtaggatcgaatgacaagaactaagccaaccagaggggggtgaatggttggtatacccaaaaaccaaaaacttttagcggaaataaaagttaccctcgaattcgacggattgcggtctgaccgaaattgccctgccggtctgaccgcctggttgccgtcggtctgaccgagattagatcttcggtctgaccaccgagatcatctgccgcttgctgttgccgccgccggtttgagcgccttgctcccgccggtcggaccgccacgatgccaccggtctaaccgccggttagttgccagttaaaccgccgaaacccggtgaagcacaaatcgaagaactcttaaagtggatgacgactttattacttctctttgtatttacaaagtgcaccaacagcactccttacaaaaatttcgactaaactcgaaaccctaactcaaaactcaactcaattgctctcaaaaacgatatcgggaagcctcacgctccccctctatttatacccaaggtaggcagcctaaagccacgaaccaaactcatactaggagtcctaaacaccttaggaaaccctctagtacaagaaagaaactttagataaccaatcgtaccaaatttggactgcttccaaattcgactccgcatcccatacgcacacaataactccatcgtatgccatatggaatctccatcaaccacgtacatcaactctagccttagtatcccgcatgatctctgaccaccacggacgtcgtcttatccccaagccgactcccggtccatcaccgcaaatactctccagagacatcgaatcacctacacatggaacaaacaaagaaaccatattccgagaccaagctatctccaacttgactcattagcagcaaacaatagtattacatacgtatagtatccatctagaagtcataattatgaaataatcatggatatccaaataaacaacccgaaactgaaaccgacacagcgtcggccggtcagacagtgggctgcgccggtctgaccgcgcaatacacgccggtccgaccggcaacccgtgcccggtctgaccggacccaaatccagcactacctgtatattcacctatgaaatccaatcatctccaaaaccacttcgtgaataaattccaaataataaaaccaataatatccaatgcccaattgttcatcacagaataataatcaaaaacatctttgattttacaagtctactaaagtgtaggtacccacgaaaagtacctcgtcagtagcttctacggggcaaacaatcggatcatacgacaccaatgcaagggtatgtgacatgtcatgaaggattgtacaagtcagcatgcatacatcgctacggatgatggtggatatgcaagttctagtgatgttgagcaagaatattctcttgctgctaaccttctatgtgaaaccaatgttcctgagatggaaattgatgatggggagattttaggagtcatcgataccgcaaactacaagaccatacttgtgctgcaagtgctaagcgttcaagtggagcatgtggaggaacttcaacaccataattcttcatcatcaaggattgtcgggtatttccctctcgggtcatgacactcttatattggaaaggtttgactcggcattgaagctgactggtgagttgaatatatggattgaaatggacaactccaagtggcatattatcttatctttctctttttttttttgctacacctctattgattactttggtcatcaaccctccttttaacactacaaccctacttttgaacagttcattgtcgacttgcaacatggacttctaaacttagatgaatccatgaataaaacataatactactaattagccttttacatcttggcttttgacactacaaggaaagacaaaacagatctaatattatgaatgatagctagaaatactagtaatttgcccgtgctaacgctatgacaatatttgttaatgcaaaccaaacaattacaaaataatatgtttttcacaatcacaatatattttccgaatcccccccctcccccgaacccgaaaaccggacatgactcaccctgaacattcaataccagacaaaaattacccccctcgacccaatccaaagattttttatcctacgtggcatacgcgtggcaacccagtcagcattttattttttaaaagatggtggggcccacctgtcatatactccctctctctccttcccctctctcactctctctctctctccctcactcggcaagcacggcaggcggcggctgcggcgtgggatgcggaggcagtggcggcggctgcagcgtgggatgggaggcggcggcggcggcgtgggatgcggcggtgtagtggacgagcggctcttgggtggggaggcggcgtctgtggtggccgcggtggcagcgaggaggaggaggacaccagcgagcgaggcagtgaggactggagggtggttgttgtggtgggcacggtaatggcggcgaggaggagcgaggagaggagagcggaggccaccgcggtaggcttcgaccaccggtgcgcgggacgcggaggcgacggcggtgcggcacgcggaggtggcggcagggcgggacgcgggacaacccggtcccctcccggcggcgtcgggatcctgcgtcgagaggcggctacatcgagcggccagcgcctactcgagccgccgcttcgaaactcgccgggcc

SEQ ID NO: 4497 - DNA, 14517 bp, Oryza sativa
actacatattttcccctgatataatgtggggggtatgtccaacaggcatctcatatcaccataccacagtcgttttacaacatcacaagaatgaaggtctatatatcattttcatgccacagcaacccagttacagaagtggcatgaaagaggcaactattctagcttgcataagcaaatgagacctatatgcacctgatcagagtgtttggaaaaagaggcaccaggaaatgccacttgctcaatacgctgcaccaaggtacacttgtttctagatcaaccacagtgcgtcgcccaaagcttagttatcatctcaaccttctttacaatatttgtgttttgttctaaaaactgtaattcttcggatccatcttccaacccgctcgacttgcgagggttgagagctcttcttccctggtttcaagaatattttctgtcttccaagtccaatctgcttttcatttatttaaatcttcaatcgttctgctttccacggtgtaaaacttcgtatcacctggaaaaaggaatttcaactcatttcgtaccgagtgcgttggaaactggaagcatgattctatactctagagcattgcattgtatagaatagaaccatgaagcatacattgtatcaaggctgcaaggcagcaagggtggtgactaaaatgaaaccgataccgacatagaactgaccgatcaggaccatcgtgtcggtcggtctgaacatgcaaacacacgctggtctgaccggcagcacctgcctggtctaaccgggccacacagtcagtaacaatctgttcatcatttgaaaatcacatatctccgaaaccacttcgccaaatatcaaaacaaataatctcatatggcaattgttcataatgaaataaagatcagagcacactttgattttacaataaggattttgttaaaaggtattatactattagcttacttccggattatggatgttcctgtttgtgaaaggtggctagcatggtgtgcaactaggtaattaacaaaccatatgacaggtatttaatcagatttttcacacttaaaaaaagatgtgtgacctgcttgagatatttttaatatgagccactatattgcacgcagcttatatggtgccgtccatgtatattactttttatattatctctggccataattaaatattcaacatctaggttataatttggtcaaacttttaaaactttgagcatttttttatatattaaatttgtcgtgtacacccaccactatagaaaaaggctttagtgtcgggtcataacccatatcagtgacggaaatcgaaccggcactaaacttttgacactgatgtgggagggtcatcaagtgttggttcgtagttacaaccagcactgatgatacagaacatattttttatactcttaccatccctagctgtgtatattggaagatacaaccactattttttatttcttcaactcaaatataattcttttcatggtggaaattataacccaaaacctctccctcacatacacctccctcatatcaatcttgttagaaaatgaatatttttccttttgacccatcctaaccgagagtttaatcattgatttgagtatttaaaagaattaaaatgaaaaggttgtccactataaaatcgtagctcgttgagaactacaatttccatataaactttgttgcaattcgagtttgtataaaaaagttaagttcatatatccgaaataagcactaataagattaaggtcatcggtgctagatcataagaatatccgtcaccgatatgagtggcattgttgccggtattctaaacatctggcatcgatgtcttttcctgacaaaagtgtagtcatcctactccaactagcaagacctagcactgatgcgttactcatcagtgcctattagtggtaaaagacctgacactgatatgttgcgaaataattagtgccagatggttataagactcggcaccgatatctcctcatcaatgtcgggtgaaggatatgtattgtgcaagcttgttttttgggatgggatcgaaaccatcatcaatgtcaggttttcacgaaccggcattgatgatgggggcactgatgtgttgttttgtggtattgacctttgtcccatcatatcatgatatcactcttatgtagccaggataaattcaacctttttatctttgttccatgactttgagctaatataatagcgtggcacttcacatgtagtggtggatccaagctgtcttatggctcagactaaaagtcctttgttttacaatggaaataatataacattcagcctattcatgatgcacacagatatatttgtttacactaggatttgaaacgataagcccatagagctagactttttcaccatgctaattagatgaagctttaatatgcattgggttgttccaggaattattagaccacacggtcgaggtgcctctgttcacatgtatgctagccaataaatagtagaggctagacactacccctctatcctaaagtccgcaatggaagctaatcattcttactacaagttaaggagaacgaagagcaaaaaaaaaatgtagaggatcgtcaaacgagagtagtttgtaggaaatggagacaccaggaactcgagctgtataagaatggttgtcaacctggccatccatcacattgattcctcctctgatcaatgatggagcacttcagttcactgtatcctttgagcagaggcacagccacagtagtattgtgcttcagctctcatggcatttatagtttcccccaagtgctgctactgatcacgggctttggtcaatcgatgacccgagggaaaatttagttccagtcatttaactagatgacgcaaaatatgatagtggggtgaaacagttttgacagatttgtttattttgctacacttattttgattctttttcatggtgaacgatagttatgttgttcatgttgtgccatcaagaaaatgtttcatttatatattataagagttctgaacagagaggtttactggtttagtgcccaaaattgctcatgtaacaatgaacagtcatcatgcatgcactctaggaatacttgtaagattgacgaagtcaacacaggcgtctcgctgtcgacgggtacgtcgcctaccactgaaaccacaacgctgttaaatcctggaaaatttgtaaatatatgctgccaacataaataaaagcattttacaaatttgccacaaaactgaaaaataattatataatttatttgtactataattatactgatcatgccacaattaaattatattctataaatttgccttgtagcaagctaggctgcagagaagcaaaggatggtgactaattaactaagctttaatcgcaatgtttccatcttgtatcctatttacagttcaactgattggtaataactagcactgatatcctctattttcggattattccgctgattctgagttttgtcatacaaattctgatcgttaacatcttcttccttcaccagaacgtagcatattggcacctttgtcgcaactacatgtattgtctcttttaaaaaaacattgtactaacgcaagtgcacacatacgcggaaggatacacactcatctttataaatgcataccatgcccctataagcttttccaagagagttgacggatgtgaagcgtaaattttaaccatcaactactacatatcaaatataatatcaaaacttatttatatgggtttattatactaacaattttcactagttttgataaatatatgcatacaggtcatttatggaagaaaatacattcgtcatacgacaaaatgaccatctggccaatcatgttgttgctacaacttcataaagctctgtccattagttcacaggaatcttcccagaattttcacaggctaggttataaaaagcagggttcaccattttctgcagttcaaggccctcgcaacatgactgaccaaattgctgtgtcaagtgacaatcaagagcaaatctggatatatcatatatggagaatttatttatatggaaaaggaggcactagaggaacgtttgctatcagtagttatcaggtgctagagctactggttgtcctactaattatactctacaatctacctggaagaacaaactgctcgcccccgcgtcgcccacgcgcgggcgacacggggggaaaccctagcgccgcctccgccactctctcctcctctccctcccctcgccgctgccggaacgcgccgccggagaaccgcgcggccagccgggatggcggcggcgaggccaacccccgacggcgccccgtctccgcgcgtggatggcgggccggcgcgtggtgcaaggctgacgacgcggcgtggagacggtggatccggcgccgctgcggccggatctggcctccccgcggttggatccggcggatccacgccggatctggccggaggcggcggcggctagcggctggtggctggtggctggcggcgacgacgagagccggaggctggtggctggcggccgctggcgaaggaggccggtgcatgcagaggatgcagtggcgacggcgaggccacggtggcggaggcggtggaggatggcgcggggagacgcggctggaggccgacgcatgcggaggccgcggacggcgatgcgactggaggctgcggaggccggcgcacatggaggcgcggctggaggccggcgtgcgtggaggccgtggtggcggccgcagcggaggctcggccgatgacggcggagggcgacgtggcacagccggcgacaggggacggctacaaggcgcgacggatcggcggtggtgaagcccgtcggcggtggtgacggtgaggcgatggctgcggtgaggaggacggaggcgacggcgatgcgaccaagcacccgttgacacggcggtttgatcgaggcggcgatgacggtcatgctgtgagggggggtgttgaagcctgcggcgagcttccatccaggcgtctgccttcttgcggtggcggcttgccgccgaaagatggccacgctggacgggcgagtgcggggagaggggatccattcttctctctcaccttctccctctccaacccaaccacgtggatggacgtgaagcgcggtgaaggttgagactcttctttgatggccggacggtggcgaggcgtcggcgcggtggctacgtgtcaaagggaattagatggtggttctgctaaactggcatgcactttttgacgcgggagagtagaacaacaggcgaaagcctagctttcgggccggcaacggcgacgcctacgggcgccgttttccccttggggcattgtcgtgttttctatttttcccagtgggttcttcaggtgaaaacctcgtcctggttacctaggacggacggtggcggcgcttttgtcgtcgttttccttcttggaggcatcgtttagaagtcctattcctttggggtgttgtgtgcttgttttgttttaaacagtaggatcagacgtagacgcgtggtgtggttgtatattttctttttcctgactacagtctcccaggactataggcttgtattttattccttctttatcaatagaaacgtcgcactatcttgtgcgggttgtttcaaaatactctacaatctactgatctgcctcatcgttagctagtactccctctgtctctaaatatttgacgccgttgacctttttaaacatgtttgattgttcgtcttattcaaaaaatgtaagtaattattaattattttcctatcatttgattcattgttaaatatacttttatatataaatatagttttacatatttcataaaagtttttgaataagacgaatagtcaaatatttgctaaaaagttaatggtgttaaatatttagaaacggagggagtataactcagtcttctgcagctaggaaaacttcaacttcttttactttgttagtttgttttgagacggagccaaattaagcatacgtttcgaatctacaagtccttggagctggactttttcactgtgctaattttagtggagttcaccccaaacgtcacctgaaaataatgaaggcccattcttttcatatataccaaagtccaatcctagcttcttattactctgtcaaaaaaaaaaaaaaagacaaactttagctacgtgtgtgttcaggtttgtagctaaaattggaccttttttttttaaggacggagagggtatataagaaaataagacatgagtcaaccagactgcttggagaaggaggcactgggaaattctcttgcttactaacttttactaatgtgctgaagcgtcacattcagctatacagcacggcgctcgagcttatagctataacaatcttcaaggagggatttcgagttcttcagtatacaacacaacactggattctaaattctaatgctttacatgtgtccaatatgaaggaatagaaatattatttacctgaccatatataagaaatatttttcagtgcatctctcaaatccaatcagctttttgcacgatctgaatctgtaattgttctcttttgtctgtgagattcaaaattgagccaaactatgtaatgttgaactgtaccattaattagtaacaaaactctagcgatagggtctaatacccattatattgtaattatgattgtaacgctgatgcacagttatctaagttgtgaaacattgttgcaataccttatatggctatgttacaggagaatattttgctgtagtggatacaagccaatagatagctaggttgcaatttgatacagtgatataggttcacctttccaatccagtgcataataagttcagcattgaaccatttatcacatgcaatttattacaaactggaaacaatggtgcatgtatatatgctgggcatttcacaatctaggatataaaaaaacagggttcaccattttctgcagttcaggccctcgatcgcaacatgagtgatcaagttggaattcagggcaaacgaggatggatatcgaactggttggaaagggaggcactaggaactttagctggtcaggtcagtagttacaaggtgccacggctactatagtcatcttagcaattctcccttatcatgtgcactcctcttccttagatgatagatctgtctgatatgtagctaggaaattttcaacttcttgtaatttgttttgagacttaagctaattgaataacgcagcattttacatgtagatgtagagccaaagtatgtagctcaaatctacgacatggagctagactttttcactgtgctaattttagtggagttcaatatgggttggtttggcccaggaattggacactatttattactcttagatttggcattttaactagttgtcatcaatgtgtcaatgacacgtagactctcatatgtcaatgacatgcggaccctcaagtgttgggcccgaataacaaataattaattaccacatttaagagttgtaagtattttttttccacctcatgtccgtacgtatgctaacaaataaatagtattcctttcgtcccagaatataaaaagttttagagttagatacggttattaagaaagtaggtagaagtaaatgatggaggattgtgattagatgagtagtggaggtaggtgggaaaagtgaatggtggagggttgtgattggttgggaaaagaatgttgctagagaagtagttatattttggaacaaatcctgagggctaaaagttgttatattttgtgacggatggagtagaaggctagatgctctctgtagtaaaactcacagtagaagctcatcatgtctcactacaagccagggagcaagctagtggagaaaattatggtagagaggaatgtcaaaatgagagtagattgtaggaaagagagacaccgggaacccaatctgtacatatcatgaaggagatgctacatgatgcggcaactgtcattttttagggtaatataccgcgacaatgtgagcagaccatccatcaggctgcacggcgttgcaagcatggcatttttatgggaatagcactgcactcatcgtgcataagcgtagcgtcaacgtaatcgttagcgtgctctgaacatcatgcagagacatggacaaccttgctggcttttagctcatggcattttcagtttcatcgatgtactggacgacgcagaatgtgaaaggctaggcagataggtgaaacacacacggattactttacagtcttgttgatacaaaaccgagaaaattatgtagtatgtacctccattttaatatataacatcgttgacttttttaaaacgtttgataatttatcttatttaaaatttttatgcatatataaaaaaatattaagtcatgtttatagatcatttggtaataaattgaatggcaatacaataaataagaattatatttttttaataaaatgaatggttaaacgtatctttaaaaggtcagcgatgtcatataataaaaaagtggatatagtagttgtctattataatgttttatattataaattgtttgacttttttccatagtaaaacatctttaagtttaaccaaatttattaaaaaatatagtagttttttcaacacaaaacaaacatattataaaaatatattcaatgttagatttaatgataatattttcttattttagatgttgttaatttttttataaactcggttaaacttaacaaagtttgactagaaaaaaaaatcaaatgacttataatatgaaatggagagagtatttcagtcatgaggatagtactaattatgtgcattttaatagtttcttgcaggcaggctgatctaattatatgtgttcaaataaattcagcagccatatatttcacacttatgcatgttggccaagctttttgcgagtccaatatataagctcctcaagagggagaaatgttccctacagaaacaacaagaatattagagaaagaatacatcgaatcaaactaccaaattatagtatcttataggaaagggaggtgctgggaatactagctgtatagaatctctagttcaaccactctgacacaacaaggatgacataatctacaccttggtacaaccgtttcacttcagttacctggacatggaacatgtatagttgcatgtatgattctattgcactgaacaagctgatcttctgttcaacacctttggcttgcctttcttccgacagcaccgggaaatcaccgttcaacagttgatcttctcagatcctgtgcgttcatcctccgggcatggaaagaaccgagtgccttgtacgaggaaaatggctgcaggggatgagtttgagttactaattagaaaggaaattgaattttgaaggccaaatgtgtggcagaggttattactatttacaaatataaatactgttctaaacaacctgagaaatcggtaggatgtgttaacatttctaattatagtctgatatttgaataaaaatatacggcattgattttgcattgaaagacgcattcctctaaaacatggaatagaacaatgcatttgttctttttctatttgcagaggggtataaatgattgaacagttataaaaatcatcgataatcagtctagtagcaggaaaatttgattgaacgttagctagcttctatttgcccccatacctaaaaataataactgaattggtgcgacaataatgcttggtacattaataattcattgattaaatatcatgaggactattaaaacaaagtttctggatcaccatgacatatttgcttgatccatcaacacagctctcttacaaaggtcttttttactgcaacgaagttacagcttataagctcaacatgaaacaggcaattgtgctagcttgcagaaaatggatccaaggcatgtggcttgaaactaaaaatccatggagctagactttttcgccttgctaattttaatggatccgaactcaatatgggttggacttgctgttgttcgcaagtacgctagccaataaatagtagatgttggaaactcctttttcgtaaaacccacaatataagctcgtcatgtctcactataagttgggaggagaaaattatgatagaaaattgtcaaatgagaggagtttgtcggaaagggagacaccaagaactcgagttgtacaggttttaactgaaactaggaagatagcccgcgcacatgcgcgggcttttaatataatgttgtttgaatttttgttaaagaatatttgcacgcgggtgattttttttttcttgaaatattctttgattctattctaaacctgtttttgtcaataatctatttgggattgttttgacagtgattatgattttcttctaattacccttgtaacatataaattgtaaattagacttgaaaccgtacagtcttgaatttatgagaatatattgtatcgcaacaatggagtttctaaaatttaaatagcatgtcttttcttgtatagtactccctctgttttttaatttataacaccatggacttttaagatatctttgactattcgtgttattcaacacaaattaatgttatgagagagtatatttatgaagagtgccatttatagattgatttattcaaccggttggtatggtttgtttccacatatgtggattaacttacctttgaatatttgtaaagtagtatatttgatttcataatatatactgagatttttagaaatttctaaggttgtttggatagcatgtaaatgatatggatatttgaactattgagataagtgtaagtgcttattattttacatgtaagaacatatagttggatccatgctactacaaatataacattttagataaataccactactattcacaatatcggctatgtgccactggaatttggagaaattggaccagtgccactccattacatttccgtaaaaaaatctctgttatccccaactgcacgtgggacctaactgccagttccatcttcacctccctcccctctattctctctccccttcctctctccccaccaccatcgttgacaaccaccgttgcagccgccatcatcgaccacctcagcggtgggaggcctcgagagccactaccgttgctactgtcgtcttcaaccccatccatggtgggagggctcgggacccgctgccaccatcctcgatgccaaccgtggcaggaggctcaggagtcgcaatcctcaacccaatctgtgcgggagggctcgaaagctattgccgccgccaacatcgtcgttgtcctcatagcagtagcggggatggaggaagagatgggggaagaaagaagagggaggatgggggaagatggacctcatatgtgggtccctcgtctaggggtctgacggaaaacgtgatggaatggcacggtccttgtttcttcaaattttaatggcacatagccaatatcgtaaacagtagtggcatttgtctcaaatggcatatttgtagtagtatgatccatttaaccctaataaatatatgggtttaaactattgatttaattgtaaagctagactacaaccattcaaattaagtatagccaaggaaaaatagggccaagtgccctagctagattactaaatattttctatcatcaatcagaccatcaactgatcaacctgcttagggcctctaaatataggcttaggcttattactttcgatttttaagttagatttttagcttatacgctagtggatttagagttataagtttaacggtggagtcatacatatgtcttacatcagccaaaattttcttttccaacctagtttttgatttaacagtataaagagtggcttatggctttaaaagagcaaaaaaaaaattgcttgcttgtttaagagtggcttatttttctcttctaattcgaagatctttaatggatttttggtgtgcatatgtatgcatatagatcatccacaactgtgtggctatctagctagcataaaaatctatgcatgattgcttggacagagttgagcacctacgggaggcaggcatgcagcagtatgtacgaactcatacatacagggatgaatacgtgcgggaggcagggtttaagggatctttttttttttaagattgatccgatggttgataataatgggcccatcgatttaaatgaaaatcaatggttagattttttaattgccacgtagcagcttgagagcattttgaggagtgacatgtggcgtcttgagagcgtttctagaaagtttaatggacttttagtatataataatagatagatagatagatgttacatggtgccacaactatgatgtttgagggaaccatgcccagccatagtcatagacctgatcatccaatatgttgattcccgtctgaatgatttagagcatcgcacgccatgacctctggtacggctgcaatcaagattagagtgctcttcacatcaagaaccatggacaaattaaacttgttggcttttacttcatccatttacagtttcttcttgcagcatgtgtttgttggccattgtaagttaaattattttgacttggatgatgcagaatgtgaaaggtgaaaaacacgctcgttgcttgacagttttgttgatacagaacatgtaaaatcatattgtgattttttgttgattatggagaatgctttatttatagtttataaggaatctatatatagagaggggtttaacgatgcggcatgaaagaggcaactatgtgatcgtgtaattaattgtactaagttattaaccagccttatacctattctcatacgatcttattgagtaaatgagtaactagaactgagatataattacaatatcttttttttcactgcctacaaatacagctcaactaacagtccaacaagaggcattttaggacatagctaaagcctgacaatggaagtccatgtagaactggtaccaatgatcatcctcattggttccgctaaattgaggggtctggaaccagcactaataaagactttttactagtgatagagctaattaattctttaccatactaaatatttaaatggagcccgacaagggttaggccagctgggcatgtatgcttgctagctagggcatccacagtgtgctcccaagccaagtaataggaaatattttaatccttatatcacgtagtactaaatattatggaatcaataaatagctgctaccaagctagagcactgcaacctagtagtaagtaaaaaaatattgattcttttggcatgtattgatcctcaccccctctcccttcatgcataaaagcagcaatagaactgtagacagcttaagagtcttaggaaagggagacactaggaatttaagctatacagaatggcgatgtctcgtgttacatgttgtagcaaaagtgaaattttacggaaatatgtccctacaggattagagacaccagttatccattaggctgattcctccctctagatgatgagtattccacccactttcggttctagtggcacagctttgctccaggactgcatacatggtacaatctctctctatgaccggagggaaatttgagtttttactagatgaggcaaaatgagaaagggtgaaacacacaatcttgcttgacagttttattgatattgctacagtgcttttatatactatagttattttgttgatgacgtaccatcataaaaatgattctttttttttggggggtgggggggttgattcatttatagtttaaagagagaggggttaatactcaaaccttctcttgcaagcaagggcggagctagagcgaaatggagggtgatgccacttacttaatttactttactttagatcgagtttaagctgatacgggtgcctaaatttatattgagagaggtgcatacatggtgaaaatagatgagtgatagctaaaaaattttcttaaccgggttcctgggcaccccctaatatacaccagctccgcccctacttgcaacattgaacagtcctcatgcctgtgtgtaactatctatatctacagaacctgccagcatgtaggctgaacttccccaggataattcttaaattttcttggcgcatacataagaacgtggacggggcatggtgtaattgatgggggaaaataacttcagggtgtgcacttgaattgataatttagaagtaaactggattctgaagaaatgtgcactaaagcagcctaccattattttgaaaacagcctaccattattttgggacggagaatacggtggaatgtatatgtttttaactatggtcgcatatttgaatacataaccagcatgttcataaaagaaaaaataactaccatgtggttttgtaattaaaagatgcttgtctctaaaacatgaagtagaacaatgccatggtttctttttttttttcttacggagtggtacaaataattgaatagctagaaaatcatcaataatcaatatagtggatgaaaat

SEQ ID NO: 4498 - DNA, 16925 bp, Oryza sativa
gtttatacaaggagacatgaaagaggcagctatactatagcttacataagcaattgaggcatgtgagtttatcaaagtgcttggagaaggaggcaccaggaaatttctcttgcttactgctccctcctttcctaaatgtttgacgctgttgacttttttaaatatatttgaccattcgtcttattcaaaaacttttatgaaatatgtaaaactatatgtatacataaaagtgtatttaacaataaatcaaatgatatgaaaagaattaataattacttaaatttttaaataagacgaacggtcaaacatttttaaaacagtcaacggtgtcaaatattttaggatggagggagtaagttgtaccacggcacagtgggccaccgacaggctacgggggcagcgcttgagtttatggttagaggactgctaggagacggtgtacggtcccaggtaggtaggagagtgagacgtgcggtcagttgcgcatgtgcgactcccttttcggcacgaacagaagtgcagcagccccacgtcctacctacctgggctgtactacgtgcataagcacaactactagcagctcacactagagcctatcagcctaccaacttttattcgattgaatctaatctgaacacatatgagtttgcgtggactgaattgactagtttggtttgaccagggaatatagtgtttggattacttgtgtttgagcctgttctcatattattttagtttgcaccgataggtgccatcacttagcaatatttgcatgtatcatcactcgctgatacttgtaggtatcaccaccagtacctgatagaaataatcactcattgatacctacagtaccatcaccagtacttggtaagtgcatcattcataatacctaccaagtattatcactggtacctacaggtatcatcagcgatacctggtaagtaccatcaatcattgacacctagcaagtattatcatcgatatctacaagtatcatcgttggtacctgacaacgatacctatcgagtatcattgttggtacctgatatataggtatcatcacttaatgatacctatcgagtatcattgttgatacctgacaggtattatcacttaatgattcctctcgagtatcattattggtacttgacaagtatcatcactcagtgatacatatcaagtatcatcattgatacataaaaaatattatcaatgatacatgaggtatcacatggtaccatctcgtgtactaaatttatggatgtctattattataccagtacttatgagaggccgacaagagatttgtgagtaacttaaagactcgtacacacacatcatatactgtgtagatggatagcacatcttaactaaaaaaattaattaaccatgcacgtatatatggcctggtcagtgggcacgagttgcatgacccaacttgcttacacatagcactaaaggctcgtaactctcgatgcatgtagacatgtagtgcatggctagagcatgtgatgagccggagcagcccatgcaaagagactacgcacgattggagagagtggatagtcgagcatggagggttatgcgacgtgaattgaaaagaatgatgtacgcctgttccgctccaatctgttggaacggtattccgttccgtagtttttctcttatggttataacgatctctgatgtattttttttagttgtgcagaatgctttacacaagccaaatatgatggaataaaaaatttatttattacctaattatatgaaaaaaaaaaagaagaatcaatgcctctctcaaaaccaatcagattttggtcgatccaaatctgcatttgttttcttttgtatgtgaaatataaaattgaaccaaactatatatgtatatgttgaattgtatcattagttatagtaacaaaacattagcggttgggtctaatacgaattgcaattgttatggtaacgacgccgatgcgaagcgagagctagctatctaatatgtacaacaattttacaatatatattttttggttacgttacacatcattgctcttttttatgtgacatgtaactaataatatatactaaccagttgtatgcctaatctcacgcaagaaatgagaagtataattgctatattattttctgttgctaattgtcgcctaaattatagttcaactgacataactgatgtcctctgcattttggatcagacccctagtttcaagtctgtcatacaaatgatggtcttggagatgagttattcttccctcacaatgtaatggagcaaactacataagaacatccacaagatcatgtcaaaaggacaaatctgattctgaattcagaatcaaattaagaagtactccctccgtacatgtaaaggaagtcgtttaggacaatgcttaagtcaaaccttgggaatgtaaatcatgaataactttcgaattgctgagtttgaaaatgtaaaaattatatgaatagatttgtcttgaaaaatactttcatagaagtatacatatatcattttttaataaatatttttatagaaataagaagtcaaagttatgttttggagaccgtgtcgctgtccaaaacgacttcctttacgagtatggagggagtatgttctattgctacaaatttacaacatgtctttaactttggaaaacatgataaaattatttgtgtttgatttaactatttgctgatttgttcaaatgaaacataccaagggtgaaatgttaaaagactcgtgcctgcaaaaaaaaaaaggaaagaaatgcgtagctgtctctatatacactactgcaggattgattttcctggacggggccccttttgtttacatgcggttcgtaagtggaaccgcacaggaaaatggggggactgatgccaggccatcgcctacacaggaaaatcaatttttatgtgtgggtcacttaacaggcccgcacgcaaaaataaacctattaaatgacccgcacacgaaaatacatcgagctcgatatccttcgcgcccctccgcccacaacctcccttccacctcactctctccctctctcccactccactcctctcctccaactcctctcctctcctctctcggccgaccaacggcgacagcaggtggcggcgggtgatacagtggcggcgctcggcccctccctccctctccctcggctgcgggcgagaagaagggcagcgacagcggcggcccctcccctccctccccttgaaaatccggcggaggggaggcggggaaccggcagatccggcagagcggtgagaggcggcgtgtggcggcgggagggaggcgacccacacccctcggcggcaggaggcggccgcacccatcaaccgcgggaggcggtgggacagaggtggatttggaggtgcagcggcgtcagtggctggcatggaggtgcggcggcttcagccgcgacaagccggcgtcgggtgagttgattcccctcccctccctctccctcggctcccctccccttcccttgcagatccagcggaggggtggggcgtcttcggccggcgactacggatccggcgccggcgacgggagcgggcggcgattcgtagccggcgaccgcgggggcgacggcggcgggccttggctagggcagcggcggcgacgacggattagggttagggttttgtttctatttttttactttttattttctcatgtgggcggcttaagcgcccgcacgcaaaaatccaattttcgtgtgtgggtgaggcacccgcacgcgaaaatcgtgattttcccagaccccttggcacgtgcgggccgcccacccgcacgcaaaaatcatattagccgcatgcaaaaatcggttgtgtagtagtgatatatgggcatatctcttctcaaatgttttccccttctgttggtcctttggcaaatcacaagattcaaaagaaattttgtcgaaaagcaaatagagttctgaagggccaatgtgcagaagtccatcatggaagccgtccattccatttgtacaaccggtcattaaattggaggatatgtagagatattatatcataattgattttactattgtggaacattcaaattaaagaaatttagacagggtggtttttcgaaagccatgtgcttgcacatcaatagatactcgacaatataactatatatataagtcgttgttttaagaaatgttgataaattggtgtaacattaatgcgtggttcatctctctatatatacctaagtggatatcccagcgacaaaagataaagcatctcaataaccatatgcatgttgtagtagcaaattgttctataaatgaaacttttcgcatatcactacaaactaactacaaatttacaatggtgatacgaagagttcaatatgattcatgataggttgcctataagcaaacagttctgtatgggacctattaggaagagtaggcaccgggaaattccaactgaatcggctaaggaaacatggtcgagttcgtttctctgctgcaatgaaacaaacaaaatcattctcatcccagcgcctccaccctcgcgctaaaaagaaccatagagaaaatggtcactgcactccgcaaaaaaaaaaaatccctaagattcttaggctaagaaaagcagaaaaaatggaggaaaatggttcctgcatgaaccgtgtaaaaaaatcgctaagaaaatcagaaagttccgaaaattgattggatagaaaaaaaattaaattcgctataaggggaaaaaaagggagaaaaaacaagaaatttactaaggaaatcggaaaagagaaaacctggttggataaaaatagttcctacttatactaatccacatattatagttctagcctatttttgatggtacgggtccattgtgaagggtacattactataaaaaaaatggttggataaaaaggttctgttttgtgtcatatccacatcccagacataaactatttctaatggtataaatccattgcaatgcacaggcatataactcctactctagtaggatgggaagggagaagatttgtcttgttttacgcacatatgatttacaaactaataaataactgatcagtgtgtgttttaaaaaaaactatatgaaagtttcttaaaaatcatattaatatattttttctaagttttaaataattaatacttatttaatcatgtgctaattactcatcttgttttacatatgttctcctttccctctctcaactctcccttaggctcatgttcgctacttgttgctgctcatatgcatatgtttttgagcatgtaaagcactactaccttcgtcctagaatatatatagtagatacttcctctgtttatgattagtatttttattattattagataataaaacataaatagaattttatgtgtgactattttttttaaaaaaaattataaattgttcaaataagacgaacagtcaaacgttagacatggaattccacggctgcacttattttgggacggaggtagtagaaagttttagcgtcggacatggttattaagaaagtagatagattaaatagtgagagattatgattagttgagaagtagagacagatgagaaaaatgaatggtggagggttgcgattggttgtgaagagaatgtttgtgaagaaattattatattttatgacaaatcctgtgtgctaaaagttgttatattttgggagttgggacggagggagtagtagttgctccctccatctcgtaataagttcatttttacctcctcccatttgttccaaaataaattcattgcatcggaatttgtgaaagtagagtgtgattgtattgggagtagttaaaagtgagaatttgataaattagctaggggtattctggttattttagttttgtatagtatgtatggcatgtatgaaaaatgaacatatttcaggatggaggaagtagataataagataacaagtgtataagttcattttgatgatctaactttgttagaattgtttatctgttcattggttaaaggtacaaatgagtttgcagtagctccaaataattgttatctatcgttgtaactcccttttacaaaaagcaggggaaaattttggaaagtatttatgaaactttgttatgacagatccattcttagagcttgtttgagaagcttttggcagctacaacttcttccaaaatcagaagctccccaaacagtagggtgaagctatagttcaagagaggttgctcagaaacctggtcaagaaaagtttttagctataattcatatattttcactatatatgcaacccttcagtgtaaacttactccctccatccgaaaaaatcgaatctatgactgaatgtgacatattctagtacaatgaatctggacagaggtatgtccatattcgtagtactagaatatgtcgcatcttgtactagcttgattttttatgggacggagtgagtaggcacccgtattagtttaaactccatccaaagcagagtaaagtaagcgagtggctctctcctccattttgttctagttctgcccatgcaaacagtctagcttttcaaccatattataagaagctgtagttgcggaataaagaaaatgaactaaaagacagaagctgtgaacctagcttttttagattcttatgaattggctatcaaccggctgcttataaaaatcttaagctcttccaaacatgcacttataccataaagccttaatttcatcggttcagcattcatgaacagtatgtgcactacgtggaggtacagtgagtttgttttttttcgttttccgcgcgtacgcttcctaactactaaacggtattatgttttttgaaaaaaaaatctatataaaatttgctttaaaaatcatattaatccattttaaaaagtttaaaatagttaatactcaattaatcatgcactaatgattcacctcgttttccatatcttctcaatcttctcttccctctcctcaaacttggcctaagggtgtattcaataggaggggaaagaagaagattgagaagatgcgcaaaacaaagttagccattagcgcataattaattaatattaattatttaaaacttaaaaataaattaatatgatttttaagtaattttatgtagattttaaaaaaaatgcaccattgaagtttgagaagtgtgcgcatagaaaacgaactgacttttctatctcttatgcttcaaacgagcacaccctaatttatttttctctaatacaagatcatcgccttcatttcacagagtgactcatgttattaagtgaaaattctcaacgtgcacaaacaatttcctcaatctcttcaatttcacgaattttaccttaatctttaaatgctcctctgttagttgagtattagttttctttaaaggtgattgtattgcggtattgccctctctcacgcttgtggtagctcagtgatagaaaaaacaattgataacttgagaatatcttcagttgttaaaaagaaaaacaacagcgatagaattatttaaccaaatattttaaaatgaaatttgaaatttttaaataaatttgtaattaacttcaatgaaatttgtatttcaccaaaatttaaacccaaataagaaataactttggtcacacaggtgctatttgatcacgtcatgtgaaaaggtgagtcccctatcgcctcggtagcacaaaaatactaacttaatgtgtgaggtgtctcctgataaataatcgtatttttaaattgtattccccaaaagtgacttcgtgtgagtcctacaactaaaatcatggaagtcacttagtgaagatactggaggatgattgagaagattaatttcacattttccttaatcttatcgtggatggaattaatcaaacaaagaccttatgagggagtgcctccatctttgacgccgttaacatttttaaatatgtttgaccgttcgtcttattcaaaaacttttgtgaaatatgtaaaactatatgtatatataaaagtatatttaacaatgaatcaaatgataggaaaagatttaatatttacttaattttttacaaataaaacaaaatatgtttaaaaaagtcaacggcataaaacatttaggacgattgtagctaaaataaactttaccaaattttggcaatgccaaaattttagcaagatgatataattatcaaaattttggcatgattttttacgtatttaccaaatttagcaataaactaaatgtagatatttttttggcaactttaccaaaaaatgatatggttgaaaatggtaccaaagggacagagggagcctattttaatgtatgacaccgttgacttttttgtctaaagtttaaccattcgtcttattcaagatttatataattatcatttattttattgggccgggccgggccgacgcgccgcatcatgtcacgtgtgacgccctcgtctccgtcctactcgtaccttctagatcatcatcccacacacgccgcacaacacaagcagaagcaacccacccaccctcgccgacagcgtgggcccacgccacacgacgcgtccctccctcgaaacccaggagatccctcgacgcgtacgtacgccggcccctcatatatccctacgaatctggacacgagtccgtccacattagtaatacgcgtcacacacacgaggaaattattcattacgcgtatatatacgcgcgtaccacacgaaggcgtagtaaccaacaacacacgtgtgttccagaggcttcaaccgcagcgaatccccccacctgaagaaaaacgagacgagattctctcgctctcttccggcgagattttcgtctttcccccctctcctctccgctcctcgtctcgtctctccgcttcccctcctctctcgattccccaccatggccggagccgccgcgacgccgccggcgatgatgcgcgccgtgcagtacgacgccagcggcgggggagccgccgggctcaaggtgagcaacgccctccgccacactgctctctctctctctgcgcttccttttctttttctgctctgctgctagtggtagtaccgtagtagtagtaattaatttcgttgaggcggagtgttcgaggcggtacactctggtcgggcgatgagttcatgccctacaacttatatccaatgctaaaatttgaatctcaaagcttaatttcggagttgattttcaggtttttatttatttatcgtggtttctttttcaacgttagtatttaagttattatgaaagttttgctaatacgccgtttgacgtattatcagcgattggccaaacgatgatagcctcagcagtatggccagatgattgatattatttgttttgctactcttttcttaattcgtttgtgctctgtgtaacacggtcacaccccattgattaaaagtccatatcggttcatctggttatgtgcttatgtgctcagatagagatttgttttttttatgattgttatgctcatgggtttaaccgtttaagagcctacaggattacagagagtcggcctatgatatcctgcttgacgattagtactagatgtctgatgattctcctgttctaaattccatgtcactttcaaatcgaaccaagtttttctttgtcccaagacctgcaccaaattatatagtaataatctagtctattaaactagagtgcaggagtcaacttggcagcaacaccctccatcacaaaataagttaactttttttacatgaatatagatgaaactaagtaaatttattttggaactaatggtgcagaccattgttgtgtgtgtcattgactgagtgacccaactctttccaaaaacaagcctaatttaaggctgaactgtagagatcagaccctgcatgagcgcactcacccaacactttgcttcttattctgtgtttctacatttctttaaagagatttgtgaacaaattatgtgatgatactcctccttgtgcagcatgttgaagtcccggtcccttcggcaaagaagaacgaggtgctgttgaagctggaggcagcgaccatcaatccagttgactggaagattcagaaagggatgctgcgtcctctgctgcctcgtagactgccttttatcccaggtaaattacatattcttgctgcggaatcataaacacttatctttctatatcttcttcatatgtaccttttgccgccgcaaggctggctaatcgtacgcaacagggagatatggtggaatttttccatcttttcttctgaggagtacaatcaaatttaagtcggctgggttgggaattagaaatctgtgaggggatggagagaccacatatcttttcatatacagaattcaggatggagacacgggcgcaggaccaactattaccacaaactgaaacatctagcattaccactgaactgacatttcactaaatttgtcttgtatatttattgttggcgatactgatgctctatgtagattctagaacacaccaagtattttctgttatcaaagattcacagaaataaacttagttttagtattaattctcagatgacagagtaaattatgatttttcttgcatgttttgttcatatgtgtgatacaactgaattaagctttttttttagaaaatggattaaaatccggcctctatatccacaatggatgtacacagcccacaactgaattaagcatatctgacagagtaaaacattttagacatgatgagagagtaaaacattttaggcatgtctttcttccggcacctatgccagtaaaacatatgctaatagctgcatctctgtgatctattttgcagtgaccgatgttgcaggagtggttgctggtgttggtcccggagtgaatgatttcgcagtaggtgatcaagttgtcgctatgttgaacagtatggtaagttctttccactcctgtgtcatgttttttggtttgccatttcaacttaacaatatcatgccctgcaaaaaaaaaaaaacacttaactatatcatgaaaataaacacatcattgtcagtccaatcctatcttggagtacatctcaattttaaggttaaccaatatctgaatatccctcctgttgcaacagaacggaggtggattggcagagtacgccgtggcggcagcgaacctgaccgtcaagaggacacccaacgtctcagcggccgagggcgccgggctgcccatcgcggcgggcacggcgctgcaggcgctgaggtccatcggcgccaagttcgacggcaccggcgagccgctgaacgtgctggtcaccgccgcctcgggcggcgtgggcctctacgccgtgcagctggccaagctggcgaacctccacgtgacggccacctgcggcgcccgcaacgcggagctcgtgaggggcctgggcgccgacgaggtgctggactaccggacgcccgagggcgccgccatgcgcagcccctcggggaggaggtacgacggcgtcgtgcactgcaccgtcggcgtcgggtggccggcgttcgagccgctgatggcgccccgcgggaaggtgatcgacatcacgcccaacttctcagccatgctcacctcggcgctgcacgcggtgacgctgcggcggaagcggctggtgccgctgctgctgtcgccgaacaaggccgacctggagttcttggtcgggctggtgggggaagggaagctcaggacggtggtggactcgaggttcccgctgggcgacgcggcgaaggcgtggcagaagagcatcgacggccacgccaccggcaagatagtcgttgagatggaagggtgatagtatcatgttggcatgttcggttgttcttgtttgttcgtgggtggaaacttacattggttggaacataacaatacagaatagggaatactagtcagtttggcatctgtttagtttgatgatatgacttggtgatgatatatactcgagatttgtttctctcttctgcgttttgaagaatttaggagctgtaaatctgagggcattatatatcgagattacttctgcttctgttgatccttttgcatgttacttttcactgttaccaactagcagctgctcttatgcacaggccctagcgaacactaaccaccattgcactgacaaatcacaaacaaaaaagaactcccatgcaaattttggaatctataactcatcacctctcattcgtaatagaatcgatcctgctagaaaagagggacaaaaagagggggaaaaacaaacatcaggtactccaaaaagggccaagcttaccaggactacatctgaaattctgaatagacgtatatgctacaattagtaaaccaatatcaccactgctctcccttgccacaaaacaagggaagcttcaatttatgacccgatttttgctgataatctctcacataaacccaactcaacacataccctcttcccgaatgttgataattccaacccacgaaaatatcaaactttttcaccgacgcatagcaaccgaggcatagcaactaactcgctcactttgcaacggcactagtgcccgatggcgcccgagcagcacgaccagcagagtggtcaacccgctggtagccaacatcaccaccacgtgatgaaccacctctaccagcgcctctgcctccatagtcggatcgataattgaactcaccccttccatagcccctccctccggtgtaattcccgcggcctctcatgccttcacctcggaagttaccacctctaccaggagcaaaccttcctctgccaccacctgaaaccagaaataggacatgttgacttaacagaaaaggaagacaaaaaaacaaaatagggaggcagatagacaagtatatttttgccatagcacgtgataaaatttgatacgatgaaatgcaacatacaaatggttccacagaaaaacttcgatgttcagcaatttggttttgctcttgaatcagaaatttacgagcatacaaccaggagaagcaatgtgtatcgactctgataggcagaagacattatttgtaataataaatgcgagcacaaacaaacagaacacatctctgatcaaacgaatgcaatttgaatgaaaggtgagcaacgtcaaatattcaattgtcacaagtgccaattcaacagcagatagaaacgtatccggaatttcttccataaaatccaaatggaatcatgtgctacttatattcaagatatacattgtaatgctttctgaacttaccacgtgaaccagcagttctcttttcctccacataacattgccggtcactaatcgtcacaggagaaccctgcagagtaaagagtttgtcagataaaaaaacagttgactgcacttatcatgatctccttttggtattcgcatcagcacttgtagtcttgttaaagctgattcatcattagataagaaaatgtatcaaggtagtgttttttctaacatcagtaatagtacatatgacttatgcttgtgaagaagttaagttccaacactaaaaaaaacacttccgagcaaagaatgacagaaagcagttgcaattgcattcttaactagcgcgagtgtagttttgctccttggtggagatttgtgtattctctcccttgtacataaatctccatttacattgtcagttaacacatggtcaaattatcagcatcactaaaatgtattgtcaaatcaaagaatcagaactatatatatatttctctcgcacattgatagtcttaactttctaaatggaacagtcaagaaaatacaacattcctttccaacagtgctggcatgcctgtgttaaggtattgagaatacgataatcattcctcccagctccacatttgctggttaaattatggcaactgttacacacaaaggatcataaaagctttaaacactaaaccaaatccatgaatgcctccgtgctttaaaaatatatggggccggagggtagggggaataaaagctatccacgttccagaaccactgggatcataaactcaaggcagcacaagtctaaggcctacgagcaaataacaacggacagctatcattccaatggcattgattccaccaactgagcagacagcagcgggctaaaggttgcttagcagcatcaggctaccaccaaaaaaaggaaaggaaaaaggttgatggctaggacaacaagcactgtacactttatgagaaaatatcagatatatagggagggttgactctagtgattcaggaaaacaagggttaatttagcttagcatggaaagtatttcttttatatattccgttatacctctaaaaccaggaaaatttgacgaggcatagtcaaattgtaatttggaaaaagaaaaactaaccatagtgttgtgtggtaagttagaatgtaaattataaatactagtagttcaaaacctaattaactagaaataacaatatcattgcatatacttctcttagttctgcctgctaaaagatgagcaaataacagtcatacaagaaaaagattaaaagaatgatatatcatgtttatatatgccctcacaaacatctaacccctcccaaaaaaaaaaacttagaacccctgccaaacaaacttactgcaactctttagtcacatatgtaatgcaattaacaccaaaatacacattctgcaacaagtcactcataactaaatgaaataaatgatgatgagcattcttcaatatcacagaacaatgagattagtaagatggaattaccgcaattgcactttgaactgaactgggatcttcaaactctacaaacccatagcagaacccttgaatctgtgttttcaaatggaaatacaaagacaaatagttggcattaggactcacttagagctctatcattatgtaagactataaaaaaaaagtaccttgtgacttctaacttggattccgtccggcttgatagcgccaaatttcttgaatgcttcttctaattgttcaggcgtggcacttaaaggcagattccgtacatatatcgcatgtgcatcaactttgaaaatgattgtaaaacatttcagtcagacaccaatggtacaaaaaagattttaactgcgagtttgaatctagaaaataccttcagcctcttgaatgttgctgctttcaggattaggactgaaagttggagcatcagcaaccggagcaacaggtgcaggagcaacttgcttctcttgttttggtggtgccggcctggaaggaattgcagatatttgtggtggaatttctttcatgactttgacctagatcacacaaaaaatgcaagtgacaatcttacaaggtagtactcaaatgtaaaaatgttaacatgcaacgtaactacatgttacccaattagatcatagccaccaactagcttcaaaaattcttccacctaagttgctacttgtattgaaactagataatcatgacatcaagaattaacatttcaatttcatagaacaattcccattacccaattaccaaaatgatattcccatgcatatgtattgcgaagtgcattattaacatttgcagctaaattgcatttctattgtgcattgcattattaacatttgcagctgaattgcatatttattgtgcagtgcattattaacatttgcagctgaatttatgtgccagtgccatttaaaattcagaactggaagcttcatttgaagctttacacatcagaaattaaaaggcatcatgcacctagaaaaatcctagcaattacttatgcatgtttgctcgaggttggaacacatgcagaactccatgaaggaatgaaaaatgcatatctcctcccaattcccatgatcacattcagaagcattaaaaaatgcaaagttctaatatcaaccaggacaggtgactttcagctcggtggatgaaagacaaacagcgttcaaaaacttacaattgaagcatacgacttcttgggggcctcctcttgtggtacaggggcaggggcaggggcaggcggagtcggcatagccacagctacgttatttggcacttcatctataacttcaggaatcggcgtttcctccacaacaggcccctctgtgttgttcggtgggttataaacctcctcgccgttgagatcagcctcctgagcattgggtgcaggatcagccacatgctgctccggctgcgagaaggcctctacaaaagggcaaacacaatcagtttgaccataagctcgcagcaaagaaacagccctgaaaatgctcctccacaccacaccacacaccctgttcccgcggcacgctagtgccattcgccgaaggagcaggcaccgaatccggctgctgcgacggcggaaacgacagctccagctccggctccggctccacctcctgatccccctcccccccgacgtagcgcaggatgtcgttgagcacgaagtatcccttctcctgcggcgcgaggaagaaggactgcgagaactccctgcgcacgtcgtcgctcccggtgaggtggcccgtgacgagcaccgtgacgcccccgcccagcgactcctgcgcgtccaccgccttgatctccgcccgcacgatgtccatggacacgatcttcgcgttaatcgcctacaacaacaacaacaacaaacagttcaaatccccctcccccgaaaaccatcactcggccacggggaggcccagatctgaggccggaatggaagagagagagacctccatggtggtgacggtgtccatctcggcggcggcgggggaggcggggcggccgatgcggctcccgtcctggtagaagcggtggacgagatccggcgactggtgcaggatgttgtagtactggtgcacgaacgcgttccccacctgcgcgcgcgcgaaacgaatctgagtcaagcgcccggatcaagcggcggatcaggaggagtagaggcgcgcgcttaccactt

SEQ ID NO: 4499 - DNA, 14997 bp, Oryza sativa
atcggccttccctctccaccgaatttttcaccccaacctctcagtactctctcacttattaatattattccctcagtcctctcctctctcagtcactttctctctctctctctctcactaaccgagagcggcgcggggtgggcagcggcgacgggcgggactttagttgaaccagccgttcttgggcccattaagtgatgtatgtggcaaccaagtgggttttcaaaaataaacaaaatgaggatgatttgattgtgagaaataaagctagacttgttgctcaaggttttacccatgtgaagctgttgatcaaaaggaatatagaagtatgattggatcattgctgtatctaactgcttctaggccagacatacaatttgctgtgtgtttgtgtgtacgctttcaagcttctcctcgtgcttcacatcgtcaagcggtcaagcgaataatgaggtatttgaatcatacacttgagtttggaatttggtattctacttcatcttctatatgcttaagtggatattccaatgttgattttggtggttgcagaattgataggaaaagtactagtggaacatgtcattttcttggtacatcattgattgcatggtcatctaggaaacaatctagtgttgctcaatcaactgctgaatctgaatatgttgatgctgctagttgttgttcacagattttttggcttttatctactttggaagattatggtcttacttttgagaaagtacctctcttttgtgataatactagtgctatcaatattgctaagaatcttgttcaacactcacgcacaaagcacattgatattcgttttcactttttgacggatcatgttgagaagggagatgttgaattgcagtttttggacacaaagttgcaacttgctgatattttcactaaaccctttggattctaatcgttttgcttttcttcgtggtgagttgggaataattcatccttttggcatggtttgagggggagtttgtacctcatggttttatcaagtaaaaatatgacaatgagaaaaaatgataaaagagagctttgtttatacatatggtattctcttctgcatgctagcaatactttgaaggtttatttgtctatagcatagcttgtatgtattctagccttttcatgagatttagattttgcttttaagggagatgatgcatgacacttaaattctacttaaattaagcaaatatgcaatgttgatcctagcatatggtttgatttttaaatgctctatatatatgctttattgatttgttattccttaaatagctttaattgctcattgtgaaaagagaataaaaaatataaaaaaaaatgaataccgaatccttggaaacagtcttgacgacaaggacgtattcgatgtgagcaaaataatgggtgccgaatctctggaaatagtcttgacgatagggacgtacccggaataaaagaaaacaaatatgagcaaaaagtctcaagaaaaagaaaaggttaaaaaattctcttggttgttttgtgctaaaggttatttgagaaagagtgataaatgcaataggtatatgtgtttagtgtttattcttcaacctatgtgcttgttaagatgttgcattataaatcgtatgaaattatgaattttgattattgattcaagcttaattgtaaaatctttggttcatggttatactttaatgcatgcttgttatattatagacgggttcatcttctttttattgcaacacatgacatgatgtgctatatatatgctaagctcttatacactaatgaacgtaattcctatgcttgatgaaatcattgtcaaaagggggagaagagatgagttttgggagaagcaaagtgaaattttcggagttgttaagaagagtatgtttttttcaattgggaatttctttctttcacaaagggggagaagttttcttttggatttttgaattttcgagtacgatgtgtacgtttgtacgaagtgtgctttttaccacttttgtttttatttttccaaacaccaaaacatttttgatgggtttgccaatgtgttcatcaagggggatattgtaaaatcaaagttgtttttgattattattctgtgatgaacaattggcattggagattattggttttgatatttagaatttattcacgaagtggttttggagatgattggatttcacaggtgatctacaggatactgctggatttgggtccggtcagaccgggcagtgtgcgccggtcagaccggcggtatgcgcgcggtcagaccggccagcccgcggtctgactggccgactctgtgtcggtttcgtttttgggttatttgtttggatatccgtgattatttcatgattatggcttctagatggatactatacgtatgtaatactgttgtttgctactaatgagtcaagttggagatagcttggtctcggaatattgtttctttgtttatttcatgtgtaggtgactcgatgcctcgggagagtatttgcggtgatggaccgggagtcggcttggggataagacgacgtccgtggtggtcagagatcatgcgaaatacttaggctagagttgatgcacgtagttgatggagattccatatggcatacgatggaggtattgtgtgcgtatgggatgcggaatagaatttggaaggagtccaaatttgacatgattggttatgcaaagtttgtttcctgtactagagggtttcctaaggtgtttaggactcttagtatgagtttggttcgtggctttaggctgcctacctcgggtataaataaagggggagtgtgaggcttcctggtatcattttttagagcaattgagttgagttttgagatagggtttcgagtttagtcgaaattttgtaagaagtgctgttggtgcactttgtaaacacatagagaattaataaagtcgtcatctactttaagagttcttcgatttgtgtttcatcgggtttcggcagtctaaccggtgatataccggcggtcagaccggcggcaagcggcggcactgattgttagtaatcttaccgacaccactgcagaatcaacccatccaccctgctcctgcggccacgaacatatcgtgaccaggatcaagtacttagatgcatctgcctgcagctctgcatgcaaacttctgtgatccatattttgcatcaccatgcctaacgctggggaagtctccaacgtcgtatgcatgtgtacatgagatagtcccgccatcccgcctcgtagccgggattattgttgagttccacgtttaattctgcaggtacttgaattaatttcgatctacaaaactatctgtgcagtaatttttcaattttactctcatcgctaatatgcgatatctaattgacgtgcagaaaattatcagattgatttgacgaaaaattacgaaagaaaaagaaaatatcagaattatgagaaaaagaaaaagaaaatacgtctccatgccatgtgtactgtcgattttgggaaaaaaaattcgggaaagaaaaaaattaccgatggcaggtctttcaggtgtggaatctattggagtttaaaatcagcgctgatcaggacaaagggcaactggagcatggctaggtcacgtgtgtttgtagtcaccatattatgagatatacgattggctacgtcgttagttacgtaacgtagattgcacggaatttaaaggtggcccaccgtacattaaacataatcagttagattttaagatctacggttgtgatgatggggtttatttaatcaacggttagatttttctagttaacgtgagagctcgtagaaagtgtccgattagtatagatataaatatagatagatagatagatagatacatagatagatagatacatagatgtttttatttaattatgtatcattataaatttattacaaatgtttagaaaatagatttaaaaagttacataacactggtgtgtggcatgaggcagagaaaactactctcaaattttaaaactagtaaatgatttaaaaaagatcgtacaaaattctctgttgctttgtggattttttatgacctactctttccatttcaaaaatataaacatttttaggattcaaaatttgtacaataatcttaatatttctctgcatactttcttatcaaaacccataacaactatctctcacctaatcacaatcatttgtgacctcaacctttgatttctattaaaactctaaaaaaatgattaacctttggaaaatttggcaagggaaaaaaaagatatagagtaaatttcataaaaccacatatactttaatcaaaccatcacaaaactatagatataaggcgtggtatcataaaactacaaatttagcgccaggtttttttataaaactataaatttagggctatgtatcacaacatacaaattaatatttaagttatcacaaaactatagattttggagtttacatacctagaactattattatgttggagctataaatcgatagttttatgataaatttgatacctaatctatagttttatggttcttcatcttaaatatatatagttttgtgataaatttgatgctaaatatatagttttatcatactacatatttgtaattttgtaatagtttgatcaaattatctgagatatataattggtgtgtgacaaatagaattgaatgcctaagaagccaatttgactatccagtatttatatgtcgaaataatctataatgcaacttgcatttctccataatgtgttctatattttactaaacttttgaaaggggactgacgccaggattaattactcagggctcagtcaagatgtcgattggtggaagaggtcgtcgcgacgctcccataagtcctcaggatatctttactctactttaatgatttttcatgtactaatacctctgttcttttaatttgttctagacatttttaaattattagagcgtttaagacgtgaggttgactttgagtgtgcatgattttatatcaagatatgctaatgaagttgtaatatcatgaaagtatttctaaaaacaaatctattggtacaatttacgtatatgattttttttataatttcaaatgtatgaacggcatagattaattctcggacgccagttaaaactgaacagaggtagtatgtatattgtcggaaccacaccaataactttaatttcattttgttggaggttacttgatacatcaaattacgatcgagctaatctttccaaatatcacattaattacttttttggctgttggattaggcagttcttatcaatatttatagtttttgtccacatattacaaccatatgtgcatgaatcattgtaccaccacatgacaacaacatgctgggtgtacagttatatataacaagctagtctaggtcaaggcaggatttgtctagatcacaaataggaatatcgatcgactccgggcgctaagctatccctatgtgaagatgaagacttgaacaagtccaggtcaaggcaggatttgtaaaaattaaaatcattttagctggagttaaagatcgtttctcctacatctattggaagaagtggccactgctatatatcttacctcagagttacttgctcacaagtaagcaacaaccaaaccaaggcctagaacacaacactgatcattaacctcaaatcgtccatgtctccgtttcacatactttttgttctaccatggctctgcatagcggtattggcaagtgatccgccgcccagctgcgagagaaattgcagcggcatagagatcccttacccgtttggccttgagcttgcctgcgccttgcccggcttcaacctcacatgcaacaccacagagggcaagctgtatgccggcaacgtggagctgctcaacatctcgctgctagaaggttgggttcgcatgaggatgcccatatccaattactgctacaacgacactttacacagcatggatgaaaactatataggttgggggttagatttaagagatacaccatacagattatccaacgttggcaacatgttcacggtcattgggtgccgaacacttgcgtacatcgacaatttggatacagctggcaatttaacaacaaccgggtgcgtggccacatgctggcaaggtaactattcaagcctcaacgacggtgactgcttcgggataggttgttgccaaatgaatatccccaaggggctccagtactaccagatttcgtttgacccacgcttcaacacaacggagatctacaactttagtccttgtagctatgcagcactcgtggagtcatctagattcaaattctccaagaactactctacatcttcagcgttcaatgattattatggcgggcaggctccgctacgcgtggattgggccattgggaacaagacatgtgaggaagcacggcatcaggccaattacagctgcatcagcacatacagcgattgcttcaactcgctcaacggaccaggctacatatgcaactgctccaaaggattctacggaaatccttacctgaagtcagatgatcccgacagctgccaaggtgatgttgcatacaatcccatcctttcatgcacttttgagcaagttaatttgacgtgaaaataatatggttggcaagttattttttgagcaactaattttttcacctatggacacatctgacccaagacccgaaaacctagcgggtgcagcaaggttttttattttgcccatgagcaaccaatacccgacctgcgaatctagtgggcacaacctagcttgcttgatgtttgtgtgaaaaactgcaaaattgatgcacactatttaggatataacaattacttttggatgactgtagtatgtgaagatatactgaatatttttggatcagtgttgcttgattgtgaaaactgcagcgtgaagctagatgatgaaaagttgaactttgataaagttgttaaatcttttgttgattgttggaaacttgaaagttgaactgataattttgctaccttgttaattgtgttactcatgcccttgggatatgggatgggtatttggtttctggatccatgcggggctcgtccaccccccaccgccatgctccatcgttgctgtccgttgccaccgtgctctgtccctgtcacctgccgttgtcgccggatccacgcgaatcttggcggggcacggccgccgcctgccggttccgtacaggggacccgttgtcacccttcttcaacgagcgggggagcttgctgtcggctgtgtcgcccgccacccaccgttggccgcgccacccggtggaggcggatctgaccgccaccaagcacccaagggccgagccacctgctgccgcccgccgctcgctgcccgtctcgtgagagaaaagtgagagaggagaggaggggaaactgttttaaacactcgggtggacgtccacccgtttcttgcatgtcatctaaatgattacgaaaaattttcaaaaaaaaagacatgataggttaatatgtaatatatatcatctcacaaatatgcaagttcaaatttgacttctacaagttataacaaaaataacaaatttgactgtgaatatacgtatactagttagagtttaatttgttatttttgttacaacttttagaagtcgaatttgaacttgcatgtttgtggaatgatatattacatattaacctatcttataattttttttgaatttttttcataattatttaggtggcatgtaagaaacgggtgaacgtacacccgagagattagaatccatctccaggagaggagaagaggtgagagagtggagaggaaataatgagagaaggtgagagagatgagtggataaggatgaaaaattttgaaggattgtaaggaaaatgaggaggtaactcggactttaggtggaactgtaagaggtccgcctgcgaaaatatatttccgcgtgcagcccattaaaaggtacgctagcaaaaatagaattatttttgcatgcggacctttaagagacctgtttatgaaaattaatttttgtgtgcgttactcctaaggagttgtttgcgaaaattgagtacttttttcagacgcgacgagtgatctgtctgcaatccaaagagagcttcgtccagaaaatcatttctgtagtagtaactggcatgacaaaataacagtgtcacagcatgacaacattatttggccatgccaccctcattgtcgtggcaagacaaaatacagcgtggcagttttgtattgccacgctagacacgctggtctatttttaaaattaaaaaaaaagttcagaaaataaaaaattctggtttctgccggtcgatatttgcgggcattggtcaggtgtgtttctactccatccatacctgactcgactaattgccatccattgacatagccatgtcctgcttattactcaatggcaccattcctagttggagttccatataagagcgagtttaatggtatagctaactactagcttcaaatcacctatagtcaacttaatagctaattcatataatagttaaatactacactattaatacttagccccacttatcatacacatactgcgtcttggagttcgtgctatagctgattataaatttgtagcccgctgctcttccctctcctctattatctctttaaaaaatatgtttatagtaggcttatagcctgctattgttcctgctttaagtactactctgtccgtaccaagatataagcacttttggacctcgtcaaagtcttcgggatgctactataacaaacaatatatataaaaataaaatgttttaagtaaaaagagttgtatattataatagtttgattaatgataaatctagtaacatcaattttacatggttgatcttttttattttattgctattaatagtcgaagttaaaaatggttgacttggcactatgctaaaaatgtttatattttgagacggaggaagtaagtaagtcaaaactagtttggttttatgccgaggagtgcaaattaaattatttggaaagttaaaggatgaataatgtatatcgctaaagttaggacgacttttacattattttttaaaaattttatggtgtaaaatgttgttttatttcattttcgttactcagccggctttggattgctaagagttaattataccttaaattatttatattacatcagtcatgtgccttcagcttataagatgtataggaattttcttgtgttctttgtcaatcggctaccatagaggatttaatgcacctgttcttcacatgcccttttgcccaaaactgttggaatcgtttgggtatttacttgggatactaccctttctttagagggtatgtttataagggctaagctgaattatcagggagctgttttatggagaagtttctatatgctgcctggaatatttggaagcaaaagaatagttccatttttgaccaaaaaatttcttctctgtcttcttggaggcaactcgtgaagagtgacctctttcttatattgtttagaatcaatgcgagatatcacgatgtaatcgtaagctggataaacttattgtaatttgcacccttttcctttaataaatatgtcttaacagcggtggcctcccctgctgtgttctcttaaaaaaaagatgtataggaatgtgtcccaagcaaatttttctgaattctcatctatagattgttaaacctgaaaaaaaaagttctagtcagttcatgcgcgcgcgcacaatttgtgcacaagcttgtgcctataccttctggaatttaattcaaacatgtactgctcaaaatataacatgcatgcgtattactgcgggaattataagtgataaatataatgattgctcagtagaatggcgaaaataaataatgtgctttcttgaaagagacaatgtgcttgtccggcaatgaaggcagtattctacgtgttttaatagggaggctttgttgcatacgtggatggctaggatttgtaaatgtggtaaaacaaagtcagatagtaaaaaaattgctcgtaaaaggatgagtaacatgatttagggttaaagaagattgaggtcttttttattttttttaaaaaagtaaattgaacattaagctgaccattttacaggtataagggagttatcttacctgattatgtccacaattttgtatagatgtacatcttccgccaaagataatgtcaactctacatggaacaaaaataggatggtagacataggagcacacaataaataaaaaactaataaatcaattttcaattcaagttcctgtattctttaggaaaccacaaaattaaatcaattgatggggtcatggcgatagagaaatgaagaaggcttacctggacaactgcatgacctatgcaaaaatgagggtcacttggcgctgcagcaagaagctagtaaaaaggtcactggagtctggcaggtgaaaatccaatatgaacgtcaataaatctgcaaaatcagccgcagaaaacagtaaagtctaaaatgtaattcaaataagcagagaatttagagaagcttccatgccttagaaaagtcctatagtgtagtttggattataaggtattcatcggtgattaggtattctaaacaatcagtgtaggataaatcaaattgaacatatggcatagagaatatcaacaaaattcggctcaatgtacaaggaaaatgttacataccagccttatttctgcagattgaaaataagattggagcggaacaacacattcagcaaagaaagctgtagatactgcatcatcaatcacccttctttacatgtgaaagagctggcgagtaagagctttcagaaaactgcaacagtacagaatcaatcaaaagatacaagggattatttgaagtggtacctatgcagcacgaatgcaaatgtagaacctcatacaggtagaagcttgaatggaatgaactaggtagaggatgaccgaggacctgaatttgtttgtattgaagttgcgtctccccggcaataagtgaaaaacggcgatgattttgccatgacattacagtcgcatgaaattaatgtcttgatgacaaccatgaagggcataggcggtttctggctttgctatgggtttggggagggggtaggggaagcaaagggagacgaaccatcgcggggtgaggtggggcaggggaggcgccactgggccatcgtcacggtggccgtgctacttgccggcgtcaagcatcagagaggaagcaccacaggtgggggaggagaggcggcgtgcggttgcgcttccctggcggcaccacttctttgtcgtggggacggacgaggagaggttaggaggaatgccggatggtatttactagggtgtgtattgggctttttttggccttttcgtgtgtaaccaatggcttgacgaagtgcgctgggcttcacgcgtgtgcgagcgtccagattagatggaacggctaagatttaacaggtgacgtggcttaaccataaattagctttgggttttaactatatggaaagaagggatctgatggaataaaacaaagaaaatcgtccaaataattctatttttttttcttccatgccttcctgtaatactgtctgtattacagagacgggagacatgaaattgatttttgcaatccattaaattgtacagttttctaactaagcaccacaaaattccatttcttaatgtcactggtattttgctgcagatatcgatgagtgcaaggaaccaaataagtatccttgctacggaaaatgcaggaataaacttggaggctataattgtacttgcccgtttggtacaagaggcaatgcctacaatggaccatgcgacggagggctagcaattggtacacagaaaactttcaatcttgcaatatttagatacattcgaacaaatttgaatctcttgttcgtaccagcatagatcaatacatttttttgtgttacttattgattcttttgaacatgtcatgggctaattcctcatgatacatagttgggctgaacgtttttaacatcttcttgccaggaatttgtgccactcttttggttgctttaacgagtttgcttgggatagaatggatcaaatacaaacaacgaattaaaaggcatgacctcatgagaaagaggggtgagtattttaatctacacggaggccaattgttgacagatatgatgaacatagagaacaacatttcatttaagttgtatgaccgagatgaaattgagttggccacaaaaggctttgacaagatgtcaatcatcggtgaaggaggtcagggtactgtttttaaagggtataatctcgatcaagtgaacaaccctgttgcaattaagatgtgcaagggatttgatgagaatagtaggacagaattcacgcaagagttgctcatactttctcgagtcaaccatgaaaacatcgtgaagctaattggctgttgtctgcagtttgaagttccagtgcttgtgtatgaatttgtcccgaataagactttgcactatctaattcacagccaaaatgatccatccatcagaacactagagatccgcctaaaagtcgctgccgaatctgcggaagcattttcatatctacactcactggaccaccctatcttacatggggatgtgaagtcgatgaacatactacttagtaacaattttattgcaaagatttctgattttgggtgctccaaaattagggcagctgatggacacgatgacgtggtgaaaggtaccattggctatctagatccagagtacctgctgaagtttgagctcactgataagagtgatgtgtatagctttggtgtcatccttcttgagcttttaactcgtcgaacaccattatctaagcagaaggtcagcctcgcatcagtatttcaagaggccatgaaggaaggcctatttcttgagctcatagacacggaaatattacatgaggataacatgggattgataggtgatctagcaaggctggcatgccagtgcttagcaatgactagtgagagcagaccaacaatgagcaggattgcagaggaattgcgacgaatagaaaaacaagtacgacaacaccgtggggtacttacaagtattagttcattgtcattgtcagcaagttcatctgcagacacatcagagcatttcacaggtgaaaccaatggttacgacagccttaggagggtggctgcaatgagcatagaatttgctagatgattgcacaagtactatatggttgtcgtttgaatgtgagcgcttctgttatatgctaatattatatttgtcatttgtaactctgttctagatatatagacgataatgatgttgttgttagcatgtccctctaaagaaaacattgtgtatcttggatcaggtgttgtcactagttatgaataattcaggctaaagatatcttcttgtgtttaattttaagattgggaggttaattatctcctcattcatccgaataatctctcttcccttgatttgctagatgtctacaattattgaaaaccgcatcaggttaaatcagatggcgaagaggaataacatgtttgactcaaaaagggcaaaataaaaatcctgaggatgaaatatgaacttcaagaacactaatgctggaagccattgaagaaggttgtcattgagaattttcattcatgggaaggatgccttccaaaagacactcttatgctacagctaaccacagcaatttaagtactatcaagtacaaaatgatggtgaaaagtaaggtgagaaaaggctagcaggttaacgatgacaatgtgctctaagcaacggcatgacagctttgccagattcgcaaataatgggcaaggttttcacaattgacttcatagcagactgatttggcagcaccctgcacgcctttctcagagatcttaggacagccaccaacgaccagagactgtaatttctgtgcatgagccagcttggtcattccaacatcactcacacgcttacaataccggagagtgagattaatcaagcatggaaaatgtgcaatgcagcgcatcccatgatcagttacgtccttgcaatccataagggtgagtgtttccaggaacggtgcagatgagaggccctccatcccgtcaccatcgaagaagagggcgccgttcaggatgagaacacgaatcggacaagattgaacgaacatcacaagtcccctgtgtgaagcctatttcaggtggaagccaatgctcacaacctgtaaatgtcagttcaacatttctgaaggaaaggacagttgagagctagtgccttgagactttcatcagtaaaacccgtcctgaaaattatatcatcaccaacattgtagtgttcgggtttcagccaaagtgagatgcttttaagattcttgcaggtctgggatagtgcaatcatgtcattgtcaataagaccactaacatactctaggcttagcttctctaacgacctgcactttcccaacagaaaacgaagtcctatttctgggcctttcggctctgttacaatatgcaccaacctcaagtccttcaaaccctcgcacaaaagatcatatctataagtgtgagccttgtatgatgggtcacgatctcttctgaaaatactccaaaaactttgttcgttttcaaactcaaatttctgaagcttcatccatcctgggccaaacattaaaaaatgatactgccctattcctttgcaattcttcactactagttcttccaatgatccgttagtgccaagatgctccaaccactcagtgctgctagtaattcccttacaattgttaaggtggagagaagatagagtcttgcaaccaacagctaaagagagaagcccccttgaagttatttctggtgtggagttcagttttagggacatcaacatcttgcaattagtcaggcaagcaagaccagagtcattgatttcagagcag

SEQ ID NO: 4500 - DNA, 19055 bp, Oryza sativa
cggagggagtacaatttttcttttggtcatttctccatccgagtttcattgaactatataaaatttgaatttcaaaatataataaatttaaataatttttcaggtagtaaatgatttcaaatggaaaagtcatcaataaaaagttgtataactcatcaagatatacaacttttggtttggtcattcttacatatgactttgtttgaacagtttgaatttgaattttaaaatatgacaacttcaaacaatattttcaaatactaaataatttcaactgaaaaagttatcaacaacaaagttgtataactcatcaagatctataacttctattttggtcatttcttcatccgaaaaagtgttttgtaacattgttcacaaaatatacatatctcttattgttttataaactttgtcggatgaagaaatgaccaaaatagaagaaatgaagaatatgtacatatctcttatgtaaattttgagaatatgttacaataactttgtcggatgaagaaatgaccaaaataaaagttatagatcttgatgagttatataactttgttgatgtgactttttcagctgaaatcagttactacttcaaaatattattcgaagttttgaaattcaaatttttaattgataaaaagaaagtcacaagaaaaaatggccaaaataatagcagtaagaatacaataacatgaaagagcataattttagaaacatttaggaaaaaaatcatctaatttgaagtttatatgagtaagataaactaatttcaaatttttgaaattttattttcgcatacggcttcttaagtggcccgtatgaaaaaaattgatttttccatgcggcgcttaagtgagccttgcatgcggccctcttaagaggcctgtatgggaaaatcgatttttccatacgggccacttaagcagccgtattggaaaatgaccctcgatttttcagacgctatatatggtccatttgcaaaaattatggggtctcgtacagaaaaatcacttttgaagtagtgctagtttgtgtttccatgccaccctaacaattggttttcttaaagcaaaattactcttataacttatggacaagattcagaagtgtacggtttgccaagttttgtgatcgtgcagtgcacaaccgtttcgatgtttatatatgttgatattttaggcagtataaggctgagttcggcaatggcttaaagagagaggaatctgttatttttcacacaaacgatctcaaactgttaagttctttataaaacttgttttaaaacaatcatattagtctattttttaagttgaaaatatttaacacttaattaaccatgttataatagttcagctcattttagacgtacatgctctccaaattgctaaatagtgtgttttttgcaaaaatattctataaaaaactttctttcaaaaacatactactttcgtcccatattacttgtcgctttgagtttttgtttgtaatatcttatcattcgtcttattaaaaaaaatagaattattatttattttgtttgtgacttgttttattatcaaaagtacgtactttaaatactaattttttaaataaaacgaatggtcaaacattgcaaataaaaagtcaaagcgacgagtaatagggacggaggtagtattaaatacttatcaatcatgcgctaatagatcacgtaatttttcgttcttctccttctcttttcctcttatcacaaagtcaaatattgtaaaatggacttctttctagtaacaactcagttgattacaatattgtcaacggtacgtgcaaattcatatagtatttcttagtaataactgaaacagaaattttaaattaatgccagcgtggtacaatcactacttgcgcatcaaattgagccttattaattgtatgtgcgatcgggtcttagcatgtactttttcattacgttggaaaagaaaatggctgcgtaagagcatggatgatatatatccgtcgcactgttgtttcgttttacacaggtcgtcgtaagcacaaatttacatgccatatgacaccagcactgctatgctagggttcctattcgcgcgcctcgtaatgtttgtttgacgtaacttgaatggctgaatggcatgtaattaaagtggaagaggagaggggattggggggatgaatgcaggtcgtctacagggtggtggcgctgatgcaacgcgttggaaaagtactcctatgaagaaaagattgcgacgcgctggataaactcctggagaaactgatgaaactgatggagcaaaacagagtgaaaaaatgtttccactctctaatgcattgacttggaactgttgcagtccaattaccaaaggatgatatgattgcacgatacgactaggtcctctcggaaaactttatatataatccacggtacttgtacagtttaagagagctaattattaaatcccacctctccaattcaaagggagaaaaaaaaggtgcatccagcagttggttaggaggaacacaatcgaaagccatgcataatttccagagattgttgccatccttactttggatttgtgctgtagatcagttggcggtgctgctcgctgttggagcttcgtcgcactggtggagaaaggggctttactcccggttcgtaaccccctatagtcctggatttcaaaccgggactaaagatattgttctttagtcccgggtgaaaaaaccgggagtaaaaatccatctttagtcccgattcaaagatagagctagcctagctagatccggttgctctattattattttcttttcttcattgtgtttttaatatattgatttcactccatccccattccaaaatcctaaataaattatctccaaatcctcaaatccccaaatcggccatattcaaatagatcacaaaatcttaaaacaaaattacatcacaacttctacaaaattcatcacaaatacatcacatattcacggacatcacacacaaatcaaatacacagatccgaatcacaaattcttaaaaagaaataacacaggctgccggccgccgcgccgcccgccggtgcgccgcccgccgcgaggccgccgcccgagcctccgccccgccgtgcaaggccgcccgggcccgcccgagcctccgcccgccggccgcccgatctaggatgatggggagggaaggagaggacttagaggagagaagttagagaggaggaagaggaagggaggatgggggagggaaggagaggagttagaggagaggaggaggaagaggaagagtgggatgaagagataaggtgaagaggtgaagagataaggctgccatctcctcctcctcctcgatctcgcagatggcagatgcctcgtactctccgccacgatcttttgttccggttggtattaccaaccgggactaaaaatagatcttaccaaccgggactaaagatagtaggcatcttttttcccggttggtaacattagaaatagatctttagtcgcggttggcaacaccaatcgggactaaagattaaaaagcagctctaaacttttgaaccgggactaaagataatctttaatcccggtttttattgcaaccgggactattgtggattttgaccgaccgagcaaagatgatttctccactagtgccgccacctcctcgtagcagctgctctacggcatgtggcgacgtgaagatctcgtatcctttcgggttcgaggccggctgctcgtggcctggcttcgagctcatctgccgtgacaccatcaagggcaagaagcccttcctgccaccggtcacggagagcgttggatacttggagctggagagcatctctctgctcgatggtaaggcacgggtgtggaacaacatcagctcctatactgctacaacagcgccactaaagggatgacaaatgagtccagcgacacggtctacctccccggccgaggcatacaggctctccgacaccgagaataagttcataatcgttgggtgctacacggtggcgtacatcacagttggagacagggaggacatgcggtacgccagcgcgtgctcggcgttttgcgggccgaaaggcaataacttgacgagcctaatggatggcgcctgctccggcacaggctgctgcgaggccaccatcaccgagggacacacctcctacaatacgatgtttgatccggactacaacacgacgcagatctacaatgttagcagctgcagctatgcggtgctgatggagtcatcaagatttagctttcggaggagctacgtgatgaattcatcgcagttcatcgataccaacggcgggcgggtgccaatggtcgttgactgggctgtgcagaacgcgagcaattgcgtggaagcgcagaaagatcatgactcctacgcgtgcatcagcagcaacagcgtgtgcgtcaactcgtccagcggacccggctacatctgcaactgtactcatggataccaaggaaacccttacctattacacggctgccaaggtgaatatgttaaatttctatagttttcatccttaattacttattatagtcatggaatatttctcgatatttaattattcttttattttctaaataaatttaatattccactgtagatattgatgaatgtgaagaacatgagaattaccattgctacggaacctgcaaaaatatactaggaagtttcgaatgttcatgtcctgcgggtacccgaggaaatgcctccattgaaggagcatgccaaaagaacttcttaacacccggagtacgagtggcatttggtacgcaatataaattccaactctatgtttcagtaacttgtacgattatataaactttcctcgtataatcttgtagcaactccatctttatttttaactaggaaggtaacccgcgcattcgcacgggcatatgtcatatgctaagttcgagtattaaacggagaacatctgctacgatttctccataaattgttttcatcggcattaattgcttttataaatttctaacctattaattttatattgtatcatatttaagtaatatatataagcaattatttataatcttctttatcatttgaaattaaggaagacttattttttttagaaaacatgtcaacgaaagtaaaagtaaggtgtatttttaattgcatatctattgtcatagttcattaaagaaataattaggcggaacatgaagctccaataaatatatgggtttgtatagcctaatatgattgatgtagtttgagtggtgatccataaaggaacatttcatgtagggtgggtgacaggctccttgcagcctaatatgaatatgataacaacgaaatataattgcatagtaaaaatttggaaatatcatgtaccatgaatacatgctttttatatatatataagatagatctaacgattataactaatagattaccgatttaaaaggcatatgagtattgcaaagttattgcaaagtgagtgcacctcaatcgttacgtttcctgtgtggtacttgcccactcgggttcaagtcctagatttgatacgggtgttggcatttacggctaattatttttttaatggtaagtgatgtacccatcgatggcgaggtgacatacccatcgatagcgagacgtcgtggtaacttcgtcaatcaaaaaatgtactggctcagtcttttggaggtactaaaggggtagggtgcatgcgcgctgtgtttctaaacaaaattcaatattattgattgtttctgttttagttttatagctaaaaaataaggaggggacggcaaaatctatttgattttttcttaaaaatgtatggattagtgaacaacagctagtcgatagaatatttgtaatgatttttttaataatattgttaacttgttctttaattttaaattttatagtaaataacctaatttatctcctacttaggctacattcgatctcattagttgagattatgtagggcactcaaaacgatgtaggccattaatgaacgattaattgattattaaatattatagacatgaaaagagttttttttttaaaaaaaaagtttattagtttggagaacatgctcaagacaaataagggatagccaattttataagcactttacaactcaaccttaaatttgttatttatgtactcagaaaaagtacaaatcaaaagcgtagattgagtcattaacggctaaaatcctaaccgtgtttagcgagaaaaacattcgacatatttttatacaatacattttttgttttgtgtttctgacaatatgtcttaagtaatatttaattactcattatttcatcctaaactatcaatttaggcccattgatacaaataaattctatctatactcaacaataatattctgaaatgatacgtttatttgatattttatattatattatacatctatttttggctgtgtatgttttgtcaagtaatatatttttcttatactatcatcttcactaaatatataacgttggtcatcaatatataaaaaacaataaaaaaatacatatgaactataatagaaaatccagtttaaagagtattgttttctttcggtagtttcactaaatatttaacgttggtcgtcgtaaaaaaatacagaggtagtgaaaatccaagtttaaaaagcgatgtttttttttcaatttccagtagtatgtatgtcacgcccagaaatttagtccaaatttccagactattttgtgtagtaaatccctgtccaggaccagccagggtacacaaaacgacaagtaataaacaataccaaatgtaaataaagcgtaaaatacttacaggagaggcacttagtcctcacaccgagacaaaagcagcggcagcggaaaagacgatcctagcggggcttcagctccactccacaggcaaaactcaactggggtctgagccttggtcctctaacttcgtcttcagctcagaagcactacacttctgaaaagggggaataatagcaagactgagtacaaccaccgtactcagcaagccacaccaacgatgcagatgtgcaaggggatacaaggacggtttgtggctatttgcataaagacagttgtaaaacattttattgagcaaaacagtaaaactgttgagtaattaaagtaacattaaatctccactgatcaacgctacaccacgttgaacaggcccaaccaacccacctgaaccacagtgcattgagtcgatttattaaagtgggactaatcacggtgaatctggtcgaccgcccataaccgcgggcacggctattcgaatagttttactctgatcagaggtgtacaactgtacccacaagacacagccccacgacacgtttccgtgcgccgacatgccaccacgacatatcggaaagaggccgtgacaggacccttcgcataaccccctctaatcaagcacaccacacctcaggtttcacccccaatcctcgcaaggcagcgggcagtcccctctcgtgcctaggtgaatccggaagcgacagaggccgtcgcagggcccgccccgctccatcacgcccacccttgcctggatgcgtcgactagaggaaagctacactacaagcccagccgttgcccacgctggcttgtggtaagtacgataagttcttccagggcatcccgcgaaccggtccttaactgccatgggtgcgaccagcaaaaccatgcacccacagcccaccatttagtcacactttagttggataattacgaccatgaagcatggccagatgtctcgagcacgcagctcattctgttactaaaaggtctaatactataattatcccatcaactgagctagtggtaattaagcatggctaagcatatagttctagctaggtcacataagtaacatgagctagtcgatttattacccaaggttgacaaaggacagatatcaagtaaacatggcacaagcgagcagataggtaatacccggatcccatgtaattagcaaaacatgcatatttatttgtaaacggtaaaacatttgtaaagtaggctcaatatgctcaaggggaatgtgtgacttgccttgcttcttcacttggatcttctgaactcttatccttgcgaacgcgatcttccgaaacgacgggaactacacgctggcacgcaaaacgaggaaaaactctaataaaaaccaagaaaacagtacataaaaagtaaacaaacatgtagagctcaattttagatgaattttgcaagttgaatggcccaatttggagttcgaatgaattagatatgaattttagaagttttgagccatttaaattaatttctagaattaaactcgatttattgcgcaattattatttaatttttcaaaggaaaaaggctgccgctgacgtcatcaagtgaggccggcgccgacaggcgggccccacacgtcagcgggtcaagggaatcggtccaccgtggaccgggaccacggggtggtccaccgccggtccacgggaaccgacggcccagatcagcccgagctgatcgggcggccacgaggcagggcgcccagagcacgggcacggctcagtgccggcccggccgagcgatggcgcgcggcagcgcggccatcggcgacgacggccggcgacggcgcggggaggagaggagggatgctcaccaagggcggcgacggcgagactgcaacggggaagccggcggcgggctcctcggggaggcaacggtggtccggtggcgtaccacggcgcgaggcggcggacggtgaccgggacgaccggggcgcggagagggcgatttcagtggttcccggaggcgaggaagcggtggccggggtgtggctcggagttgccgatccgagggaggaaacggcgcagtccggcgtcgaccggggaggcggggcgacacagatggagacggcaaacacggcggcgatctcgggttggtggtgaagttggtgctcgggcagcgaggcgcgacaaccgagcggcggccgagcttgactttgaggcggcgaaggtactggcagtggtggcgcattggggcgacggctagggcggcggtggcgcgcggctggaggcggtgaaaggggcggcggcctcgggtgtacagtgggagtggtgttcgaggggtggagagggggaaataagaggcggccggacttccccttgcggtggcgaagctggcggtggcggcggctcggcgcggcgacggctgtggcggcgggaaacggcgaccggagttcgccggagagcggcggtgcgtgggctcggcgcggggagagcgagggagggcgcggcggcttgggaaaaatgggggaaaaggatgagggaaggccggggattgtttttataggggaggggaggccggatcgagcccgggagaggcggagtcggggcggcaaccgccggtggcgtgggcggcatcgtggggtgtgggtggcggttttggaggggagaggtgggggaaaacggcgcggacgtgggcggcgaggtcccacggacgagcgcgcgcgcgcggggtggaggaggtgggcggaaacggcggcgtcgtggggtggctcgggcggccatggcggcagttgtggccggcgtgaggaagggggatgggcctgacaagtgggtcccgcggtcccacttgtcggcctaagggagagagatgggagagggaggcaaaatagacttgcgaaagggagcgagctgggccgaggaggggaaaggagggattgggccgaaaggggcccaaagagaggaaggattttaatttgttttcttttttttttatttaattgattcaatgaactttgtgccattaaaattatttcttgagctccgaaaattcacgggaaatttcagagagtattttagggcacaaagaatattgcaaaatattcccggccaatgatttttaagggaaaattttaattcttccattatttcacttgattaaattgctttaaattttatttaatttctagaaaatgtattattaaatgatttttaatcccgaacgaaaatcggggcgttacaatgtacgtataacgtctgttttttgctgtatatcatttcttcttttctcggtcgtggttgttaattcgtacatacatatgccttctcagctttttctggtcaatattttttatgaaaagttttactggtaaattaggagggatagattactatttatatataatatatttataacaaatctaatctaatggtttaaactaatgggtccactaacttaaatgaaaatcgggggctagatttttttcttttttcctcagaatttctaagttttttctattttattagagctccatatgacaacttaagagcgtttttagagcaccatgtggtagtatgagagcgtttgtaggaagtttaatagactttaaattagtatatatataatagacaggttagtcataaataatttcaagatatatataagcatatttgcacgatttagatatatagttgctaaattttttaacatgaaattttgcttttctaatcaataaagcatgaaaatagataaagaatataacgaaggatgatggtactgtagataatggcacgtacgtacctacattacatataggcctgagcggggccggtttaggagattgattttttaaagataaatctaatggttgtaataatgggtccaccaaatttaattaaaatcaatagctggatgtttaggaatttctctaatttattatagtgccacatggctgcttcagagcgtttgtaggatgccacgtggcggtttaggagcatttgtagaaagtttaatggacttttagtatataataataataataataataataataataataatagtccatctattatacttataatacttatttattatacttgattgatttatacttgattgatttctatatctcgaactattgttgacgaaataaagaacatgttaggagtgtatatatggagccatgcataatggcacggaagaggtgtgcaacttgatggcgtatttgcttttttagattgttctaatttaatggtttaaaattatgggtctaacggattaagggaaaatcgatggttaggtgttttgtttttatataaaatggcttttatatgtaaataatttattatagcgtcaattggtggaatgtatatatgtacgtaaagataataacctgttgttcactgaggtacatatacacgtatgtttcacattatatatagctaatcttgccagagggtcgtaactaatcttggctgccatttaaaatttgttttgacggaactaattttgagataaatatggcaaggcccaagatcgttttgtcagacccatgtccgacgtccccacttgcgtattctaaataaggtaacatcgcgtgggtccttgtcttctcatgttgcaccacgccgcagcttaggagcgtttgtaggatatccacgtggcgcgttgagagtgtttataggaagtttaaatgaacttttagtatataatagataatagatagatagatttctccataagtaattacattgtaggtagggaacgacccgaacttatgactcatttatggtttgtttctcttacaaatgataccataaattaaataacacatcgatgtctgcaaatatctatctacagaacatcttagggcttgttttgatggcatttaatctttggtgcactatttaaattcttaattctggatacaaattatccccaccataatccccatgacccaaacatacaagttaataggttaggttgaggggtattgaagggggttggggatgatgagagaaggggattcacccaatccacccccatgttgccaaacaatgttttaagcctttttcagttaatctctctgtcaagtagattgaagtggatttagagaaaattaaggtgtggacttgttcaattaatctccttgaaaaaaggattggatgaaattgaggggccctcaaaatcccatccaattctctttgtgggggtgggaggttgcttaactgaaaaagaccgaagggaatgattgtttgaacacactaaaacttacggtttgcttaattgtgtgtcctagactgttaagtacaacatgtacattgatgccaaaatattgaagttcaaacatatgattaagccttttcagtaaagaaaaaactccgtcctttcagggcttgttacctgtgtatttgttggtctatttggtttccttggatgggaggtgatccggcacagacagaacacaaaaaaacaagctctattaagacagacagatgaattttttcaacaacatggaggtcagctactgctagaaatgatgaaggtagagggcaatgttgggtttaccctctatgagagagggcagatcgaaactgcaacaaataacttcaacaaggcacacattgtcggggagggaggacagggaacagtttacagggcagagatagatggcactattgttgcgataaaaaggtgcaaggagattgatgagagcaggaagatggactttgtacaggagctggtcatactttgtcgtgtcaaccaccctaacattgtcaagctacttggttgttgcctacaatttgaggcacccatgcttgtctatgagtttgtgcaaaatagaacacttcatgagctattggacttccaaaggaacaggagttgccatgtcactttgggaacccgcctgaggattgccgccgagtctgccgatgcgcttgcgcatctccattcgttaccacacccgatactccatggtgatgtgaaaccagcgaacatactactcaccgaagaattggttgcaaaggtgtctgactttggctgctcaacaattgatgagaaaactcaggttgcgcccaagggcacacctggatatcttgacccagactacctgcttgagtatcagctcacagctaagaatgatctgtatagctttggagtaattctggttgaacttctaactggtaagaggccactatcaaaagaaaggaagaccttgacctcaatgtttaaggaggctatgacggatggcacactcattaaactccttgatagtgacattgttaatgaagacaacctgagagtgatccatcaggctgcagtgctagcgagtcagtgcttgattattccaggtacggcaaggccagagatgaggtatgtggcagagcagcttcagcaacttgcatttgcagatgaagtgcagcaagatccacagccaccgcttgtgcttgcgggtcttaggtttacggcagagatggcaaatacacgtacaacatcctcatggcaaactgatagcaagactaccggggtttacagcctcgagaagaatgttagactttgctctaggatcacctaggttagatctagtcgggtggttctatttgggattgatgtttgaactatagagattgaaaacgggagagggtttagatagaccgaccggttgaggagttcgtggaggaagaggcgccggacatcgtcgttgtcgtcgcggcttgacgtggatgcgatgccggtgaggtcgacggcgatgacggctgcggcagtggtggtcgtagacgtcccggcgatgaggcgtggcgcggcggtggcgtttcccgtcactggctgcgccccctctcgatcggattagggttttgtggggtggagttggcggcggcggtgaacttcgtaccttgtgccgtgccggcctccacccctcttttatatggcgcagtgtgacgggggcccaccagccattgggctgggcgcccccgatcagggtgcggtcaaggcccccttgagccgttgggctcaaggggagggagatctatctaacattctcccccttgatctcactttttcttttagctttttctattccatcacagatttgtaaatatagcatgtttcatcgtcacggtcaatcgccgatggattcgacagccactatacacatctctattcagaaacagatactttacttttgggccctgtagtccaggattcataaggcttcccttaaacccatgccggctacatgttccttgaacacgttgggtggtaggcctttcgtgagcggatccgcgagcatcctttctgttttaatgtgctcgagactgattgtttgatcccggactttgtccttcacaacatagtactttatgtcaatgtgtttggcagcaccacttgactgattgttgtgagcgtacattactgcgggttcgttgtcgcagtataactttagtggtttctcaatactgtcaaccacctttaaaccgggtatgaacttctttagccagttcacctgccccgttgcctcatagcatgctataaactcggcatacatagtagaccctgcagtgatagtctgttttgagcttttccatgaaatagctcctcctgccagggtaaacacgtatcccgatgttgactttgtattatcttttgcaaagtcagaatctgagtaccccactatctggagtgattctgatcttttgtaagacagcatgaggccttttgttccttgcaaataacgcaagactttctttaccaatttccagtgctctaggcctggattactctgaaatctgccaagtaacccggtaacaaatgccaagtcaggtcgtgtgcacacttgcgcatactgtaggcttcctacagctgacgcatatggctttgttttcatttcattgagctcatactgatttctgggacattgcgatgccccatacttttcgcctttcattataggagcaggtgtagcactgcatctgtacatgttgaatttcttcaacaccttttctatatatgtcttttgagaaagtcccaatgcatactttgttctatctcggtgaatctctatgcccaaaacatatgaagcctcaccgaggtctttcatgtcaaagtttgaggacaagaatttttttgtttcctgcagtagactgacatcactactagccagtagaatgtcatccacatacagaattaggaaaataaatctcccattcttaaactttgaataaatacagttgtcctcgacattctcttgaaacccaaatttttttattgtcccatcaaacttcaagtaccactgtctcgaagcttgctttaatccataaatggatctctttagacgacatcccatattttcgtttcctttcatgacaaaacctttcggttgcgccatgtatactttttcctccaaatctccatttagaaatgccgtttttacatccaactgatgtaattccaaatcataatgtgccactagtgccattataatcctgaaggaatctttacaagagactggagaaaatgtctcattgtaatcaatcccttctcgttgtgtgaagccttttgccacaagtcgcgctttaaacttttctatattccctctggagtcatatttggttttgtagacccatttacagcctactgttttggctcctttaggaatttcttctaaatcccaaacatcgtttagtttcattgatttcatttcatctttcatggcttccaaccattcagatgagcgagcgcttctcatggcctcttcatatgaggtgggatcatcctccatatgcgactcttctatattttaaactttatagtcatcacggatagccgatcttctgactctttcagaccttctaggggcctgcacatttggcacatcctgtacctgaggctcttgatgagtctcctgtactggcacattatctatttgaggctgttgtagctcctcctctggtgtggcaaccatttctgttgaatcctgtataacaggttcctcactctcattcattgttgccacaggaggggtaacaacaggtgttggtacctcaatgacaggcattgcaggcacaacatcagcaggtagagagaagaaaggttcctgagtcgacggagcgggtacagacacccgcctctcctcaagatcaatttctcgaactaccgagctccccctaatcatttcgtcttccaagaagacggcgtgtctcgtttctacaaactttgtataactgtttggacagtagaaacgatagccttttgatctttcaggatagccaataaaatggcagctgactgttttggggtccaacttcccaatatttgggttaaatactttggcctctgtaggactcccccacacacggaggtgagttagcgagggtactcttcctatccatagctcatacggtgttttgggcaccgatttgcttggaactctgttgagaatatgaatggcggtttttaacgcctccatccataaaccgagtggtagtgtggagtagctcattatgctgcgcaccatatccataagggtacggttgcgcctttcagctaccccattctgttgaggttcgcccggtgttgaatactgggctactattccattctctagcaagaaccttgcaaaaggtccagggacttgcccataaggcgtatgtcgaccatagtactcccccccacggttagatcttactactttaatctttatatcatgctgattttcaacttcagctttgaatatcttaaatttatccagtgcttctgatcgctctttaattggataaatataaccatagcgggagtaatcatctgtgaatgttatgaacgagtcatagccatccacacttttcacaggaaatggaccacaaatatctgtatgaatgatctctaaaattcctgcgcttcgttttgcaccctttttgatgctctttacaaattttcctttaatgcattctatgcattgttctgagaaccccaatggaggaagaatttcattcttaactagtctctcaattctccccctcgaaatatggcccaaacgacagtgccataatttcgatgagacatcgggagttcactttcttttcttgttttcttttgtcaacgaggacacaacattcacattctcagaaagagataacaaataaagctcgtctcgcaacacagcaagaccaatacatgcattattatgccatagttcacatttgccacttccaaagcggcaatcatatccatcaaaatccaactttgatacacttattaagtttctttgcaaagaaggaacataaaagacatctcgaagtaaaagtatgaagccattcgcgagctctagaggaagatctccaacagcttcaactttttcttcaactccattggcaactctaatggtgctttctcttctttgcgtagtcctcgtcgaacggaatgcctttaaacaattacaagcatgaatagttgctccagaatcaatccaccatgtggatctagagtaaccaacataatgagattcatttacaaatgtaataatgttctcacctttctttgccatgatcattttcaaaaagtcaggacaatctctcttgtagtgtcctgtcttcttgcagtggagacattgatctttctcaacagcgaactgttgttgctgaggcagatgctgagactgtttaccttttgaggtgggagacttgtggttttttttcttatctttaacatagtttattgaaccaccatttgattcgttgattctctcctcctcttgcacacaattagcaatgagcttctcaaagttccatttctctggacttatgttgtagttgacaataaaattgtcaaactgctttggcaatgaggccataaccagatggaccagaaagtcatctgttatgcccaaatccattggcttcaacttggaagccatgttgcttattctaagtatgtggtctctaacaccacctccatggtacctttctgtcacaagctgcttgatcagctgtgtagcataagtctttgaagagccagtaaactgactctttattctttcaaggtactctgagacagcgtcacactctgggatcgagcccaatatggtaggctcaatcgtattctttaccacagccaaacatttcttgttggctaaggaccatttcttttgttcaatgtcatacgacatgacgagaggagcattgtccctctgtctcttttgccagtcagcatctgactcattttcacctctgataagttcagcaagttctataggacatggggtagtcaacacccagtccacctctcccaagataaaagcaaggtcgagttttcttttccattctgcgtagttatctccttttagggtcggaatatctttaatgcaacccatcaaggagtagccacctgaaataatcatgtgcggtgagaacaaaattaacattaaaatagtatgcattaagcctacatcaccgttgggcagaattagacataacacatagccataactataacattgcaattatcaacgttggtcagaaaattacaacatcatagcacataattaatgttcctaaaattaaattctcccgttggttcgaaatttaattttagaaacactaattttcatcaatttcatctatttgcagcggaaaaactatataaaatttatatgaacagtagcaaaacactgtaatttactctctgcaaaattctcccgttggttcaaatttaaacagaggtaaaacatgcaaaaatctattcaaaattctattgaaatttgcatgaaaaatcgacaaaataaattggaaaaaatgctactgttctcttttctttgttttcggccccgagggacctcaaacagacttttcccggtcggcccgcggccttttggcacgggcgggcgccccccttccccaggccgcaacctgggcctgggccaggaaagcagccccccgcgcgcgccctcttgggccgatttcggcccggccggcgtcgaccgtccgatcagctagggtttcgatcggacggccgggcgccgagatcggaggatcaaaacccccctctcccggccggccgccgaaaaccctagcttctcttctcttctctctctcacgcgaccgcgtggacggcgtcgccatcgccggcgaccttcgcgcccgccgcgccatggccagcgccttttctcttctcttctccccccaccgtctctcgccctccacccgcgaaaagtgagagagagaacggcgacgacggagatggcggcgccgccgcgggccccctcg

SEQ ID NO: 4501 - DNA, 20829 bp, Oryza sativa
acggctttgcgggccgggggagggggcacgcccagcgagaaaagctggtcgtagtcggcacggtcgacgcggtggaaggcgaggacgtcgcgcacggtcggctccaccatggcgagagcgcggcgcggcgaggcggttttttgtggcgacggggaagaggagacggggaggggggtgacatggcgtccgtacgctttcaaaacgacgcggctgcgcgaagtggcgcgtacactgaaaatgggggaatttatttctttttctttttgacgggcactgagaatgggttggaaatgcaatggagttcgcttccttccaaggtacactatacttgcatgttagccattcagctttgcagttatacgaattgggccgtgtttagttacttgtcaaaaaataataatttacatatacgaacacacattaatataggctaataacaaactaaactaaattataaattccgcttataaactgcaagacgaatctattaagcctaattaattcatcattagcaaatgtttattgtaacaccacattgtcagatcatggcgcaattaggctcaaaagatccctctcgtaatttacatgcaaactgtataattagtttttttttccacatttaatgctccatgcatgtacatttgatgtgacggattttttgaaagtttgaagggaattaaacacagccttggtgtaaaattatactccctccatcccattttaagtgcaaccgtgagttttcgtgacctactttgatcgtttgtcttatttcaattttttttttgtaattggtatttttgttgttatgaaatgataaaaacatgaatagtattttactcgtgacttatgtttttaaattttttcaatatttttttaaataagacggacaatcaaagctcggcgcgaaaaaccatggctatatttaaaatgggacggaaagagtactactctgtcccataaaaaacctaattatgtgtgtccaggttcatagctagcattgattttttttagaacggagggatattactcactacgtcctaaaatataagcaattttagactttgacatgttcttcgaaatgataccttgagcaataatatctgtaaagtaaaagtaaaaggtcttaaataaaatgagttgcatattatgataattcgtttaataataaattaacatcattttttacatgatccatctttttttatttttttgctattaatagtcaaacttaaaaatatttgacttggcactattctaaaaatacttaaaaatgcttatattttgtaatggagggagtactctttttgaaatttacgatcttctcgcacaacatttgaccatttatcttataaaaaattaatataaatatgtaaagtataagttaagattatattttatttgataaaacaagtcatataaaataaatgatatttatataaatgttttgaacaagataaatagttaaaagttaacggcgtagtccattataaaatggagggagttttatttttctactttggaagggtgagtggctatatatttgcaacattgtgagatgaatcgttgtgagggaattaaaccaatctgagttaaatcctctttaattggacggcagagacgagagggctacggaagttgatccatcccatagtttgtttggaaaattttcctttgggaactactccaacgcatcatttactcttaaacttattaatcgtaacaaaaaaataaattttacaatttaattttggtgttgattttaatgtttttccataataatagccaagaacgcatgtataaaagatttacccataaaattgtttttctatcagtaataagcattgcggcttataatcagccagagcccatttaaaactaatgaatgatatgaaacggaatagagaaaaagcatactccctccggttttatttcaattgacgttttagacaatggcacagactacagaatatatctttgaccttatttttctattataatatatacaataaataaatacatgtttacttttattatagtgctttgaaagacaaatctataaatgttgttctagtttctttaaactaaatatttttaaagctattggtggtcaaagttataaaagtttgaccgtaaacttatccaaaacgtcaattattatggaatcggagggagtatgattttggtaggggtacatgtacaaagcaaaggaaaaactgcataaaccacacgaattggatgagagactcaaaaggaaaaaaaaaataaaaagatcggagatctttgctaatatatgggttaatattttctttcatgggcgtctgccctgcgaaaaaaatcgaaagctcgacataagagaaaaaaatcaggcgcttcaactttccatattctatcacttatctcctcccatctaccagagagtagatgagtagctagcatgttgttgtcccctcactccattcatgcatgcacgcacaagtgacacctcacccatgccatacatacatacatctttcgtaatataattttcaaatgatattttctttcaaattacttttgtaatctacaatctgattgcactaataaaattattgcaattaaatatttacaataatatcacatatggttatattttgataaaaatagtttttttaatggatttattttaattgttgctatggttttatttaaatatttcaactagtgtttttaagatatttcacttggtaatttgtaaatgttgcacattgtgctctttgaaatgtttgaacaaatattttacaatgcttcatcagttgcagtctaatgttcatacataactaaatgtttcgataatattaagtttgtattttttttcttttatattttacttgctgggacgcaatatttcacatagtggtcattggttttacagtcagtattttttgaatggtacacttgtttgaaatattttatacactgaactaaaacatttgacacgtgatgaaagatctttctataagtgataaaaagaacatttattttttcttattaaaatataatcatgtgagatctttgttaaagatttaattacgagtataacggtgtaattggattataaatcagatagttaatttagaaaaaaatgtttggagagggggaggttaagataggaaagaagttcctaacatactagctagcatggagattagtggatgtcggctatgacgatgcatgcttgcacatatgcttctttcatgcgctagaaagctaggccgctaaccaatcaacggggatggaagtagagcagtgacagtgagggagtgtctgactcttaaaaaaaaagacacctaatttggaatcggctcctaatataagggtggacggagttagtatgtcttaagagtggggttatatatcctaagttgtcttaaatccaacataacattacagtgtaacctgctgcatataaaaaaacataactgattatgcttggtttgcaagactaggtggctcattcctcctcaagatgtccccataatgttaaaccaggtcaatgatttttcttatgacctaattttaagcacattatggcacctccattgcacatgttatttgcatatcctcaagaaaaaaaagggggaaatgaaagaattgttctttttagctagtataactagtggttaatacttattgcagtcaacttttatatacgttttgcaaaaaactttctatatgaaagttgtgctgaaataagcaaaggcccaccatctaattgaaagtaaaagcattatgcctaatatggttgtttaggattttgctgctttattggttagtcagaaaaatattggcaatgtcaaattcttggcaacaaacctactgaatgaagtattccattggtaatgcagatctttttagggtggctggtttatacaattaaacaaacaaacttgcacatcagaaaacgatcttacacagcagttaaggaaatatgaacatgtggtggtgacggtgccggactttttacgccccacacattagaaaacagtagaaacaaaataattgctttgtataaactccctccgtcccataaaaaaccactgtcatcactgtccagattcattgttctaaaatgtatcacatccagtactagattcgttttttagggacggagggagtagcctcaaaagcgaaatatctgtaacagaataattgcttccttaattttgaaaattcgcacgctatacgtgcaacaacacataggagttgatgatgagccattgctttggcatttcacagcgcgcacttacactcatgaactgtatttacaaaggaatagaacttttagtgctccttgaactgacaaagtgtccctgattaatgtatcaaaataacccagtgaaaagcatatgattctgcatctatatatatatcctaaatttccaacgagctaaatcagtatcatttaagtggctccacggcacatggtgagttgtgatcctaaaatgtacttgtatatgttagatgctcaacatatgtgactagctaatgattctggagttcacattctcctctcagtgaagatgattcagattgttcgtttcccatatctctggtcttgtgcagaagaaaagttcctgcaacaattgtcacaaacccacaaagctcggttgctatctgcgttgcattctgagaggcccagtcctggaatgaaaatttagggaccatcaaatatgtttgtcaatctccaaaaaagtcacattaacaatgggttagcacctatcggaaatgtttagtatcgaatggcggaagatgaacaatggaatatcatgcataattcaaatattagtttttcgagtcaagttaaaaaaattagtacaagttcagtagcgacaagaatctcgacgcagaggccccttttatgaatactgaattgtcatgcatactggcatgaaaaaaatttcttgcccaacaatgccatactagacatgaatacaccagcttacaacggatgctaaaattttagttttacacagcaaattttaagatgatgccatatatagcttccccagaataaagtctcaagaaacacatattgaattttcaagtctaggtttcatcaaataggaaagtggtttaatatagaaatatcacatgaactaacgaaaggtatgaacgatgtggaaatcaccttgtacatgatcatgttggcaataatagtaagaatggtgaacatcacataatagactggagagacaacagctgtgttgaatgaatcaagggcctacaataacaaaaaaaaaatgttcaaataaaaaagataaagggaaaaagacaatattgatgtcaatatgcaggactcacaatgccagaaaaaagatttaaattattagaaaatgtaaaattaaagaaatctaggtgctaagactctacagtgaagtatgtcaatgcaaaagattcagtgtgaagtaaataatattttacgacaagacaagatgtatgttgttgaaataaatcattcatgtaagctatgtaacagcctcaactctcaagcatttatttttctgaatggaagacccaattacattggagtaggctagagatgaaacccatgttgagccacaaccaaaataaatagatagtaacaacaataatatctatgagaaaagcggtgatcccatcaagtaaaaaactgctgaatgtttccttaagatgtgaccggttaccttgttcaagtaattcaactgcactaaacagcatataaccaccacaacaataaagaaccaggttgggacgtagataaattggttcactccattaaatgaaagcttcaaggcaatagccactgcttttacactgataacctgcctcaagtatattactttatcagaacataatggatcaacttgattcaaacagttcagttatgatgcatagcgagcctaccgtaagagatcccatcagagaacagattgcaatatatgcgagcattttcctttgttccgtccgatgaacgacccagaaaatcaaaataagtgcaacaactactgccatgcaagaatagactatgaaacctgcaagcacaatgttacacttatgcatcaaaatgaattttgggaaggcaagtagtatccctaacctatagaatataaccacaagtactaattctggtagaatgatggaaaaatctcagcataatgaatgacagtcatgcaagtgaaaattctcaagaaactgattctttgagcatcattttcttatgtgtatcaaccaaaaaaaaattgagaagccaacatgcttaaggatgcaaatagactcttagatagaactcttcaaaaattgcaaaataatactgcttctcttgtttgccaagttacatttcagatcagcaggtcagcactgatggcaaaattgagaataaaacggattattatattaaaacacaaatacaaaattaaaactttctccaaaggtaaacaatacagctatatctactgaaatgacaactagaacaactgttgaagacctttgagataagagctacctggttgagttgcaagatgccatatttcgttaactgaatcgatctttttctcctttggagcatgtagaactataccaactgaaccaacaacgcataatatgcaaccaacaataccaaacatatgcaacctctccttcaaaataaagtgtgctagcactgcactgaatgaataaaagagtgttaaggaaacaacatactactgattaatcaaaattatttcctagacgcaaagatatgtgtaaaacctgaatatgatgctcagcgctcctagaggagtgacaagtattgcaggagcaaatgcatatgctgcgaagttggccacctcaccaagaatcactgtaacagagagataaaatctgtagtgtgaacttacgtagaagctacctcagtagttccaataaattatttccataaatatggagtatcatataacaaaaggaaactggattagactgagaatgccttctttgccacgcattatcaacagaaaagagcacaatgtaatccatacttactagctgtcatccctatccaccataaaggttcatataaatatgagtatcctccagaacctgcaaatcataaggatcaataatggattataatgaaagaacctatgtacattctacttgaaacataactgcaggacaagggatttgagcattcttttaagaaaaaaccttctatgcaatgtagaaaatgaattatttaaccagaaacaagaggaggcacaacctgctcttaccccagcatccccagctttcttcaacccaatcttcttaatcacaaagcttgaaccaataaatgcacttgatgatgtggccagtgcaaagcccctcacattgtctatagacatcaccatctctgacagtctatttgctttccaaaacagaagaatccaatatctgtcctacacaacaacagaatttccattcagtaaaccacttcaaactgtttagattccgcgtctcgaagaaacacaacaatgtcgggttattcctattaatggattttcatatgcccgtccctacagaggagaatatgatgtgaataatcacatgtgttcaacattcctattgcagatgctataggtgatagaatcaagtctgcatgtcaaactgtagcagtaaggctcatccataaccattacaagaacaaaaagataacctaatagggacccactaaactagttcaatcgtttctctcagtaaaaataatcgtgggcatgaatttagaggcttagagctcacaagattctgttcacagaacagagaacttctagtttgataagaacaaaaaaagatagaataaacaacctatagagcagattgtcgatccaaacgagtttgatcattcgattggaatcttccaattaaggttggaacaaaagggaaaaaaaggggggagtgcacaggcaaaacagagtgatgaaccagccaaataatgaaaacaaaaaaaaaagaggtaaaaacatacagcaactacagcaacttttagttgtacgaccaacaaataaagtctccaatcgaggttccaaaccatttgatgagaagtcggttccaacggatcgcggaaaatgatcggtcgtctctcatccacttccttcaaaacagtgagtttcattttcatgggcgacttccgtttcattggcacctcaaattacacacacattatgtgaggcacacgaaaaggacacggccaaactctacgaatatagatactagacgataaaaagaagacggccaacacgggaaaaaagcatttttggagaaagaaaggcgcaggcttttgcacggtctgtccaagcagggcaaaaaaaaaaaaaaaggtcgataccgacgaggcgattgcgctagcgatggggtattcacgctccgaattattgctccctcatcaagaactagtactagtagtagtacaaagaacaaaagaatctgtggctaattggcgagcagcaaagcaggaatgcagagacaagaactacacaagcacggatcactaaatcgatttcgtagaaagtgtagcacatgattctctccctatcatcatcaacaaaaattaaaaaaagtcacaaaataaaatctgtctctggtaatggtaaacgctaaagtctcaggattaatctagggttgaaacggcaagaaaaagaaaacctcccgaaacgaaacgaagagaaatcggtattatgactgacagaataaagacccatccctccccactccccaccacggccgctctagggttcatcccgttccacgaggtggcgatcaggcggaatggcgggacagggacagggacagggagggttcacgtacgtacttacggcaacccggggggggaaacgcgagcgtgtgtgacgaacctgccggtggaggagcgatcgcgggcgggggagcgcggaggagacggcgacgacggcggcggcgcggcttgagaaaggaggcggtggtggtggtggcggtggcggtgaagatggcggtggggatcgtggagtagtggggagggaaggtggtggggggtgtggggagttaggggggttgggctcggatttttgtgagggggagagagagagatcgggttccgttactattggaatttcggaacacacggccacacgggcagggcatggggctggcacattggcagcgaccaaagggaacataaaatatttctaaaaaacacataaataaataaataaataaaataagtttacatgcccaagttattggtagtctatggtctgctctgctggtatttgaagctaaaattaattaagttgatgcacgtaaaatggaaaatcttaacgcataattaattaagttttagttattataaacttgataaattaatttatttaatattttaaatcaactaaagttttcgcacagaacacttcgtttagtattttaaaaagcgtgctaacagaaatcgagagaaaatctatatattcaaagtactatctatgtttttttttagaaaattccatatgtaccttgaaagtagtttatccaatttcttttatgcccctgagatttgcttatttccttccatacccttaatttcagtttagatcatttctatacccctttcattaattgaccgttaaattcatatcatatttgccctttggtattaagaaaataaaatttattgtatacgactattatatataagtttattttgtgagatattatttagtaaaaataatattttattttcacctccgtgaaggcaaaacaaaaaataatttttttaccattaaaaactatatatatatatatattgttatagtagtacggcattttttataacataaatctatttatgtgctaaataagtactttttaataactaataaataaattttatttttatgtcatatctaaaaataaattatcataaatattatttatgaattttgttatgcaagatattatttatgatattttatttttgttatgtgagataaaatttatttttgttaaataatatctcacaaaataaactaaatataatagtcgcatacaataaatttatacaatccatcggtatacttcataaatttatattatcttgacaccaaagagcgaaatagactttataataagaatttaacggtcaacaaacggaaggggtataaaatatccaactgaaaattagggatatggaagggaatgagtaaatatcaagggtataaaagggattggacgaacttcaggagtacatatggaatttttctcatgttttttatataagacgtcattgatatttcgcataatgtttttattatttctcttattcaaaaatttaatacaaataaatataagttaacgttatagtttatttaatgataaaataagtcacaaaaatgtaaataatatttatataaacttttagtaaaatgaatggtcaaatatcatgtttgaaagtgaacaacatcacaatatagccttagtggttttttttagaaccatcttttaaagcctggtaaaaattgcaatttcttaaaagtccaaatatacgcatacactttttatatgtataatctatattgttttgaaaaaaaatcgattgtatgaaagacaaatacactcagttatcacacataccacaattacccactcataagtcgcgataggaaaattattctctccgtttttaaattactagcagcgggtattattcagtttaaattttgaatactcatattttacgtagaggatttacaaatgctaaaagatgccatgttattaaagtgcgagcttgattaaatttatatggtaaaatcaaaattataagttatttgaaaacatatggactacacgaattctctcacaaaatcagcaaacgagcctgcgaccctgtcaccctagtatgaatatttctggcaagctggtgtgcacgttcctcggttttggatcgtgccctgccacgactcacgagagattggaaaatagtttggacgcacgtcgaaggttagcctaatgaacaagtctatttggtgtccctcctcttttaccttgattaaattgcattcatcaactgcaaaaaccgggtataacaccaccctaacttcaaaaaccggtgtaaattgactccttcgatgatttggaagcggtttcagttgatgtggcaggttgatttggtccaagtgtgatggcgtggtagctcagtcatcaaagtagctgaaaatagagctgaatgccacatgtaagtgacatggtacaagtaaaaaatggtggggcccacttatcaaccacttcttcctcccttcaatctctatctcttcgatttgaggttggacagagaagtagccaagagctctcggatggcgcaaacctcgatggggagaccggaactcatcttggatgtagcggtagcccgattgtgacggttgtcgatgtagccaccatgggcgagaaggatgtagccatggctgccgttgtgcatggcgggggctatggtgctcgatcgatcagtccacaaaagaagtacacagttaccactgtgcaaatgtaacttacaccattattacttcattcgacttaatcaatcggaaaaggaaaagggtaaagggaaaaaagagccggtcttgtcccgtatgatgtaacggtcactactcacctgtacaccactccactcactgtttgtgcttttcctaccctaccacttgctaaccatagttggagcttgtggccacaggatccaacacattagaggttggggaaaaaagcttggaagcaaggaagagcatgccgacgacgtagaggaatagagatggagaggaagatgacaacaatgatgacgataacgacactctaaaacttatagacacgtggtgggtgaatttgccggcttcgatctcatggctgccagatatgatagtggtgagcggtggccgtggattgaagcagctagaggaggggaaaacgataaaggcggctaacgatgatgatgatttgtgggtgcttgagtgaacaaatgaaacaagaagatgatgggaagcatcaacccgatgttacgctgcccctgcacctgcttgtccctcatccctcacctataccaatttgtcctcgtgttttttgcgtttctctcaagcctagctatggaacttattttgcacgagcggtacaacctctagtgcacatatagatacctaaacaatcagtcaatcaccgtgtcatatccccttatacaaaccaccctccatctaggtaaatacacactcctgaagatgcacttaaaccccctagtgggttttggtgattaatgacaaggtggttaaaggggactaacgtgtttatcaagtttatacacaggagtttagtcccaaagcatgttgtgatggctaagaatgcaaggagaccccccaatttgaatgatcctaagtatgaaaaggatcgaaggtgattagactaggttttacactttcaaaattgagtttaggaaaaaccgtactattaagaggggtttcaagtgtggttctagggtatacaaagtgctcttagtcatatccatgagtctaaagttttttttggattctttttttggaaatgtttttccccgggacagagaggcctacccggaggttctggctggaacctccgggcaccaaagtttatttttccccgggacagagaggcctacccggaggttctggccagaacctccggacaccaaagtttatttttctccccgggatagagagggttacccggaggttctggccggaacttccgggcaccaaagtgttgggagaatttctctaagtgttgcccggaagttcctggcacttttgcccagaacctcctggcaggtttccagttcaaacttgtgagtaacggctagatgacgtcacctagccgttatatatatggatttcgtccccaggtcaccctttggccatttccactttagctctttctgttctagggttttctatccactcccaagctttctttgcttcctccattcaaatctagagcctatcttgtgagattgagagattagatgagagtgtaggagtgttttggagatggcttgaagattaggtttgcttgagcactttggataccttgtgggctgtcacttgggcttattactcttggagatcttctcctagacggttaggtgtcgcccgtgagcttccaaagatcttgtggatgtccgggaaagtttgtgaaggttttcctcacctccgcaaggaaacgaggtaagtgagtaaagattcttgtgctgagttttcagaggttgtcctaggtagagcaacttgcacttgtggtcttttctagaaggacttgtgagttggatcttggtggtcactcaattctaaaaaacgacctagaagtgttgagttgaaggctgtggacttcttctgggatctttgcataagtgaggcaaggggttaatcgagacccggctctttgagcacctcaacggagagtaggatccgtgtgatccgaacttcgggaaaaaatcgcctttatctctcttgtgcatgatctgtgtttgaatctgctggtatcttgtgatttacatcttgtgcaactctgtgcgtgatcgtctctagctaggacctgttttacttcccttatttcgattttctatgttgcccagaagttcctggctcaagaactccagaagttccaggcttcttatcactgccaggaagttccggtgttcttcaccaggaggttccgggccctgttaatttaaccgctgcgattgttgagaaaatttcaggaaagcctgttcaccccccctctagactacatctctgcatgttcaattggtatcatagcaggttgctcttgatttaagcttcaccgctttgagtgatccacgatgtcggacttaggaggaaagaacggggaaaatgggaatgaagatgaagcaagcagcaagggaattccaccacccaagggagctactataccttttgattacaacaaacttactattccctctcacaaccttgtctccgtgccttccgggcgtgctcctcaatttgatgggacatattatgccacttggaagcacaagatgaagttgcatctaatctctttgcatctaagtatttggaaagttgtttgtacatgtattgatatacccccatgatgacatggagctcacgtcggagcaagaacaactcatccaccgcaatgctcaagcttccaatgcaattctctctgccttgagtccggaggagttcaacaaggttgatggacttgaggaagccaaggagatatgggatactttgcaattggctcatgagggatcacccgccgttcgtgaggccaagattgaattattggaaggaaggcttggaagatttgtgatggatgacaaggagacaccacaagagatgtatgataggatgatgattcttgtcaacaagattaaaggacttgggagtgaggacatgacaaatcactttgtagtcaagagacttctccgtgcatttggtccaagaaatcccactcttgtatcaatgatacgggaaaggaaagacttcaagagactcaccccaaatgacattcttggaagaattgtgtctcatgagatgcaagaagaggaagctcgtgaagtgaggcaaatggtgaagaatgcgcccatgatcaaaaatcaagaagttgctttgaaggcaaaccaagaagaagagtcaagttgtgaagaaagtgaagatgaagaaatggcttttattgtcaagagattcaaacactttcttcgcaagagtggctatggcaaagggaggaaggatgatgacaagggaaagaggcaatcaaagagagcgtgcttcaattgtggcgaatatggccatttcattgccgattgtcccaggtcaaatgaagctaaggctaagggaggcaagaagaagccgaagcgtgctcatgtggcggaggcacacatggcggaagtgtggtactccggagatgaagaatatcccgaagtcaagcccaagcccaagtcaaaagacaaggttgaaggagaaggtggtgttgctactatcgccttcaagtcatcctcttcaagcaaggagcgtctcttcaacaacttgagtgatgacgacgacgactcctaccactactcttgcttcatggcccaaggccgcaaggtgatgactcaaaagccctctcacacttctcttgatgttgattctagtgatgaggaaagtgataatgaattagatgatgtgcttaagagccttagcaaacccactatgcaacatttggctaagttaatgagagctttggatagtaaagaacaatcactcgaaaggcaagaagaattgcttattcttgagaagaaaagaaaccttgacttagaggagagcttagctaaagaatgtgctaaaaatgaacaactagctaatgatcttaatttggctaatggttctttagctagccttagagatgtcaatgagactcttcaagagaaatttgcttgtttagacaaaagtcataaagatcttgaagttcaatttgacactctttggaatagtacctctcaaccaaatgtggtttctaattcttctaacccttctactagcaatggttgtgttaggtgttacaatatttatttgaactcttatgctactaatattgatgctatgcaagctcttaagaaagagaatgaaaggttgggcacattagtgaaatatggatgcatgaagacataccattcaaaagatgccctttacaagaccatcaccgctcatcctaacaaggatggacacgggcttgggttttcgggtggaagtcctgtgtctaagcgtgtgatggtaaatgtgaaagaatgcttgatgtttgtgagagaaggaaaagcaccacaagcaagtgaggtgactaatcttgtgagcagccagggacccggaacatccagacaaaccggccaaaacctcctggtgggagtctctgtctctcaaaaattcccaccaggaagttccggccggtttgccaggaggttccgggccaatggccgtgcacaagacatgaccggaagttccgggcataatgccaggaggttccggccagatggtctttactatgattcatatgtaatttccaaaaattcagagggcaaagtggttgcttattttaatgggaattacaatgatgagtaccgcacttgtgtgtggttgccaaaggctttggtaactaacatcaagggacccaaacttagacaagtttgggttcctaaatcccaagcttgatttcttttgtaggcatactcctccggtggttcatgttgggttgtggacaatggttgcaccaatcatatgactggagagaggagtatgtttacaagtcttgataaggagaatggaactcgtgagaatattgtgtttggagatgatggtaaagggaaggtaattggtctaggtaaaattgccatctccaataatcaatctctctctaatgttcttcttgtcaattcattaagctacaatttattatccatttctcaattatgtaagttgggttacaattgcttgtttaccgatgaggatgtgaccgtctttagaagggatgactcctccgtagcattcaaaggcaagttaaagggtgatctctatcttgtcgatttcgatgtggatagagtgaatccggaagcttgtttgattgctaaatcctccatgggttggctatggcatcgtagactagcccatgttggaatgcggaatttggcaactcttctaaagggggaacacatcctcgggctcactaatgtcacatttgagaaagatcgtgtgtgcagtgcttgccaagccgggaaacaagttgggaatccacattctatcaagaacatcatgactacaacatgcccttttgagcttctacatatggatttattcaggcccgtggcttacataagtattggagataacaagtatggttttgtcattgttgatgatttttcacgcttcacttgggtgtatgttctccatgacaagagtgaggctcaagatgtcttcaagcgctttgccaagcaagcccaaaacctctatgatcttaccatcaagagggtgcgaagcgacaatggaggagaattcaagaacactcaagtggaggaattccttgatgaagtgggaatcaagcacgagttctctgccccctatcatcctcctcaaaagattcgagatgtctatgatgggcgagttgaccttcttcctcgggctacaagtgaagcaagcacaagagggcactttcatctctcaaaccaagtacgtgaaggacattctcaagaagtttgggatggaagatgccaaacccatcaagactcctatgcctactaatggccacctagacctcgacgataatggtaaatgtgtggaccaaaaggtatatcgctccatgataggatctctctttacttatgtgcatctcgtcccgatatcatgcttagtgtttgcatgtgtgctcgctttcaagcggagcctaaagagtgccatttgattgccgtcaagagaattctaagatatttagttcatactcctaatcttggcttgtggtatcctaagggttgtgactttaagcttttgggctattccgattcggattacgccgggtgtaaggttgatagaaaaagcacaaccgggacttgccaatttcttgggcggtcccttgtttcttggtccttcaagaagcaaaattccattgcattatccaccgccgaagccgaatatgtcgccgccggttcttgttgtgcccaactcctttggatgaaacaaactctaaaagtctttggctacaacttcaccaagatcccactcctatgtgacaatgagagtgccatcaaaatagccaataatcccgttcaacactctcgaaccaaacacatagatattcgccaccactttttgagagatcatgagaccaaaggagatatatgccttacacatgtgagaaccgagagccaattagccgacattttcaccaagcctttagatgagaaaagattttgcgagcttaggagtgagttcaatatcttagattctcgcaatattaggtgatgggtggttggctaatttatagtcaaacatatgtcactaaaatgtaaattaaaaaaaattgagcttttgtgtcttgagatcacttcttgtgtagaagatggtcttgataccaggaataaagctcaaacattccccttttatccaaaatcccttttgtgaaatttttgcaaaaattcttgtgtgtgtttttcttgcgaaaatttggtttttatctccctcttgtgatgtatattgaccattgttatgtattgttgattgttggttggtcatatgcatcataagtcccttcatgtccatagatttccattcctcttttttatccctttccctcctctttgaatttgggcctgtctgcccactgtttgtcaggccggaagttccgggcctccctgtccggaacctccgggtgtcggggaatatttttactcagggggagttagaaaccctagtctctctcctcacttcttctccctccccgacgccagccctagccgccgctacagttcctctagtggtgattttcacttccatccgtggaaacttgattcctctccgtggaatcaaccatagtacaatgcatagccaatctaacgactctaagaggaagtttaatagtatcgccattggagtctttatgtctcgttactgaggacctcgtttcgaaaaaatacgccgtttgggagctttaccgggactaactagtaaaagacctagatcctgaagtatctttaaaaaccaattgcgttctgggaaaagatacaaatttgtacacatcagcaatagatggtaccaacagatgttacggactataactagttgctaagctacatgcccatgcttctctaaggaactgatttttattcttttgatcagacttgtttccctcgacccaatcttgtacgttttttgataggccatggtcaagttattgggcaaaagctaggactgagagctggtttgtatagatctccatgacttgcatcgtttaatgtactagagctcggcgcttgcattagcaccggctgccttctctctccggttttctctctctacgatctgtttgtctgatacagatgcttgtatcgccgacttacaatattctattatacccaaggttgtcattatcaggatcctaggtagtatagttttgctcaaagtagtattttatcgtaggatcagatactatgagattttttttaaaagtttaatttaatatttatattaattacatatagccattctataaaaaatatagtaataatatatgtcatacaaatagagacacttatcaagagaaaaccacattggttttatatatttaactgatttttatataaacttgagcatatttatttacattatttttaaatcatcttattttaaataatattttgtaggattgtatggatcgtagaatcgaagtactacttaagatttcgtaggatcatatatgtcaaggttatggattctatatacccaatagtaatcgactaaactcggtaaggtccaccacataccatgtcttatacggaatcatacctcgtatatagaaggagttccgggtaaggaaggacgagaagagttctatatggaaacgacaaggactacttggatcgtatccatatttatctccctagtcttacttggacaagggggaatctatggatataaatacaagcccccctaggaggagaaaaggacaaacccaccacaatctacaaagccacaagccaatacatcgtcgtatatcgacatcagaaattagcctagccataccccatccagcacctacaggggccggcaagagggatctagcaccatctttgatctcgccgagtacgcattcgaggaggaagactaccatgtcgtcgactacaagttgattatttagccgtcaggtcgtcgacggacagatagattatcctagacattgtatttatgtgatccagatgaataaagagcaacaccggcttcggccaacaggatgtagggctattacctgtaagataaggggcacaaacctgtataaaaatccctgtctccatctctttacctcaatctcgcatataccctggtaccgacgatccccataccatctaaataccgtagtcgcgatatcaaatgtcgacaatatagtaataaatagtagaatcaagatactatgaaaattaggatactacgtgggatcggtatcattttggtttggtaaaatcgtaatattgtaaaatactactccctccatcccaaaaaaaaagacaaactctaggtttccgtgtgcaacgtttgaatgtccgtcttatatgaaatttttttataattagtattttcattgttgttagatgataaaacatgattaacactttatgcgtgacttgtctttttattttttttcataattttttcaaataagacggacggtcaaacgttggacacggaaacttaggtcttttttaggatggagggagtatataatacataatacggatcgagattctgacaacctttagtacacctgctctaaccgattcttaccactcagggggtctcaaaaatataagtccctcccatagagactcactcactgaagccaaccctagtgacttacccctcgtacagtagcagcacacagcccctttcctgccgttctcggccaaaaatcccaccacaatccatcaatcattcgaaccgcgcgagatggcgatgccgagatccatccctccatcccaaccactgaaaccacacacacgctacgcacgtgacacccgtgccgccgcgggagatctgaattctgaccccc

SEQ ID NO: 4502 - DNA, 30169 bp, Oryza sativa
tctacagctgtgttggatcctgatgaagatggtgaaactgttgatcaaaaggaatatagaagtagattggatctttgttatatctaactgcttctaggccagacatacaatttgctgtgtgtttgtgtgcacgcttccaagcttctcctcgtgcttcatatcgtcaagcagtcaagcgaataatgaggtacttgaatcatacacttgagtttggaatttggtattctacttcatcttctatatgcttaagtagatattccgatgctgattttggtggttgtagaattgataggaaaagtactagtggaacatgtcattttcttggtacatcattaattgcatggtcttcaaggaaacaatctagtgttgctcaatcaactactgaatctgaatatgttgctgctgctagttcttgttcacagattttttggcttttatctactttgaaagattatggtcttacttttgaaaaagtacctctcttttgtgataatacaagtgctattaatattgctaagaatcatgttcaacactcacgcacaaagcacattgatattcgctttcactttctgcgggatcatgttgagaagggagatgttgaattgcagtttttggacacaaagttgcaaattgctgatatttttactaagcctttggattctaatcactttgcttttcttcgtggtgaattgggcataattcatccttttggcatggtttgagggggagtttgtacctcatggttttatcaagcaataatatgataatgagaaaaatttataaacgagagctttgtttatgcatatggtattttcttgtgcatgctagcaatactttgaaggtttatttgtctctagcatagcttgtatgtattctagtcttttcatgagatttagattttgcttttcagggagatgatgcatgacacttaaattctatacttgaattaagaaaatatgcaatgttaatgctagcatatggtttgatttataaatgctctatatatatgctttattgccttgttattcctcaaatagttttaattgcttattgtgaaaaagaaaataaaaaatataaaaaaatgaataccgaatccttggaaacagtcttgacgacaaggacgtattcgatgtgagcaaaataatgggtgccgaatccctggaaacagtcttgacgacagggacgtacccggaataaaaaagagaaaaatatgagcaaaaaggctcaagaaaagaaaaagttaaaaattctctttgttgttttgtgctaaaggcttatttgagaaagagtgataattgcaataggtatatgtgtttagtgtttattcttcaacctatgtgcttgttaagatgttgcattataaatcgtatgaaatcatgaattatgattgttaattcaagcttaactgtaaaatctttggttcatggttatactttaattcatgtttgttatgttatagatgggttcattttctttttattgcaacacatgacgtaatatgctatatgtatgctaagctcttgaatattaatgaacataattcctatacttgatgaaatcattgtcaaaagggggagaagtaatgtgaaaatttttggagaagcaagattaatttttgagagttgttgagaagagcaaagagcatgttttttgttcaattgggaatttctttcttttaaaaagggggagaagttttcttttggatttttgagcacgatgtgtacatttgtacgaagtgtgctttttaccacttttgttttttttttccaaacaccaaaacatttttatgaatttgccaatgtgttcatcaagggggagattgtaaaatcaaaggtgtttttgattattattctgtgatgaacaattgggcattggagattattggttttgttatttggaatttattcacgaagtggttttggagatgattggatttcacaggtgaatatacaggtactgctggatttgggtccggtcagaccgggcacgggttgccggtcggaccggcgtgtattgcgcggtctgaccggccgacgctgtgtcggtttcggtttcgagttgtttatttggatatccgtgattatttcatgattatgacttctagatggatactatacgtatgtaatactattgtttgctgctaatgagtcaagttggagatagattggtctcggaatatggtttctttgtttgttccatgtgtaggtgactcaatgtctcgggagagtatttgcggtgatgaatcgggagtcggcttggggataagacgacgtccgtggtggtcagagatcatgcaggatactaaggctagagttgatgcacgtggttgatggagattccatatggcatacgatggagttattgtgtgcgtatgggatgcggagtcgaatttggaaggagtccaaatttggtacgattggttatctaaagtttctatcttgtactagagggtttcctaaggtgtttaggactcctagtatgagtttggttcatggctttaggctgcctacctcgggtataaatagagggggagcgtgaggcttcccggtatcgcttttgagagcaattgagttgagttttgagttagggtttcgagtttagtcgaaatttttgtaaggagtgctgttggtgcactttgtaaacacagagagaagtaataaagtcgtcatccactttaagagttctttgatttgtgtttcaccgggtttcggcggtttaactggcgactaaccggcggttagaccggcggcatcgcggcggtccgaccggcgggagcgaggcgctcagaccggcggcggcaacagcaagcggcagatgatctcggtggtcagaccgaagatctaatctcggttagaccgacggcaaccaggcggtcagaccggcagggcaatttcggtcagaccgcaatccgtcgaattcgagggtaacttttatttccgctaaaagttttcggtttttgggtataccaaccattcacccccctggttggattagtttttgtgatttgatcctacaagacttactcacctcggtagctcgtggtggaatgaagacgggtgtcgatggagcttggttggtggaagacacaccagagcatgtaagaggagataccgtccttgttgaaatagcatttccaaaacggtactttgttgattgttgtcgtccctgcaattcttattctgccaaacatgcaagtagaaacaatcttcatattctttatagttaacaatatcttgaatctcacggttcaaccctccatagaaacttacaatactagcctcttcatcctctattacatcacaatgcaaacaacattttttaactcctgataatattcttttatagatttatccccctagtctaagcatgcaatttctttaaaagatcacgtctaaaagaaggagcacaaatctagtgcacaagttgtctttaacacttctcatgttgtaggtgctagtccatctgtacttatttgagtccatcatactgttgcaaaattattaaattcactagtagcttgcttaaccctatgctcaccaggaataaatgtgcactaaattttttatctacagttatttcccaatcaaaataagcttcagcatcataggcacaatgaaaagagggaatcgtaaccttaaatttagcatatggatcattacgcacattatgaaaattacctccaatacctcaacgattgaagttaagccagttgctatcaatctcttataccgatttcagggatcggaccctggcgctgattgggccacgtggcaaaacctgaacgcaagtttgcgtatggtaaaatcacgccacgtgtccagtataccattccagtgcactgccaatctggtgcgctgttccagcgtcgcacgggcgcacggccgctgcctcccctccgcctactgccaccggccaccgctgcatccttctcctaatctcgtggtcatggttgacagcagctccaaccatgctgacaggtgcacacgtcttctagaacatctttgctcaaagccagggcgcaaggcatttctggcatctgattttctccttaaaaatttgattaaacctggttagccacagaggcaagaaagctcaccggagatgcacacaagttaccaatatgggtgcccgtttcttgaggtgaatactgactcatctgtgtgtacttaattaaactgaaaaacgcatcttgatgtgttttttttaattcaaattaatttaacaaggtttccatgtatataatgagcagattaatttcctgttgaatgcatcggcgtaaccttcagaatattctaatcttgagcgaagaaaaaaaaaactcagcatttggtgtttgctaatggattgcaacaagcttatccaactccatgtacgttgaggacttgaccaattttaccgtgacctaaacacaacctatgtgtcaatggttctggacgttaatcaatcagatatcaatcgaatgactttgatagcagtgatgctttacacctttggtcagaaagctgctgcactaatcagcaacaggaaaaatgaaagaaagaaaaagaaagcatagcaaggcatttgaaacttaaattcagttagcattatgtgaataaaatttagcagttatataagctatttacatgattgttcgttaagatccaaaaccttttgcttatctgatacttcctccgtttcacaatgtaagttattttagtatttcccacattcatattgatgctaatgaatctagatagatatatatatgtctagattcattagcaacaatatgaatgtgaaaaatgctagaatgtcttacattgtgaaacggagggagtattaatgttatgggcatttgtcaagttgttcagaaaaaatattctttatcctttttatggcacagagtagtccaacaaaactaatccaagaaatcgtttctattatactcacatcagtaggacaattttgaccaataagagcagcagaaagaaattgccctttctattttgcttttaaaactagctttctttgatttttcattcttcacctctgcatggatgagtatcacaaccaggacatctgcttgagttaccctgtagtcacaaagacctttgtcttgataacaagctacatttcttttagatcgcatatacttgtatcatgctctcccaaaactatttgtttcatgttatattctaataactgagtcactaccttctcctatagagattaaaatttgaattgaagtctaccaattcttaaattcaagggttacattcttatgttccgtttcttcagaacacattcatgaccttatgtacttcattatgccatttacgttttcataagttaacatagagcgctgggtctgggaaatgcagatgcagaactgggacttaagagtactatacgattcggtaagagagcaatgctcatgccaaacaaggctgtggtaaattaatgatgtatcaccagacgatggattcggtgatactattatcgtcaatgaaaacattatcttattttctattcattacaaatagttaaatctccttatctcagcattaatgctaatctcaaagtattgatcgtgtaatatctttgaaacggaaacatttgatatgaacctcattggttttgtaaggggaaatacggtcgacctctcattgacaggaataaaagcaattaagtttgatgttatgtaaaactagattataagttctttaatgtaaaattttgtgattatgcacccccaatttttggttttggatgtatagatttagttatgatcaattcttatttacgtgagcattaggctttaatagtgtataaactgggtccatccagtctatgtatacttccgcgcggcaaagccgcggttattttctagtataatcctattgtagattcaccaacccgtcaagacaattattgttcgttgtaagactggcattcaacatgcgttggaacctctcggtaaaggtttgaaccatcctctcgatcgcaacagtcatatctctgttcatagctccacatttgtcttcgagtactttgacaagttcctccctaagcacacagtccttaaattcatcgttggtgcatgtcatggttagtagaaaatagaagataacacaaagatattatccctatcaactactaggtgatgagagaaagacacttgcactcaagcatcttaccacaggcatacacgtagcaagagatgcaaccagtggacagaagaatcacggtaggaagtatagtgctactatgcctttttggtggttatcagttgagttattttatcttggacctccttgcatcattgtacaggaagtacagccattagtaggcatgaaaattcgagctgcattatgtggagattatgggtaccatatacccacagggctacgttaattacctgactggatatcgggggtaactcatagtaacaaaatatgtaaagataaggactcgggtatcatgttaacttgtatatcaagaaagtatctcgtagtcttagtcagttacaattgtaaaatatttatagaacttagaccataagggataaggtcttttatcttgtaatcccgactccttcgcctatataaggaagggtcgggggccccctaagggcagaatcacatccaagatcgttagatcaataccacaatcggcggaattacttctcatcgagaaggcctaaacctgtattacttctcatcgagaaggcctaaacctgtataaatcctttgtctcataacccattcactttcatagcttcttcgccacccccttttgtaatgccgaaatctagtttcgatagttggcgcgccaggtaggggttgcgtcaagtttttcgccgactagtgcgatgggatctacatctacatcaagcattgacgatttcgtcttccctctcgggcagacattccgcttcggtagcctcgacttcatcactaatagcttcggcaagatctctcttctcaactcggattcgaaccagtcgggaggagatggcatctcggccccgttcggtctcctgaactcggctgagatctactccaagaacctatccctcgagttggtttcaaaccactcgagagactccgcagaagattcctccatggcatccagcaactataagaaatatgaccttctgtgacgaattcctcgtgatatcggagctatttatcattagcacattccattttatgatgattagtatgagatggggtggcttagtgacgaaaaaaatgtattcgtctttaataccaactagaaatcgtcacaaagtatttcaatgggatatcgtgatgaatattaatgtaataaggggcacaaagcaaacatcatagatttatataatgcatttctagaaaaatatattaaatgttaaagcaattccccactccaccgccgacctctgggaggcgaagtacgaggtgctcgtcgcatcgtcccgcaccacgggcgggaagccgctcacctgcatcccacaggcggcggctgacttgtgacgcttacggcagtgagctgtagcctcccgtggcttggcatccagcggttagagtgggggctgacagaccactatggtggcgagatctagctgctacgatcccctgtgaggcgaatgagctgcggccttcacaagtgacctcggctgctgtcccagccaggcctgacgatggtgagtttatttcctgtagcgaagctcttttccaacaaggccagggagtgaatgataatagtgatgcctaacttcaatgctattagtttactcaaatgtctaacgcattgtaacactgaaatgcatataagtttctggatgtaagttactgaaacaaaattgtcttacaaaaaacggccgatctcattgttggtttgcatgtactttttcattcaaaagctattgcctgattgcctaattctcccatgagttgttcatgagacattgcatatgctacatgatttattcagtagctaaagacagtttatttccttctcaattcagtaagtaaacacagggctaagttacactcagtttgtatttaatggtttagggtgatcatgccaaataatttgttaaattaattctaatagaatcttctgtcggaaagacatgcaaacctacttaaaagataaagtggagtatttatgattgtgatgaagtgatgcatattttattatgctaatttaattttccctgtgtgatttgtcgaattactagcatggcaaataaaagattaggttcattccatcctaacaaccatcacagtgttttttttttaatattctgtacatgtgtgtgcttctaaccgtggatatatataaccattgtaccatgtttactgcacaggttattactaaactatgcagctgcgatctttaattgtcaagatgtttatgcaaactaactagattcgtataattagattaacgatgtttggaaaagtttctggatttgcatagtcagattaacatctagcggaccccattgatattgggtggtgactggtgacgaggtgcagccttattaacagatgacctccgctaagcctaatggtaagttctacttcctgtatcctccattcctttgaaaacaggccatgagggagtgatatcattgaggcatagttctactgctgtcagtttactctaatatatttagcattttttcggatgaatttactctaatattcattctaaccccaaagtatagataatttttttgatgtagtaataacagtatagacatgagtcttatgtgtgtgtcaactaataaactactctctttgtttcccccttgcatgctctaatattagcgcttttaatatttcctgttctatactttgcttcccaacaatgtaaaacacttctttttgtataaaatgtcagtcatcgcttcattgaatattttgtttttgtccaactaatgcaatatgtttccaatcttaactggcctgtttttcctagctaccagaaacaaagaaaattcgtgttattaacacttgagttcactgcagtacttggtttgtttcctaccagaaactgagaaaatatacccattttaattgagttcatgcagccaacagtatactactactccctccgtcccaaaaaaggcaaaccctgggtttgcgtgtccaactttgactgtccgtcttatatgaaatttttttataatttgtatttttattattgttagatgataaaacatgattaatactttatgcgtgacttgtctttttaatttttttcataatttttacaaataagacgaacggttaaatattgggcatggaaattagggtttgtcttttttttgggacagagggagtaagtcttagcatgcgcacggaaaacgaaagtgagtttgcgcacggaaaacgaaagtgagttttcctctccttgtgctgctgctgaccgcaacatatgcttcgtcgcagataaaagatgtttgttaacttggatagaactaacaaaaaataaaatcatattggtattactgtcctttggtcctttacaagagtgaacgaatcttgatcctttagtcctttacaagagtgttttatcattctttctagctcctgcatcagaaacttctaagtttgttcatgggatattgtaatgatatggttatcctcatggaactaattaaaattagattactatgtgtgcatgtatattgccaggtcaacatgaaagtatgcttttcatgattggttgcgtacataagttaattaatgttgttcctttttacttgcagcaaaaaaaggtgctccatgtaagggactttgggggtactctcatggcatttggtttagagatttgaaaggatttgtgcttgcctaggtgtgagcaattggttggatttggctgttaactgggttataaattttgtgttgtattggatgtttgtcgggttgtgttggatgctaattgggctgtaacctttgtgctatatgggttgttattgtgtttgattgttgggcctatatgggcttagcccacttgttatttgatactaatgtaaatgaatataataagattggctgaaaatggtgtggtataatgtttgggcctatatgggcttttgcaatggacttggtacatttattatttgatattaaagcaaatgaatataatagaattaggctgaaaatatgccacatcatagatgggctaggctaaaatctagtcgggcttgccattgggctaagcccataaacagggtgttcaatacatggattttaatgggccatcagatattttatgacgttttttatgttagatatgagcgtcacaaagttatgatgacataaggattgccactagattaatgatgaaaaaaataagatttcgtcatagaacgccattagatatgcatgataggtgacgaatgaattttcgtcacacgagcgtcgcatattacaaaacatgacggaattttatgtttttgtgacgtaaatgaagcgtcatctatgataagatttcttgtagtgagctttgcttaaatgccacgatatccgcctatcactatgcgcctccctgacgatctcgcggccattttcggctcaaggaaatcgtccccctaggtctcgatctaatctgactttgagctagatcagatctagctccagggaggtcggagtcatcctccaaccactcagctcttgctcgacggacgaaattgccagctatcttagctcccctaacatcggatctcaagcgaaaccagaaatcgtcaactacaacaatgacttcgacttcgataacttcgcttgctacaatgactactacgacgactactacggtgacctcaacgatgactacacttcgctgtacttcggcgtctttatgaccaacaatgagacagacgagcagagggcagcacgactggcagacgaagaacggacaaggttagaacaagaacgctaggagcaggagtggcagatattggaacgtgagcgtctggatcaggagcgccgtacaagagaggaagaagaacaaagacggagagaagaaaagggaaggcggagagatttggctcaatgtggacgtcgcactcgacaactcattggtcagactgttgtagatgacaccaacgtgtttctcacacctcagcagaatgcagtcggggcaatcaccctcatcgacaccatcctgcctgaggccccagactacgtgacgccaactctcaacaggatgaaggccatgatcgcggcaacacttccggacgattatagtggcagtcggtaacccaccacctcggcgcatcatcagttaggaagccgagctagttggtctaattctcgcgcttcgcactcaagttgggggcttcgagagcagttggttcactctccagctgttggcaatagagggccccgagtagatcacgagcagcagaagtcttctcatggcctggttgatctcagagaagccttgaatgcaagacggagagcgagacacggacgagggcaccaccactccacggagtgcattgatggcaatgatgaaggagtcactgcattcacacgtgacctgcgtcgagtgaattggccggccagcttcaaaccgactggcatcgagaagtacgatggcaagaccaaccctgagtcctggcttatcgtgtacactctcgcaattcgcgtagcaggaggagacaacaaggcatggcgaactacctgcccgtcgcattggctaactaggccagaaactggctcgctgggttactgcgaggcacaatcggttcccggggcgagcttcgcgaccacttcatcgccaactttgaagggaccttcgaacggccaagcactcacttcgagctctacaatgtgatacagaagcctaatgagcccataagggattacatccggcgcttttcagagaagcgcaacaaaatctctaacatgaccgacggcaatatcatcaccgccttcaccaagggagttcgcaacgagctactcattggcaaattcggacgcaaaccacccaggacggtcaaggaaatgtttgagaaggctaacgagtacgccaaggcggacgacgcagtcttagcttcgaagcagtccggcagtggctggaagcccaagaaggacagtggcaacaacggtgcaagtagcagcaacactcaccacaaggatcgcaagtgtaagcccgaggatctggttgccgccacgtccacttttcagcatcaacgaattcgtgtcaacacctaagacaagatcatgaatgcgccatgttcacttcacccgaactccaagcacgctgccaaagattgtttcgtctacaagcagtttgccaagcagtacgtcgctcaattcaagaagccgacttaaggggaaactgacacgtcaacatagaagaaggacgacaccgagccagctcaaggcactttgcaggattcaaggaaggagctcaaccacatcttcggagggccacttgcctacgagtccaagaggaagcagaagctgaccgaccgggagatcaacgcagtccagccagaagtaccacaattcctacaatggtctgaggttgcaatcgattcgatcgctcggatcatcccaaccgagtggtccacccggggcggtacccccagtactagacccagtagttcgcaacgtgaagctcaagagaacccttattgatggcggaagagcgctcaatatcctcttcgccaagactctcgacgaaatgcagatctcgaggatcgagttacggctgaggaatgcaccctttcacggagtcttccttgtgttttcatctacaccactcggccaaatcactatgccggttacctttggcactggggaaaactttcatacagataatgtctgctttgaagtcgccgactttgagacagcttatcatgcaatgcttggacgaccggcgttagccaagttcatggccatcccacattacacctacatgatgatgaagatgccaagaccacgaggagtcatatccctgcgcagcgatgtcaagcaggctatcacctgcgacaaggaaagctgcgagatggcccaatcttgcgagcaagcactcggccgagaagaagtctgtctagctacatctacttcaccagagggagacgtgcccgctaaaaatttgtccaagtcaagagaaaacgacgccaagaccaagaagattccactcgatcctttagatccttccaaaactactgtgataggcgttgagttagattgtaaataggaaagcacactcatcacctttcttcaagctaataaagatatatttgcgtgaaaaccatctgatatgcctggtattcctagaaagaagacgcgaaacctattaggcaacgactccgctgatttgcgcaagacagaagagatgtgatcaagaaagagttagccaagctgtttgtcgacagtcattagcgatcagtttcgcccgtcaatattacctaaatagaggagaacaagttatgcttgcaatgcatttttgtgttaaaataatatatattccactagcactaggattactaatctcttacacagaataagcataagatggaggagaatcgacaacaaaatggacgattaatcaaccggacgctgtcgataatcagacttaaaggaagatagaccaagaactcagaattgacacgatcgaattgggccaaaattcacaagtctgaagatagaagaggtcaaggaggccaccagtcgaattgtgggctggatgggcctgcccatggttcggcagaacccgtcgtgcagccgctggatccagggttggcgatggacgatgtggatggcttccctatggcggttggagggtattaccgacctttccaatcaccataaccgtcattaccagcttatttaaggccatcactctctccatttcaagacacacctcaagcaaaaagcttcatacatctctcaagtttagtatatagtctctagagtatagtggaatagaaatagaatagaatctttagttctccgagtcttcagaagaattcgggtatggctctagtagcttttccttcttttgtaagacttgcacttaatttaaaatactcttctttatactactttggtattgtattactttccgagtatatgatcgaaatgatcaaataccaactttattatatatccaagttatatttattatgatgctagcttatcagggagatgcaatggtgtgggtataatgatcgtatttacgatgactctatgtcatgacgatgatattagactagtattttgtaacttaagcgtggtgtttagattactggatatcattatttggggttatattctacggaagcgaggtgggccgctgatggtgacagctcagtacgggtattcctccgcgcgtgtacatagtcctccgcgtgtgtatatagtcctaagttaatttcctggggagggtactcctccgtatttagccccggttgggtagtcatgacagattgtcgtaaggaactcggcaatcaggggtggcttcttgaagcaccaggagggcattggaaagagggtattagctaagtaatcatataactaggatgtatgtgtaatatgtttgtatactagaagtataggaatatgatctttcgattttctttccacttagcttagataattatgaatgagagtattaatgcttctgcttagtgtcactatactctttgaattatattagcccctgcttagactttgattattgcaagtaatatataaattattagtatggttctctctattataatcttcccacgggattaaacaattacgatacccttggaatactctcgggtgaaatactacaatggtatatccgtgcgcttgcggataaattctgtaaccgtaatataccagaagtatttctgcgccattgctggcaattatgtttctagtaatgcgccatttcatcaaggaggtctttcatcccgactggttggctaacccagtcctggttcggaagaaaactaggcaatggcgcatgtgtgttgactacaccgacctcaacaagtcttgtccaaaggaccccttcggcttgcctcgcattgaccaagttgttgattcgacagccggctgcgagttgctaaactttttgaattgttactcggttaccatcatatcagcccgaagaagtccgactgcttgaagacttcattcatcacgccattcgggtcttattgctactttatcatgccttttgggttggagaatgcatgagctacatatctacgcatgatgcagaggcgtttcacaacccaagtcggctgcaatgtagaagcatatgtcgacgatgtcgtcatcaagaccaagcacaaggataatctcatcgctgatttggaggaaatgtttgccaacatccgagccttcaggatgaagctaaatcccgagaagtgcaccttcgaagtaccgttagggaagttgattggctttatggtgtctcacagaggcatccaagccaacccggagaagatcaatgccatcctcaacatgaaaccgccgagctcccagaaagacgttcaaaagctggctggatgcatggcagcgctcagctgattcgttccaagactaggcgagcagtggatgccttttttgaagctgctcaagaagacagaaaactttcagtggacccctgaagcctagaaagcttttgaagacttcaagaatttcctcacaactccacccgtattggcttcaccacacccacaggaaccgttgttgttatatgtctcagtgacatcccgggtggtgagtatggtgttagtcgtcgagcatgaagaggagggctacgtccaaaaagtataggggccgatttacttcattagcgaggtgatggccgacaccaaaacacgctatccacaggtacatatgttattatatggtgtcttaattactgtcaggaagttggcccattactttcagagtcactcggttacggtggtcacaaccgcggagctactgggcgtatcactaagtgggcattagagttgatggcattagacctaactttcaaagcccacacctcgatcaagtctcgagccttggtggattttgtggccgagtcccagacagatgtacctgcggagaagctggagtactgcactatgcatttcgatgggtctaagagaatttcaggcacaggggaggagttgtgctgatctcctataaattatgattattttcgaggatttaagccgcatatgctttgtaattgattcagtcattttggtgactataattttttttaaaccattcggttgtttattttttccttgactatatgtttaatttgttcaactaatcatatagtcgggggctacatctaattaggtttatctagtcgatgcacctagatttttcttttttagcccttcacagcatgagatgattgaggtactcaggatttatggtgaggatgattcaagtacttggattcttcatgaaatcactcgggagaatatcattaccactcaggagaaggttgtctcatcatctgtgaaggtcttaggggttactgtggagattatgggtaccatataccctagggctacgttacctgactggatatcgggggtaattcatagtaacagaatatgcaaagataaggactcgggtattgtattaacttgtatataaaggaagtatcccgtagtcttagtcggttacaattgtaaattatttatagaacttagaccgtaagggataaggtcttttatcttgttttcctgactccttcgcctatataaggaggggtcggggccccttgagggcagaatcacatccaagatcgtcagatcaataccacaatcggcggaatatatccccggacaggagtatggtattacttctcatcgagaaggcctaaacctgtaaaaatcctatgtctcataacccatccattttcatagcttgttcgccaccccttttagtattgccgaaatctagtttcgacgcatttgcaaatgaggtacactattatggtttcctttcagccgtgttccaaagtgaatgcctattgatatagttttggagctaaatgcaagtatgttcttaaacaggaaacaccagagatgttaaatcatctgaaatgcaagaagtggtacattgcagcatgcaagaactgctaccaagtactactatacaagaagaggtttctctttgcaaggaatactcattatctgtttacagttctgtattaaatacgtagtgcccctgttactttgttcaggactatggcctggtttagttccccaattttttttcctgactggccgataggaattcatgtattgacatgggatcactgttatagcatcactcttattatttgttgccaagttcattacgtgaatgcaaagtatgatcacattattacctgactggcattcccagataaccttgttgagaagactcctgccagcagtaccctatcctccccaaagttgagtgaccgactgagagagatttcaaactcattgaagcttcttagcactcggccagtgagcgtgagggcagaaaagtggaacatagaatgtgtccggagaatcaacacgattgcaccagagccaaaaactcctgaagtgcatttgtaatttgagcaagcggaagatcccaaggataaacttatggcccacagcactgggattaaggttaacctgtttttttttaattcactgactcattttattcgcttaatgtgtttaattgtaccttcttataatcatcttgcctgatgaattctctcttgttttttatgtcccacagaaatctctagctcaagagtgcttgacttttctcaacagtgctaataagtgagtttggcattatctttacaaccgacttcacaccacttctgcatttctaatgcatgtttgtttgtgtgtccattgcagggagcaattaaaaagcttaaaggtttgctctgaatcatatcgtggcagcccagattgcttctttcttaccattaacccactgatacatgtgtagggaatcggagaaaaaagggcaaactacatacttgagcttcgtgaggagtcaccagagcggcagagctatttaaagaggtgagcactctagatcaacaagggagtagccgttagacccaagcaactagaagttattatatgacaatgcaactcagagctgattcttttgctttcgcagataagtgatctgagagacatcatcggaatgaattcaaaagaggtactggagaatctgattgcaatgtgtacatttatctatgttctttgatcactggaagatggttttagttttcacaaacatttcactggattacactgtcactagagatattcctgaatagtattagactccagctgcttcattttgcaaactccatgggttttgggtgtactaaaattgccactgctttgttatcttcaccagatcaaaaagatgatgtccgggattatcgactcctaggaaagtaagcagcgcgagtgcgatggttctcctgtggagtgtgcatatgcttctttggtcaaaggtgtcatgtgtttgttttgtaatttttttatccagttgcttctctcaagagcgaatgctttggccaggagttggcgttctgtgagagaatcagtgctttgcagtggtttgctgctattatgtgtttcgtgtaatcatcatacagtgtggtaccaatattgataatggtgtggcgttgatgtgatttcctctcttttgatgtttgttgctataaatgccgatttattattttagaaaaaataatgagccgataaatattcctctctgttgatctgagaagctcagttctagttgttttttattccgacaaatatttgttctgatccgtatttgtttcgttttcgtattcgataatatttaactctgtttttgtatttggcgttgactattttgattttgatttaaaaaaaagtgaaaacggaaacggtagaaccggtttttgtcaagaaaacaataaaataaagttaatatgggtgttgggtttggtacggaaatgacatggacaagattagatgtaatataaaacttgctcttaagatactatgtggtgggagaaagtcctattaagcaaggcagatatatgttggatatgtagaacatgaattaatgggagggagaaacatagatgttaagtttaatgtgcttttattcaaaaatatagcaacctatactagaatatcacctattagtatgaatctgatggataggtctatattcacaatatgaaacatctacgttgaaacattttgcctcaaaaaatgaggttttacattccgccttccctaaaacctgagttttttttatttttaaaatactctatttctaaatgttgttatcatgtggttttacattatgcattccctaaaacctgagtttttttttaaaagatactctatttctaaatgttattatcatgtggtagtgtttcaacaggacttcatttaagacaataaagccctctagtctagtcctctctatactagaactctagaagtttacagtgcgtctcgcaccaacaccgaacctgggaagccacattggatgaaactcctacaaagccacccatcccacaatgcaaataactaccttctctcttatagtgggtcccaccatcagatgcttttcatcttccttctatctactctttacttttccccactcatcccctcccaaacgatcccctctctactcaactccggtgaccccgccggtgccacctctcccatcctcaccccaccggcggtgccacctcacctctccctcctcctaccggcggctccctccaccggagacgggcttggcgctccacggcggcagaggacacgacagcgacgagtctgggcgcggcgccacggtggcaagtcggggcgcagcgcagcggcggcgagtcgcgacgacggcgtggccgagctgcccagatccggtggcatcggctcgtcggggtgcggcggcggcggcgctgtggccttccaccgcggcggggcggagaggacgacttggagcggcacctcccccttcctcctccagcctccgtgccgtggcccgagcagctacggcgtcgttcggcggcaggcggctgcgcagcggtggcgacgacggtgtggggcggctgtgcttgtgcttctgtgtgtgcttttcccaatgcgctctctctcctcttcccagctgcgcttgcgcttttcacatgcttttcagcccaaaaacgggtgaccaagtttggctactcggtcttcacttggctacacatgtgaaggacgtggcaccgaatatgccattcctttctctcaggctgagcgtcacgtaggtgcattgtaaatgccctaatgtggccgcctgcatgccaccttttatcacgagagcttttagggatcgaagctttatatatgtccgatatagaactattctagggtcatgaggatatatggtccaaatagctgaaaaggagaaatctccacatcaacgcatggggtatcatccagtaaaatacacatttcccacgaggtaacacccacaaattcagttctcaagaatctcatctcctagccaatacccatggtctgattaggctgcactttcttttgactctctccaatatataataatacagtatattatcagatatatattctgaactgcaaacattatcttataagtgcatgatgcagagattgccgagatgattctccctgatccccaacataacttatgttggcatgtgctatgctgtttgcatctgaaatcatcttgaacgctcaacattataagaacatcctgcacatcgatggcaattaactatcaaatccaatgaatataaacagtacaattcgtacttcgtttcagctttcttttcctacagcataactaaatctaaacaactaagtattctatagcatagtattgtaaaagtaaagtcttgaaaaagctagtatcggcttattgtggacttgacagccagcggaaactggtccgtttgccacagttgatgaaaatacgaccaaccaactgtaataccaattatgagatttgctcgagtctcgatattataaataagtacaacacaatttatgatatggaagcagagcacttctagcatgacaatttgctctgagcttaataataagtcgtacaaaaaaatatcaaaaagttaatgttactctatgatagatggagataaccagttttaacggaaaaaaaagctatcaagtgtggttacgtagcacgtaccagtcgtggcctcttgtaattgaaaggctgttttatctccatcagcttggggcaaccatctatataacccgactctatttcagagacagatatagcaccaagaatagagatgaggtctggacacctaataagtatcaggttgagtcccttcagtgtcatagaactccccagatggctgttgtcgatatactttatgcttggacaacgggctaaactgagcatctgaagagaggatggtaatgtcattctcctctgcatattcaacttgggacagtatgcaatacatagatcctccaagtgagaaaaacggtggagctcatcaactggcactaatgccaattgttcacaacgtttcacatgaatggtcttcacgacaggcatataagcaggcataagaaactcatcaagactcaacagtgcatcgcaattcataatgatgacatttgaaagggatgaaaatactccaacagtgtgcctgctgcttgcctcagacacgcctatggatgtgagggagctacactcacgaaaatgcaaatcctccaaggatctaaggttacttatcaagacttgcaggggaatcgatgttaacagctcgcaccgtatttccagatatgtcaggagcgtgagtccacgaaaacaactcacaaagtgatctgtggaatggccaaatttatcaagggtaacccttctaagagaagagggtaaagccaccaaaccttgccaattgatgttagaacagttttggattttcagcacctcaaggtgataaatgttctttgactcttctgaatcacgagacgggggggggggggggggtcaaagaatgataggctctgaatgttatggcaagaaaaaacaacattttcaggcagtctggccggagccagctggggcaagattgacctaggtaagacactatttccaaatgctcaagattccaatgaggtaacaattcaatctgctcctttgtcatctgtaactgttcatcagttattccctttgtggaccattctagcaattgcttatctttatccttgttatataggaagccctttgattcaattttctttaaggaaatcagatcactgaaacctttaggatatcttttgaaaacacaacccttggcatttatagtctggacatgatataggcaactaacagatgaaggaagggtctcgaaagtagaacttcccaataaaccaaggtaacgcaaatgttttgaattgcctatgctcttaggtaactttctcactgttgaaattttaaaaatcaatacatggatactcgggagttccttgaaccaacagtcaatcacgggagcaaattgtttaatacttttgtaagattcattgcatactagggaccgcagttttttattttgtgtgcaaatagtcactaattctgtacagctgatatttccattggtgaatattgacagatggcgaacctttgaagggattttaggtaggtcactcacatgttgtatgatgaagcactcatccttggagactagctgtgcagtatcatgtatcaagtcatgaattacgtagatattattctggccagctgctttttgaaagaacgatcgatttacaaggtcattaaagcaagaggatgcatcttcagcctccacatacccttgtgctacccaaatgtctgctaaaaactccttttcaaatctatgatcctttggatacagcgcacagattgagaggcatcttttcatgtgccgtggcaggtaaacataactcagccgaagggctggcagaatgtcagtctcctcttgttccaatttccacaattcacttctcaatatgtcctcccagtgctcaatgcttaggttgcttttcaacaagcgtccaagagttttggcagccaaaggtgaacccttcaacttgggaagtatagctttacctatgcgctccaactctggacgaatgtgctccagctctgggctattgctagaactattggatctgaatgcgcatagtttgaagaaatcccagaaaacatcattttgcagtccgttgagctcatagggatcactgttgctgactaggttagctactttggaagatctagtggtgaccaaaatcatacttccctgaagaccattgcttaaagttctatgaaatattctccatcctctctcatcttttaagacatcatcccacatgtcatcaaggacgagtaaaaacttctttgcgttgacactatcacgtaaattaaccataagagtatcccttgtatcagaatgttgtgactttacaccaagagacttcagaacatcttttgttaacctgtttacctcgaattcatccgacacacatatccagattatgcagtcaaagtgtttccgcaccactccatcctcacagatttgttgtgccatggttgtcttcccgacgccccccatgccaactattggcagcacaggcaactctgtcctccttgcttcagctatagtgctgcatgccacaggcctgcttctcttgcgtccacatactcctagcttttgcttcaactccttcagttctttttcacgaccaaatatcttatctggcttgtcgaggacacgacatgtctctggtctgactaatcgatcaaacttctttggtgttttgtgaaagcctaaacccttggattggtcaaaaacctgcttaagtctattttggatttccatcactttactgaagttgacactgtccaagaactccaaaaaggtttcatgcgagtgatcttgccccaagttcttgcttgcgtccaccttcaccttgagagcatagtaattgtactcatcaaggaggtcctcggcatcatacactacatacttgatctggcgaagatgccaggcttctgtatccttgtggctatgccatttaagacgatcgattaggtcatacattgtggatgtagttgattggatcagccataggtcgttctcgagtttctgaagatcggcctcaatctggtgcagtgaagctattctgttgtctctagctgatgctgatcctacccctcgtggatccacttgcagcagatgctgctgctgctgagaacgtacggcatcccagacacgtggtgcggcccagttgaagaactcgcggaacgcattggcatcggcagcaagaccagctgctcccttcaatattccaacgatgtcgtccatagccaggttgagcactgtgcatgattataaacgcaaacaaattaagccaaaccgttaatatcacggcaaatgggatcttttacaaatatataagacacatgattgatcaggaaattctatctcaaataggcacatgattgcccagataattcaactagtctattatgtgctaaaagtctttcacttaaattggtgagtccaatattataaaccgttagattagattaatctgaaaacaaaccatacactacatgaacagtcccacctatcctcctcccctataggtgtacatacatatgtattgtaaccacgcacatctaggagtggatgtcgagctggctcggctcggctcgttatcctaacgagctagaatgctggctcagctcggctcgcttctcagctcgagctagctcgtttagctcgcgagccaatacatcgaacagatgcaaatacatattatacaaccaaaatgtccacgaaggcaattgtatctccatatcaaaccaagaaatcacatgctagctcaagtgttcaacaaatgaatcagtattcatggtagctctacctttaacaataatcttgttttctggtggcgatatacgagatcgagcacaagtgctcaacctcctggatccattgccccatgcctgcaacctcctcctgcccgaccattacaccacttgaccaagacaagaacgggagagccgtgcaggtggtcgaggcgctcgaggggtcggcggagctgccgccgatggagggagcgtgatgcaaggacgtgaggcgcagcaacaaggcggggccgtgtgtggcagaaggaaggtcgatctggattgggaattcgggatgaggggaaagaggaagatgaaaagctacactgatcaaataggttctggtctttcctttttgactgttttctttggacctaccgtgggatggattatttttctacatatgggccttggcctactaacttctctgcctatgcttctagctcgtttaagctcgtgagcagcttttatgtgtaacgagctaaaacagctgctcggcttgttgaaaaacataacaagccgagttggctatgaaccgagcgagctaactagccacgagcttttcgtccaaccctacgcacatctttttttatagtttccgtgaaatacaaatgcgtacatatgttttattttttgttagctactttgtaaagaggaaaaatgttaatgcaaaatataagtacattgtgaccatgtgatgagtaattatgtatacattgatgagatggactaggtaccacagagatttctaaaagtctgaccatttcttggacaactatctactaagctcataactcaatatcgcacctgcattaaatccaagattagtctttacaaacatgctcattatataggcaaaatttgctacaaggcattcacaaaacatgtaattagctggtggacaccgcaagaacgcaaatttgctgttgggcatcacaaaaaactgataattagctaatggacactcgtgagcttattttactatttttggaggaattggagagagaaacactcattaaagacaaatttacccctggtcaaacttgttctgtgggacctacatataagacttgtcttcttccctagatcttcctcgggttcgacgaggctagtagtgggacgatagcgaccgacagtaggcggcggcggcggagtcgagggacctgggcggcatcaaggtcgtcatgcgacgccctcgcgtctagctcctctgacccagctgagttcaagggagcccagcaatgatccggagcggcgacatagacctgatgcgtggtacgcggatccgctccgcaatgatggctcacagcctcgcactagctagcacggggcggtagtcgtcatcatcgttatcgctgttaggtttgagattcaggggcggggacaaggttagcggttggatctggccgttgtggtagagttcgccgaactcgaactccgtagttgctgtcgatgttgtcgtccatggcgttgacaaatggggtggagcagctgctgtcgatgcgtcgttctggtgccggaaagggtggccgggatgggcatgcggctgggggaaggatgacgcggatgcagcccagggagcaggtgaggctccgcggcctccgcttcctcgacaagacgtccgacgggaaggaggggtggaagtttgtcaagcgctgcttggacgagatggccgccaccccaaggagagcttcggcaagtgcattggtgagtccgcagtccgtgcttccttgctctgcgtagctaccagaacgacggtgtgatccagaaaccgtaaattcaattcccaaaaagcgattagctgttgctaacaagaacagcaaaaatatcttgggtaaatagggatgagtacttgagagaatattgtgttggagctatgcaggggtagaattgtaatctcacatcagtttctctctcgaattcttctcgaaataataaaataaggccgcaagtgtccatcagctaattacaagtttttcgtgatgttcgacaacaaattcatgttcctgcggtgtccaccagctaattacacgttttttggatgcctatagctaattttgcccattatatatgtacaaacataatccgggagtagattatgtcatcatatatattaccctttggaaacatatggaactaaattaattagctttgcaatatttaaaaataaagtttacaccattatatatttaccattgaattttgaattaataatgtaagataagtttcattttatccggtgaaactattatttcacaccattatattatctacctattaaattaaaaaaaaataatatctatattaaataatttacacttaaacaagtagagccatcttttaaactatttttttataaaaataaatttgaccatcggtttacatttaaattgatgaatacatcgtttgtatagacgatcaaatctatcttttgttaaaaaaaaaacaaagcctatgaagacctctctctgcccctctacaaaatgcacacatatgtctttgccgcctcacatacgacgaagtgtcgtatctgaggcatctatggtgatttgctaaagtgatcatgttgtagctttgccaaagtgaaggcgtatgagatcatcaatggttaacaattggttttgttaataacgtgaaaataagttgaaggtgtggtgcatagagaagaatcaagcagcgtgtgttgtgtttttgcaacatacggctctgtgtaagctgaaacaaagaggtgattacctgattataatgtactgtggtaagtctactgaatgttcatgagggcgaaaaaaatcatgttatgaatgggagtataactttaaacaatatcaatagacatcttactagtacgaggatgctacaagggagtctgattatggagttttattgcacacttcccaacttggtagaaattaattcattggacatacttttggaatacttttctacagaacttttcaacttggtagaaattaattcattcatttatactctcaaatagctataaaaaaaataagatagtacatatatttttttatacgagtcatggtgatcaatgcgtagtcaaagtcatgagataaatctccaagagctactctaattgggtaaaagaacaattgataatactctctccatccacaaaagttacaccaatttcacatttgagtttttccaaataagttattactatttgtagtctttatgcattgaagacttaaatgaagagataaattaaatgttttattagaacccaaggagtcatctaaatattcattggttgcatgcttgtattcactccttgattttgtaatatccaaggtgacttaatttctccttggtcttggtgtcaaaagtaatatgtttaacttttgtagatggagggagtacgtgtcagcatcgattgccattagacatctaatgactttctaccaacataattaatttctctctataaaataaaaattaccctctaacaataacacacacacacacacgcacatatatataacaaacacaattaaggttttaattacatgtgttaataaataacatgctttgagaaaaatattttgagccctgtatccatacacgagggaggagtaacgtggtgttgcctctgtatgtaaactaaataagtagataaagttagagtaaatatggtctatatgaccatcacaagaaataagtgagtcgggatgccattgtgcaaatagtgacaaatagttttcgagctatgtaaaagtgatggcacgatgtatcattttgtgcaaagatttctttctcttattatgagtagtgacaaagactgtgtacatccgattggatgtagaggctgggttcatcctattttctaaaaaaatgagtagtgacaaagacaccactaagaagtaaaatatgtgcttatttgaaatgaagaaaaaaacaattaggtgaccaatctttttaagtagtcatggtatttttttactttcattaattaatcctggtagtttaaattatattgaacttatagatagattataatttacatcacaaaactatattcttgatagagtgaagtgtacgggcggtccttaaacttgtacggacatatcatataggtccctaaactttcaaaatgcattttttccccgaacttatcatgtgtgtcatataggaccaaacagcctccaacccctccatgagatgatgtgcatgccacactaatgcttacgtgtaaatgggatccatatgtcagtaacatagaaaaaaataaaatttaaaaagagaggagagagaggattttttaattttgaaaaaataaatgaaaaatgagaggagaaaaaaatatgttcttaatgttctctacatgtgtgatatataggttctactgatacgtaggcggctaggcgctaccatagcatgccacatcaacacacgaagtgagttggagcccgttttgacctatatggcacccgagacaagttgtggagccaaaaatgtatcttgagagttcaggaatttaggtgacacacacgcacaagtttcagtaccacgaatgcactttagtcttgttgattgaagtacactacacatactaattaaatttatatattatttcaaatagatattgtttcgaagaaaatcaaacatgcaaaaaaagaaattatcttcaaacagttgatgatattttacactcccaagccaaggaatagcgtaagtaatttatatgctaacatactgaaacctttaaagttctttaaaaccatggagaaagaaagatatgaaattattgagcttctacaaaggaaacagaatccaacttttaatctacccttaatttagttgtcacccccatcatgagttcgtgagacgatgattcaatgttaagaatttgagttccttgctcttagagattttcacttgtagccatattgcatagtatatgtacggatggtatgcatgataattagttagcgatagtttattactgttaacgaattacttacttgatacaaaaacaattcaaaacatttatcaaattagtctatattttattcaaaattcgatgaatggtttttttatatatattaagaaaaacataacccatgaatcattttaaaatgacattgttcaatctttagtttgcccttaacgtatatataggagataatttctgagcaaactataatcttacatttcaacgatccatatgcccgcgcatgcatgcaggccgccttcctagttctggttaaagcaacatctaaaacaac

SEQ ID NO: 4503 - DNA, 49986 bp, Oryza sativa
ccagcctactgctggcgcccgtcctcctgccaccgtggcgtacgtgaaccgacgtggcaggaggagggcgccagcatggctggcgccgccccagggaggagggcgccagcatggctggcgccgccgcctccattcctgtttctctgtatggagttgcaacggtgtcatttttattttattttttcggatgttttttcacactcaggatcacgatacaaccaaccacaaaaaaaatttaaactcgaactaccacttagctaagtctgaaaatatctagcataccacttagtctactttgcacattcactaaaattagaccataactcctttagtaaaaccctttgatcagcatgttaaacataatgcactctaccactatataaattacttaatctaattcaaaatataaccacatgaaatgacatatataagttaaacagtacatagagatgcaatttttttatttttatttcatttttttgatatttttttcacacttaggagaacataggaaccaaccgtataaaaaataaactcaaacggacaaaatatgtgacatgtagaattttccaaaactctaccgaaacggaaaaaatatgccatctattaaaataggcgtaactttctcatacggactcggaatcaggcaaataatatatgaacggacatctacagaaaaagttacatccgattctccccgctttgccgggttcggtgatattaaacctccaaattccgcttgcaagattgtgttttcgaggagggaagtttttcggtggagctttggaaaattccacatgccacatatttcgtccgtttgagtttattttttacgtggttggttcctgtgagttcctaagtgtgaaaaaaatatcaaaaaaataaaataaaaataaaaaaagttgcacatctctctcctctgcactagttcggagagaggagaggagagaaaaaattctacatgtcacatattacgtccatttgagttcattttttctgtggttggttcttgtgtgtccctaagcgtgaaaaaaatatcaaacaaataaaacaaaaataaaaaatttcggggggggggggggcgccagccactctggcgtactccccctagccacctcagcatagccccgccacgtcggcggtgggacggcgccaaagaggctggcgccgtcttgtttaacaacggcgccagccactctggcgccccaaaaaggaccatttttgggataagtttttctagggatctacttgcgaaataagtttttcaaaaggactaaaatgtgaaaaatccagcctcctggtccgccgccgcgcccttcattcgtctagccgaggtggaggaggaggagagagaggacgtacggacggcggcggcgccttctccttccactccggcgcctcgccgccggcgacgctgacgacctgcggtacgtacggctccacatgtcgctccccgtcacgtgtttctttcctcaattagtcaaatttttgtggcgccggagagatcggcttctgcgggaggagtttgctgtttttgacgtacgccttggaatttcttttcttttatctcgatgaatttgaatttgctccgtcgctaataattcggaacagcgaaatctgttacgctcggatttgcctcttcgttgcgaaagaattacaaaatttctccgcttgacttgatttgaattttagaaattcccgttctttggttcagttttgcggttctgaacttctgaaccaaatgcatatttttcctcataatttgttgcaacggtgggtctttgcatgtcgtcgagaatgggtctctttggcacgtgagcgtcaggcatgaaaaaataagcttaaaagagctggaaatttggacatgtgctgtttcaaaatgatttgatcaagtcatccaatatataccactaactggaactaaaatcgtggattagtgtacacaaatttaaacagtctgaagatgacctgtttgactctgttaacaagtactagagggaagaggaggaagtctggttgatttcggcacctaaaagtatatataatttgtttcatcctttgactcgtggtgcaaagaatctagcaacacacattcttgtcctaatcgagtataatagtattatgtcaggcatgctgaacttggctgccaagcttgactgttgtttcctttggtttttcttcactactgcacttcaccactttggctgcaagttatttcagccatatcgaagcaggatctgtttggctgttgaagtggtgataacagtcttagaatccagttctttactattcgttagcctttcttaaatattcttaccagttataaatatgtgatattttggaatgcgcgttggcaatacatttaaactttaaccatcaatatccctttgaatattttggttcaacttttgaaaacatactttatttgttttcaaaaatagtttgaccatattgtaacttttccgtacttttttttattttacaatactactattttcgacctaaaatataataacttttgcacaaactagcgctgtggtgacaattttgctatccagatcgttacatttttttttctttgggggtggaggtagtatatactactgtcataataactttgccagataagacaacgtatcgtgttctttcctcagcttgtttcgccttttagtcacgttgaacttggctgtcaagttagtgtgcatcgtttcctcgcagtttcctccaattaatcgcaaagcccttataaggacttgtcagattattgactgatttgctgttgctcacaaccttcagtaagtagttcacctcatctgtaattgtaaacacactcatctttctgtttgaagttgagaagcagagcaagaagctaagcttgggggggcgtggccatggcggcgccaccaagcatggaggagcctcttcttggaggcggcaatggcgaggagaagaaaggagggagctcgaggctagcggtggtggccgaggtgaggaagcagctgtacctcgccgggccgctcatcgccgggtggctgctgcagaacgtggtgcagatgatctccgtcatgttcgtcggccacctcggcgagctcgagctctccagcgcctccatcgccacctccttcgccggcgtcaccggcttcagcctcctggtacacacaccagcccttcctcaaatatacggttcttcagaaagtaactcgagatatctaaactttacactaagttttttggagtatctgaagatatcaaattttatatttcaaaatttggtacttcttaataccttctataaaattacctaacatcgaaacctaatattcattcctgacatgatattgaattcgctccccatcttggtacgtgttcgatctgttcatcatccatggtatgatggcatgatatcttgagaaagtaccttgaagcacttaaattttacactaaaatttttatttcctcaatatacttaatacatggagttatcaaattttatattcgaaatcttctcgataccttgagctcaaagatgataaaattacccatccccaaaacctcatcttcattcccaacaacataatattgaatttcgttgacatcttggtacgtgttcgatccggttcatcgtcaattggtataggctggcatggcgagcagcctggacacgctgtgcgggcaggcgttcggggcgaagcagcaccggctcgtgggcgtgtacaagcagcgcgccatggtggtgctcggcctcgccagcgtgtgcgtcgccgcggtctgggcctacaccggcgagctcctcctgctgttcgggcaggacccggagatcgcggcggcggcggggagctacatccggtggatgatcccggcgctgctggcgtacgggcccctgcagtgccacgtccggttcctgcagacgcagaacgccgtgatgccggtgatgctcagctccggcgccgccgcggcgtgccacctgccggtgtgctggctgctggtgtacggcgccgggctcggcagcaagggcgccgcgctcgccaacgccgtcgcctacctcgccaacgccgccgccctggccgcctacgtcaggctgtcgccagcgtgccggagcacgtggacggggttctcgtcggaggcgttccacgacttggtcggcttcatgaggctcgctgttccttctgctctcatggtctggtaagtttcttttacttaaaaaaataaattttatagtactttttttttattacacgatagatgtacacgcgcacacaacactcaacacgcaacacacacacacaaaaggagagattcggaggtagagatgttcttcaaactatttttaagaaggaattgtaagcaggttgggggctaaacatgggacctcagaattgaaaccacacatcccttaccaattaccactgtattatcaagtgcatctctaagcacataacaccatactcacgaaattttatagtacttgagaaaatacctatggatatcaaaattttggactgaaaaatttagtaacaggagatatcaggttttataggagtattagaaaatatgatacattttggtaccttgttaagaacggtaaaattactctaagaaaactattgtgctagtcactctgagttcaggtaaatttcgttgtctcatgtcgaatttagctgaaatttgcatgttttgtagcttggagtggtggtcgtttgagctccttgtgctgctctccggactactcccaaatccgaagctggaagcatcagtattgtccatttggtgagtgatgttttcatgatttggtcacacattctgcatccagtttgcctcctctgatcgtgtaccactgaatttcctgcagcctgaactcgggttccttggcattcatgatccctttcggccttggttcagccataaggtcagatatattgatcaaatcaaacaccttatcataaacattgctttcaatttattgtttttcttttcatcaaaacaactgttcatgaacttttacaatgacaaattaacgacatcacaatgccctgttcttcgtgatctctctcagcacccgggtctcgaatgagctcggcgccggtcgacccgaggcggcccgtctggccagccgtgtggtgatggcgctgggtctcgtcgtcggcgtcgcgatcgggctcgccatgatcctggtgcgccatctatggggttacgcgtacagcaacgaggaggaggtggtccagtacgtcgcgaagatgatgcccattcttgccgtctcgttcctcttcgatgacctgcagtgtgttctgtcaggtcagatgatcgatgctcgatctcaaccaaaaaaattgaaaacaaaatgcatgtgattgagagactattgtctgagttttttcacgcgttaatcggttcttttcatatccatctatttatgattgatttgtatatatggttgttaacaaacatattatccccaagaaaatgactgacagtgagggattcttcaggtgttgcaagaggctgtgggtggcaaaagattggtgccattgttaaccttggagcgtactacctcgtcggaattccagcggcgctgtgtttcgccttcgtctaccatcttggtggcatggtaattctactgctcacataagagaaagcattacctcaattctgtcaacattttggttggctatttcttagatatgggacctggaatataagttttcatataatctttggccgtgtatattcacttatggatacagaggcttgattactatccattatctaaaagaaatcggtctctgttttgagcagaagaaattgacctctgaacaatatatatgcttccaaacttgcagggactgtggttagggataatgtgtgcactcatcgttcagatgctgttgcttctagccataacagtgtgcactaattgggagaaagaagtaagcaaaatcattcagaacttcttgcatgcgtcacatgtatactgttattttttctgtcagcttgtcattacggtttcttgatgatgtggcctgtttttgtcttgtgtctttccataggctctgaaggccaaggagagagttttcagttcgtccttgcccgcagacatgacatgataatacaatgtacacgatccaagaaccaagatgaagatcgatggacgattttgtttggcaatagtggccaagaaattctacgagacaatgggaaattacagcttgagaaattaagaccgtcatctctatgttttgatgacacaattaatagtcgccaaaacaaggaactatctgcaaggaagagttcagacagcgagaaatctgcttttggtggattttttgtcagacgaagaaataaaatgttatggactagagacgctgcattggatacaataatgaattgaaatgttcagttaactatatgtaatggatgttaggatttcgacaatgacactattttggctctactattgattagatgattaattatattgtaagtattatgtgacatgcgccattgagtcatgattcatgataccttttctcctaaacgaaatacatcttcttttgcttgtaaatatgcaaatataaagttttttttttctatgagcatgcttcatgattttcttaacaatgaaagtttaacttttaggctttgcatcgcaactaggtacggacagttggtgatgccaaggctgaacattaaacttccagtgttaaaaataaatatttttctatcaatctggcctacgggagtttttaattagtgaaaaaaaatgcccatattcctagggtaaaaatagttgaagctgtttattgaaacatgtgttgtccatggagatgcatgagttgatgactagtgctatagcttccaattgagaaggtgtgacatatattattgatgcatattagctgttcaatcaagtaatgctaattcaagattgttcattgaagaaaacaaattaaaaaaactaaattcttacttcaaaataaatatataaggaactggcctggtaagttggatatcttggagctagaattgaagttaaactgctgttgtttgggcaagacatgttgttcacacttcagactaaaatggagggttaaaccattttacctcagcaagtaaataatctaattgtgctatcattttaaaattgtaatcaatcagaagcatacaatatgttgtttcatgtaccagaagcatgcatctaatgagcatgtccctcccatcttcccatatgttgaatagcatgatactaggttatggacgtgatacaacttcttctcttaccagcatgtgtgtgtatatatatagtgatacaacttatacaacttcttctcttaccggcatgtgtgtctatatatatatgtgtgtgcaactagatgttttcttgcataagcacttgctagtaaagcttaaccaaaagaagtagtgtaacacctatcttcgcacatattcattgatatattagagaaaaccaaacaaactatgtgatgttctgattagtgtatacgctagaatgtgaatttgctagtgaagccttctagatcaaggttcatcaaccatcaatctaactaatttctttacatagctttgtagatatggaacatattttttgagatattagacaaaaccaaacaaactatgtgatgttctgattagcttatacggtagaatgtgaatttgctagcgaagccttcataatcaaggttcatcaaacatcataataaataatttatttacatagctttgtagatatgaatgaagttagtaggtagctttatgggtattaaagcacattaaattcaaactgttgaggagctagttagagaagtacagtagcatgctacaagtcacgtataagcacatgtggaagagagagaagataggagagagaaggaaagcgggctagtgatttgtagccagctgcagcacggacttcaaaacattgtgtgtatgagaggtgggaccatatattaatgatgtagtatatgtttataagcaactattattgtatgaatgagttattagattgactatagatgatttggaaccagtggttggctataccattaaacttgctcttagtatggatgaagttagttggcttaatctcttctatatttttatactcaaagtggggaatatatagtaggcctcctcatcacctgttatcgtttcccatcctttccggttatcatgtagctgatctatttaattgaaattggcctgcaccaattgtgcgtgagttgagctacttttagtcttatcagttgcccatagttcctaataagataaaacaacttatattttaaagcataaaaaataatttataagtaaaacttttatatatgttcttagcgacttaaaatccattgctgaaaaatgaactacattaaaaatatcttaaaatcaactttgaaaatttaaattttggctttggtttcttagggcaaccaatggggccttgttcttgctgctcgtttatgtttgcatggtatcagagcggcattgatcccacatgttcctttcccatttttttctcctccgctacattcatggcttctccacaacccaccataggcagtgttcccccctcctccttccctaacctaggacaccgtcgccaatctcgtcacggcgctcgccgctgcccatgccgtgacgtccactggcaagaacggagaccttctcctcgccaccctcaccaaggcataggtggcccaagatgccatcatggtgtcatcggtgcaagcactaggcgtctcttcggccctgacgatcccgctgtccgtgcaagatcgaattggtgctctcccgccacctacgcctaacacgcgtggtcgttggtgcagcacctgagctttcagcatcccaaacttcaaggcacacgtgtctgccgtccttgacatgaagagttcgaactacaccaagtaaagaaccatcttcgtcgcgttcgagcctcctcctccgctcgacactgctgggatctgggcgcaaaaggactccgctgtccacatcgccatgtactgctccatcgccaccgacgtccttgatgtcatcatggagaccatggtagttggcccacgacagggcatcttccacgacaaccgtgaaaccagaatcatttatcatgaaatggagttccgtagcgtccttcagggctacatgccggtgacgaactattgctggcgactcaagaatctcgctgatggtgatggtgctggccacgtctcgtcgtcggcatcgcgatcggcggggctcgtcatgatcttggtgcgccatttgcggggtttatgcgtacaacaacgaggaggaagtggtccagtatgctgcgaagatgatgcccactcttgctgtctcgttcctcttcgatgaactgcagtgtgttctgtcaggtctgatgatgctcgatctcaacaaaaaatagtcaagttgtgaacaatatatatgtttccaaacttgcagggactgtggccagagataatgtgtgcactcatcgtgcagatgctgtggcttctggccaccaactgggagaaagaagtaagcaaatcttgcagaacttcttgcatgatcacacaatgtgctgtgtttttgtcagctttgtcagtaaacagttcttgatgttgtggcctgttttgcattgtcttgtgtctttccataggctctgaaggccaacaagagagttttcagttcgtccttacctacagacatgactacatgataacactatggacacgatccaagaatcaagatgaagatcaatggacgattttgtttcgcaataatggccgagaaattcttcgaggagaacataacgagatgatgggaaatcacagcttacactgctggagaaatggtttttaaccccggtttgtaacccctgtagtcatggttatgcaaccgcccctgtagtcctggttatgcaaccgggactacgaatcccccggttgaaataaccgggattaccaaccgagactaaagatgaagcccggccaggttcggttggtagttttttttttcttttttttcattgtttttaactttaaatattgatttcactacatccccaaatcatccccaaacaaaaggatcatctccaaatccccaaattgatcatctccaaatacatcacaaattctaaaaaaaaatacatcacaaattctaaaaaaaaaacaacacaaaaacatcacatatttacatcacacacagatcaaatacatcacaaattctcaaaaactaattcatcacaaattctaaaagaaatacatcacatattataaatctcagatctatgcaatgaatcacaaattctaagaaaaaaaagaaagaagaaacggcgatgccactgccgtctcccgcctcctctccggcagaggggaggacgccgccaaacgccgtcgcccgccgcctgtcgccgcgcgcctgctgcctgccgccgccatcctatccgcccgctactaccctccctgcttcccgccgccacctgccgcggcccgccacggccttccgtggcacgtaggccaggccgccgccgccctctgctcctcgctactctgcacaaaaagaaggagacgataagatagagagaagagaggaggccggaaaggcaagtataagagagagagagagagagaggaggaaaaggaagttaaaaatgaggagtttgtgaggataaatgcgagggattatatacggcacatggattggactaacgatcactggccccctgacagcccctagctgtgaatgaaccgggactaaaactcatctttagtcctggttaccggtactaaaaatcatacagggctgatggagttttaaaccgggaaaaaaaccatctttagtcccggtttctatttaaaccgagactaatgtggtttttggctaacccatcaaaaatgttttctccagtagtgttagaaaattgagatcgtcgtgtccatttttggtgacgcaatagtcaccaataaaattggactatatctgcgagcaagcgttcagattttggacaacgagaaatccgtttttggtgatttttggtcagatgcagaaataaaatttttatggagtacaggcactgcattcgataacgataatgaactaaaatcatgttaataagttaattacatgtattatggatgtcaggattcgacaatgatactattttctctacttttgattagatgactaatgactgcttttgtttgggaaaagacatgatgttcacacttttgacaaaaatgaagggttaaaccattttagttcagcaagcaaatgatctaacttgtgccgtcattttaaaggagtgtaatcataagcatacacactacgttgtttcatgtaccagaagcatgcttgtgttaaatagcatgataccaggatacatggacgcgtgatacaacatcttctatccactccccatgtgtgtatatatacctatatgtttccttgcataagcaagctttaaaaaaaggtgtaagcttcagatggattccattagatattagagaaaaccaaacaaactgtggtgatgttctccttagcatggttggtgaaatgtgtcctgatcaacctgcaaatattatcaagctcacttcgacggtacttagcaaacaacactgtcttttcgcatggaatagaatattattttgtatagtttgctatgtttcatccattcaaattaaatttttaatctgtattggataaaatgaaactaattttaacatgtaacaatgagaattcataatacataatgtactattactacatggaaccatttaatattaataatacataatggtcctacaaattagccatttgaaatttcataagtgtttatggtaacatttgtttcttaatttaataacaatcttcaacttaaaatgattatatatgctgaaacaaatattcaatttacagatatttgaacttgtatttttctaactggaaatatatataaaaattgtgtcgtatattttgaagtcattctaatctcgtacacactaaaaattgcagctatttatatactaatgtgattggatttattttatcgatgcatattggattagagatgagaatcataatatcaaatggaatacatatgcaatatatttactcgacaaggaaaggtcgatcgcaggtagtcacaaggtaggttggtttagagaaaacctatttggtcatggtacagttcctggtgagagtgcatattttttttaacatattttttctggcttagaaatatatgttttttcatcattatgaattattacactaaaaaatcactcccaaatcccaatcactaaaggtttattagattgttatactctgtccgttctaaaatataacttctccaaattcatagctaaaggtcccaaaatattttaggaaggaaggagtaaatttgtcattcgaattactaatggtttaattgttggatattactgttcttaatggaccgttactccgttagagattggcgtttgtatggtattattgctcgatcctctcgttagccatttgactatgaagacgtgttctcttgatcaatcctataagtacaggactttctaccctatgcccgtttctggttgtgtcttagctgataaaagtggaatctgaacgaaacaaaaatacaaaactacaaaactagtaagggagttgagtacatgctagttgcaatcataccattgggatgctctaaaattttgacaccactaattggtattgcaattaattatcaattcattatgtagaacaagaaagagatcagatcagaattggtattgcaagggttgccactggaatttttttttcagttatacatggcttttaccatcattgagttgaacaaactttatgcatatatctagagatatgaaaagagtaatattatcaataatgggtaatatgacgctaattggatgctagtaacacaatatttgttttttttatgtttgaagttttttctttcagttgttaatagtatagtgctattgtgaacaaattaatatataaaagtacataaataggcataatacggtagacacaatttcattgagatgaagaaactagagaacatataaatgttgtactcagtctataatctagctagaatgtatattttttattcattggtctcttccactttaattttaatctaaatgattaattaaacagactgaccatccaacaaattatatcgacaagatgtcaactcaatcatgaccatatacatccatataaatgtttgaattatctatcaaagcttgcaaagatgtgctatttgcttgggtggttgctcattgagacttaaacaagtagtagcaacagccatggtcacacagtgcaatctactttgatttcccctaatatctgaggatagacttagaagtgaaaatgataggaaaatagcttagctctaggttccaagccatacatacttctcaagattaaacttgtctgtgtatatagtttgttgctatatattggccaatacaacgcagacagttgttagaaatgaaaaatgtatggttgtaacttcaatacatgcaagtgcaaatgcatatgatgtgcatttctactttccaggcatgctcatgccttcacaaatatctgttgaacattgcttcttttgccgtatctgttgctcacttgcaattgatttactctgaaattaacttggaagtaaattaatatgaagagcaaacaacttagcttatctcttaacaggactccagcggcaaaacgactttcaaatatttcagcgattcagaacagaacctcaaccagtgaataaccagaccaatcatcagtgcagtacttaatagcaatatctcacgcgaaggaaatattacgcagcaaaggatattgactcacaaagacaagtctacaatctgtataacactatattcttccagttccaccgggtggtggacaacacgatcagaactagaagtgattccaacgagaaccaagaacttacataggagatggataaattggatacctggtcaatgccatctcttcgatttcatctcaattaaacaattgccatctgttttctttggtgaggccactgcaacatggatgccggccacaccgactatatcctccatcacattcttcttcctagctaattgtgccgccgcgcccctccttgccagctcctcggcggcgcaagtaaggagtttacataggccgtcgcattctgcaccgatgcaggtcaggaagatggcccaacttcccatgatgtcggtcatgcaggcccaccgatcgagcagaaaacaccatcgcctcatagtggctccagaaatttttttttatagtcctattccacgcttcaaaatttcaaaacgccgaaaactcaatgtacgtatacaaaatttactcaaatactctactaaaactagcatttaagtctagaaattataaaaactaggaagaaagcccgcgcacatgcgcgggcaatttatttgttgttcgtaaaaagaatattaaaaggaatcatatgtcactatattcattttaagaacgatagattaccttataatcgtaaaagaatgaaatatttatattgcgaaataataatgtccattattatactaaatgataataatagaaccatagattaccttataatcgtaaaagaatgaaatatttatactataaaataataatgtctattatattcaaataaaattcactttctcccggttatacgtaaactcacatatcgttaaccttcgcaaacatagaagttaatatgggttttgattttctttcttttactatacatctaattcgaaggaataatacatattgtcaaaattatttgtgctaattttgttaacactatttagatgagaatggcataattatataaggatataatatgttttcatgtgacattttttattgtacgcatgtatgttgttttttagtgaatagtagtaagtatattcataatgtgggtgcacttatgagtgtctacgatttcatttttcatcgttaataaaaaaacttttaaaaagtttggtggaatcacatgaagcgaagacacggtggcgtgacttttttagcaacatcgcaaaatatttcactacatatatgcataatttgagcaaaactttagttttgcaaagaaagaagcagaaaactaccagagggagcagatcatacagaggcactcctctgttttttttcttttttgacatctcaaagatgataaaattacccatctcatacagagttggatttctacccattatccaaaaaaaaatcactctcatttgagctgaagaaattgacctctgaacaatatatatgtttccaaacttgcagggactgtggttagggataatgtgtgcactcatcgttcagatgctattgcttctggccataacactgtgcaccaactgggagaaagaagtaagcaaattcatttagaacttcttgcatgctctcatgtatactgttcttttttctgtcagcttgtcagtacggtttcttgatggtgtggcatgtttttgtcttgtgtccttccataggctctaaaggccaaggaaagagttttcagtttgtccttgcccgcagacatgacgacatgataatacaatgtacacgatccaagaaccaacatgaagattgatggacgattttgtttggcaatagtggctaagaaattctacgagataatgggaaatcacagcttaaaaaattaagaccatcatctacatgttttaatgacgcaattaatagttgccaaaacatggaactatctgtaaggaagagttcagacagcgagaaatctgcttttggtggatttttggtcagacgaagaaataaaatgttttggactagaggcactgcattggatacgataatgaattgaaatgttcagttaactacatgtagtggatgttaggatttcgataatgatactattttggctctactattgattagatgattaattatattgtaagtatgatgtgacatgcgccattgagtcatgactcatgataccttttctcctaaacgaaatacatcttcttttggttgcaaatatgcaaatataatttttttcctattttcatgatttttcttaacaatgaaagtttaacttttagcctttgcatcgcaactatgtacagactatgccaaggctgaacgttatacttcgagtgttaaaaataaataattttctatcaatctagcctacggaagtttttaattagtgaaaaaaatgccccatattcctacggtaaaaataggtgaagctttttattgaaacatttgttgtccatggagatgcatgagttgatgactagtgctagcttccaattgagaaggtgtgacatatattattgatgcatactagtaagcgtgattcagaaaacacattatcaaaattcatgtcacttattttctttttcatagcacgccgatacacagacaaaatgtttgcctaaagtatttcactttctctttgccagatcagtaaaagtcatacattaccaaaaccaagtagaaatttgcggaagcaaataaattataaaatatttgataatcaatacattttcatcaaggaagttttcatttacatttcagaccatcagcagagcatgaatgcaaatatatatgcaataatttctaatctcgctcagtctctctgcttgagagcttgttattcattttttccattctcatccattgaacaattcatactgatacaaaacaaacttgacattgcatctgaaatctgtgcagtgaacttgacatataattcgaaatcaatcaaaagtcttcaaaaccaataaaatccaacgaataagcccattacctgattctaacactggggcattttcttttgaatacaatcatcgtgggcgatgcatgcacgtgtgatggattcaccagcagggctagacacagacaacacaatcaaggtagcaagtatcagaataataggatatttaaagtatggccacattctgcatggtaaccaaaagcggcggcatactcaaaagatcattttcatactttctgagttatccaactcacaaattgaaagtaatatctacatgtgcatcaggaggcaagttttacgggttactccctcttttgagttatccaactcagaaacctgaaaccaaactttttgctcatctccatggctcctagtctacccatctccccaccttgtagatctttagggattaccacctgttagcaaattacgtcatttgatataattagtatctagctactacctccgtttcaggttataagactttctagtattgcccacatttatgtagacacacatatatgtctagattcattaacatatatatgaatgtaggcaatgctagaaagtcttataatatgaaacggatgaagtagcatatacgaccaaaattctagaaaagcttcctgatttatagatattaatttcaaaaatgagttattatgggtacagtcagagtgtttccttggccgaaattatggtaagcataagctaaatgaacaaaaatacgccatgtttcaatgcatgagtttaataattaaattaattaattcccaaatacaactgtcaataacaaatcagcaagctgcatatcatattttccagctctttggccttcctgaccattgtgcacagaccattcaaaacctagaaattgaatgcaagttcgattactcaccaatatatccaagcaaaaaactttgcggatttcaaaaccctaaaaccaaactgttagtacctaaatgtgcaatgtgtgcaggaggaatggatggcgtagtgaaaatttgcatatattggtctgctgaattggttaggtctttgcatttgtgagcataaaaaggtgatggggtttttatcttcaactccaatgaactcaaaaaaccaggcaagatattgcttcaagcattcagtgccaaaagctcttataaccttcagtgaggccattacttttgtcacagcatgaatttctaggatttgggagaaagtgagatgaggatgtcattctaagaatacatacgaactatgaggctgtgaatagaataaggaaaattaacttggactataaactatgaggctgcaatatttgtatttgtggcagcatacaggtgagtaacgttatggtgcaaataaataatgtgatcctttagatgtttgtgtctcagctagtcaacactgcaatatattgagtctatacccttgtgaaattgtgctgcaagaactggcctggtaagctgtatatcttggagctagaattgtggttaaactgctgttgtttgggcaagacatgttgttaacactttagactaaaatggagggttaaaccattttagctcagcaagtaaataatttaattgtgctatcattttaaaattgtaattaatcagaagcatacaatacgttgttgcatgtaccagaaggcatctaatgagtatgtccctcccatcttcccatgtgttgaatagcataataccaggttatggacgtgatacaacttcttctcttgaccagcatgtgtgtatatatgcaactagatgtttccttgcatacgcacttgctggtgaagcttaaccaaaagaagtagtgtaacacttagcttcgcacatattccttgagatattagagaaaaccaaactaactatgtgatgttctgattagtgtatacgttagaatgtgaatttgctagtgaagccttccagatcaaggttcatcaaacataattctaactaatttctttacatagctttgtagatatggaacatattccttgagatattagagaaaaccaaatcaaactatgtgatgttctgattagtgtatacggtagaatgtgaatttgctagcaaagccttcctgatcaaggttcatcaaacatcatagtaaataatttatttacatagcttcgtagatatggatgaagttagtaggtagcttcatcaatcaaaccacattaaattcaactgttgagaagctagttagtgtcaaagatagcatgtaatctctattttttggcataatctcttctatacccctaatcacctgctattctttaccatccttcctcatgtagctggatctatttaattgaaattggccccacctgctattctttaccatccttccttattaagctggatctatttaactgaaattggcccgcatcaattgtgcatgagctgagctactttcagtctcatcagttgcccatatttcctaataagataaagcaacttatatattagagcataaaaattaatttataggtaaaacttttatgtgtgttcttagcgacttaaaatccaatgctggaaaaggatctacattgaatatcttaaaatcaactttgaaaattcaaattttggctttagtttattagggcaaccaatggggccttcttcttgctcctcattatgttttcatggtatcagaatggcattgatccctcctgttcctttcccttttttttctcctgtgcttcatccatggcttctccacagcctaccatcgactgtgttccccctcctccttaccttacctaggacacagtggccaacctcatcacggtgctcgcagctgcccatgccgctggcaagaacgacaacctcctctccaccctcgccagggcatatataggtggcccaagatgccatcatggcgtcatcgacacaagcactaggcatctctttggccctgacgatcccgctacccgcgcaagaatcggtgctcccaccacctacacccaacacgcttgtttgtgtgacacccgcgctccctaccctgatgtctggcgctctcagcatcccaaatgtcaagatggacatgtccatcgtcctcgacataaaatttttgaactacaccaagtagagaacctttttcgtcatcttcctcagcaagtttggcttgctaagccacatgttcaagcctcctcctccactcgacactgccaggatctgggcgcaaaaggacttcgctgtactcatcgccctgtactactccatcggatgtcctcaacgtcatcatagagcccatggtagttggcccacgacccgtgggtcgccgccaaaggcatcttccacaacaaccatgaaaccaggatcatctatctagaaatgaagttgtggagcctcatccagggctacatgtcgatggcaggctactgctggcgactcaagatctcgctaattccatgcgcaatgttggcgaacagatctccaaccacacccttgtcctcaacttcatccacggcctcagccctcacttcaccacccaggcataacttctgcatctgcaagtcgcctttcccaccttcacaagtgtccgctcgacgcttcttctagcggaaatgcactgtcccaccaactcttcgctgccacctcgaccagccaatcaaactccaccaacaaagggaaaaatggcaagggaaagggcaaagggaggagtagcggtggcaatggcaacactaggaatagccgtgatagtggtagcgatggtagaggcggtgattaccctaggtctggcagccagaagtaactgttggctcctccacccggtccatgagtgatgatgatcccatgagcctctactccatgggccgtctcccgcagaccctctggtggaccaggccttcttggaccacagcctcatatgacggttcaacaggcctttcatacacaagaatcttccctggcctctgtggctggattggaggcgcctgcctagcccacctagggtcaagccatgttgcagccctgaacatcttgcaacatatggacaatgcaatggtggagcatctccagcaataggccttatttttaagcccctaaaagttaaatgagggctgcccccatttcccaaggacccaaaaaatgcctccaactccagcggtagcccctacttcttaattagtccctactcatttttatcttgtatattaaaacacaatccatgtttacactacgtttccacaataattcaaacataaatatttctaacgcatataatttaaccataattaaattcacaatttcaaacaccacaattcaaattcaaaatcaaaattttcaaacatgtaaatatggtgtgggcatagtgccatatacaacaaaaacatgcaaccaagattcataattcaccaataaaaatgaaaattactcataaaaaatctttcagatttccaagttcagagaacgtaaactgagcaagctatattctgataatcaaaatcaataaatgaactgtacttcatttgattaccggtgataatttacaagtacggtgctgaagaacaaaacaaaacactttacaaaaatctgaaacatggtagacgcaacaaatcgagcagaccctcacctgatttggaaagtgggggacgtcaccggagagggcgcagcggaggagaggtaccggggtggtcaggggtgcctgggaggagatggtgccggcactagatggaggagcgtcggggaggaggggcaccagggtggacaagggtgtcggggaggaagggatccaggaggagagggagggagccgtggaggagatggagggtgccatggaggattgatgtcgaggagaggggcgccgagcatagtgatcgaaaacgccaccagagaacaacacgcgcgggaaagaaagaggggaagcgcgcctgggaattttctcccgcgcttttcccactaggtgatgggggccgggactagagcccccaggattgggggcttggggagatgatttgggtgcctttctattttggggctttagtaggagccctgttggatcttagtttttggcctcaactttcaaaaattgtttaagggctgtgtttggaggccctattggagatgatttgatcatgcacaccggtgccacctcgcacggtataatcttttcctcccgacctccctcatctccgatgtctgtcaccatcggtagcagttcctttgatcccagtttcttgcattggcaacaccaccctctctacttctcactgttcacatatcagactacaaatgaagggttttcgagtaaaaaaaaagaacggttaaacaattttagctcagcaggcaaatgaattaactgtgttgtcattttaaatgagtgtaatcataagcatgcatactacgttttttcatgtaccaaaagcatgcatgtgttgaatagcatgatgccaggatatggatgcatgatacaacgttttctcttgacctgcataggtgtgtatatatatatatatatatatatatatatatatatatatatgtatgtatgtatgtatgtatgtatgtacctatatgtttccttgaataagcagttgctagtgaagcttaacaaaaagtgtaacagctttcgcatgtattccttgagatgttagagaaaaccaaataaattgcggtgatgctctcattagcatgtgtgttaaaatgtcaatttgtgagtaaagccttcctgatcaagttgtaaatactatgaagcatcattttgattggattctggaaacagaagaggagatctgggacatcctttatataggcttgggaggaagagattggatcagattcgagaggaaacgacgacggaagaatcggattcgagagaaaactacaacggaaattagggtttatcccgagttcatcggatctcgaatcctacaacggggtttatcccgagttcatcggaataagaactgagacgaaattcatgggattaagcacgaatttgatggatatttcgtggggacaaggtagaggaggttgataggattccgttcccgcaatcaatttgagaaaaggagcaggccggatttgatggaggtggtggcggctctgcagagtggggcgtcagggagaagggaggaagagggaggcaaagctacgggctgaggaaagaaaagagaacaaggagtaaccggattcggctttaagtaggaagataatttttattaactttttaatctaaataattgctgagatgatatttcatttattaaaaataattctaaggctcaagtaaatcaaacataaatcctgaaaatacttaggcatacaaaatatttaatgataattttatctagctcatgtttatgttcaaatttttcatagattttattcacacacttacttaaatcattaaataatttctaaaaaaaatccccttttcacaacaatttataatttagcgatttttagggtgtgacagatactattttctctacttttggttagatgattaattacaatgcaagtacatactatgtgatatgcaccactgagtcatgctgacttttcacgtaaacaaaatacacatcttcttttgattgcaaatatgcaaatatgcaaatatttttgctattagaatgctgcatgatttttttttacaatgggagcaaggacataatcacataaccatacatgtcgacgtcagaatttgaaagcacgcgtacagtgcactatgctcttctaaaaggcatggtgcgtaaggttaaataaatattggtcattgaacatgaaaaagaaatttaaaaacactaaattctcacttccaaataaataagcaactggttggctggataccttagagctagaaatagaattgaggtagactacagttgtttgggcaaagacatgatgttcacacttcagactaaaaatgaagggttttcgagtaaaaaaaaagaagggttaaacaattttagctcagcaagtaaataacttaactgtattgtcattttaaaagagtataatcattatcatacatactacttttttcatgtaccagaagcatgcatgtgttgaatagcatgataccaggatatggatgcgtgatacaacgttttctcttgacctgcatgggtatatatatatccatgtacctagatgtttccttgcataagcacttgcttaacaaaaagtgtaacagcttcgcatgtattccttgagatgttggagaaaagcaaataaattgcggtgatgctctcattaacatgtgtgctaaaatgtcaatttgtgagtaaagtcttcctgatcaagttgtaaatattatgaagcatcattttgatcgtagtctgtacacatattcctagatataggttgaattcatgaggactaagctagcatcacgtcaagacggccgagttttgtacacacgttcatagatataggtgaaattcatgagaagttagctagcatcacgtcaaaacgacctagttttgtttagctaaacagtatttaccaaacaccactgtcttctttgtatgaaatagaatattattttgtatggtttgctatgtttcatccatttaaattaaattttcattatatatgggacaaaatgaagataattttaacatgtgcagtaattaacaatgagcatgtgtccctatttggtactgaaccaaaatatgtcattgctagggcagcatgcactattactacatggagccatttaatattaataagatacagtggtcctacaaattaactgttttaaattccataagtgtttcagtaatatttgtttcttaattgaataataatcttcaacgtaaaatggttatatatgctgaaacaaattaatctccaattcaaatatttatgaaattgtatttttctaactggaatatgtataaaaaattgtgtcagttattttgaagttattctaatctaatacacactaaaaattgcagctattgatcaactaatggaattagattcattttatcatgcatattggattgagatgagaatcataatagtcaaatggaacagtacatatgtaatatatttgagtcacaaggtaggttgcattggtttgcagaaaacctatttggtcgcggcacagttcctagtgagagtgcatattttttcgaatatatattttttggcttacaaatatataactgttcgttattatgaatcattacaggttaaaaaatcactcccgatcatcactaaaagatttattaaacggttatactccagccattaattccaaaatatgacttattcatattcatagctaaaggtagctatattttaggttgcaagaaatgattagtctatctagtcattaaccttatgtctccaacgatggtttaactgttcgagattactgtacttaattaattgaccgttagagattggcatttgtatggtattgctcgatcctctcgtaagacatttgactagatgtgttctcatgatcaatcctacaagtacggaaatttggtttgaaatgatcgagcgtatgctttctaccctatgcccatctctggttctgtctcttagctgatatataaagtggaatctaaactaaacaaaagtacaaaactggtaagggagtcgattacatggtgattgcaatcataccatcggggtgccctaaaatttttacactggtaattggtgttggtattgcaatcaattatcaatttcgttacgtagaacaggaaatagagattggaattggtattgcagataattgtgcttatcaaaaaggttgtcactggattttttttagttactagctaaaggccatgcgttgtaatggatattataagagataaaaaaacaaaagtaaagggaaaaaatacaagtttagtagtggatattaaaagagataaaaaaaacaaaagtaaagggaaaaaagtacaagtttatagcatagggagatgattaggcatatgatgccgcatcatatccaaagcaaaagcatgtacatgtggggacgttatggcgccacatgtcagcttgtgacgttggaggtaggctcgaacgccaccactagcattatttaaggtaatatagatacacctagcttttatcattcattgagttcaacaaactttatgtatatttaaagaaacaaatatatctagagacataaacactagtactacagatttggacatctatgatgggtcatctgagatgggccgaaaagtatcccatttaaaatatggctactggggagggcctgtcatagatgcgacgtcatctgtgatgggatagttgtaacccattacagatgatctatgacgggtcacaaccaaggctcgtcataggacatgccatctgtgacgggtgtagtgttatgaaccatcgtagatgagatcactcatctctgatgggtcttaattgccttatgtactggtggtagttacgatcagtcatttccaaacaaaatcccggatagagatatgccttatatataagttgtagttctggatgatatctacaactttataactaaatgtttttattagagatcgtttacatccccaaatatgtattacagtgatgagatctattttgaagaacaatatttcaaaaatttcaaattacctcggatggaaaatgccccatatcaaagtcatagagctcaaccagatgtacaccattataattgacgatattttcatttaaatagtttgcatgcccgaatattgattataagttgagatctatcctaaaaacgaaaatttgaattcttcaaacgatttcagacgatgatattccctatgtaaaagttttagaacacaatgaaatctcaaatgttttagttggttacatttccatttgaagtcatttagagtgttaaatgtatgttacatacttcatataggaataattaaaagaataatattgaaaaagtaaatcacatgtgctctacaagtgggttggtaagtgaggtttgtgtagagagggagatcctgagttccaaacttgacacatatatgcttgtctatattgttagcaacacatttttttttctaattttacaaaattagaaccgtgccactactgtcatttttccacccatctccttgattttccatcttcttccttcttactctcatcctcttctctcccctccagatcgccggcgaagagagcaaaccaagaaaaccagatcaccggctaataccgcctcgatttcaccgtgacccagcatcgctccccattgcggagcttggaggaggagggcgccacatcgtcgggccggcgcaacaatagcaggagggccctcatcgtgcgtggcactgcggatgatgcgtgcaatgtggcctagggaggagatgtatgcaatacttctttgcctggagcatccagggtcgatgtgatggcgacgaccatgttgctgtgcggtggcagtgtaggttgcggcgtccccggcgcggggcgccgccaatttcttcgattttcttttttcttcattttttctttctcttttcttcgatttcttctttcctttttctgtggcttcgcacagtcggcggcgtgatgcggacgaagccgggtgacggtggcgtggcccaacgagggcacggcaaggtcgggcggcagcggcgcgaccttgcggtggctggcgaggtgcggatggcggtagggcatggccgcgcgaaggtgacatggccctgcggtggccggtgaggggcggcgcagcaagccgaggacggctcgccgcagcagcccgaggccgacgcggcgtggcttggcggtcgggcgcccccgcagttggccgcgaggcaaccatgctggcgcgatgcggatggccggcaccggcgccccaggcgttcaacgacgcgatggtaggcggcgcggcagccaagctcatgtgtggcgtaggcgaccgacgttgcctctcctacttttccccttttcatttttttgttctttttcttcgaccagataaaaaccagatgaagacgggagaaagaaggaagagatggaaaaagaaggagattgatggaaaagatgacggcagtggcatggttctaaatttgcaaaattccagtggcacagctacgaatagaagaattgtaatgacatttttctgaatagtcaaatttgcaatggcatagatccaattaaccctatttgtattttggttgattttttcttttaattgttcctagtgctattgttaacaaattaatatttttattttggatgttttttctttcagttgttcctagtgctattgtggacaaattaatatgtgaaagtaagtggcttggctaggtgtttattttggatattttttctttcagttgttcctagtgctactgtgaataaattaatatgtgaatgtggcacggctaggtgtttattttggatgttttatctttcagttgttcgtagtgctattgtgaacaaattaatatggctaggcatgctacgttagtgttgacggaaaacacggttgcctacgagatttgcttcactccagtgcaggttcaaagcgtgtctcaaatgtcaagagcgtgccagctggtttgatcttgcaaccagcaagaaagacaaaacaaacgtaacgtaattagatgaacgataaccgatcggccgatagggctgatgacgtatcattaggacctacccaatatgggtaaacctaatcggctgtgtctttaggatagtcagttaaagtaaaaaccctaaatatgccctatctgttgtaatgccgtctctaaagtatttatgaatcactttaagacaatattatagaaatagctatcagggttatggatgccacatacccgatagtaatcgactaagctcggcagggcccaccacatactgtcagggttatggataccacataatagtagttgactaaatctcggcaggacccaccacataccatgtcttatacggaaacaaccttcggatataggaggagttccgcataaggaaggatgaatagagttctacatggaaacgacaaggactactcgtattgtatccatattggtctctctagttctacttggacaaggagacacctataggtataaatacaagaccccctaggaggagaagggagacggaacaatagatcaagacacaatatcaacatacaagccaacacacgccaagacaagccgctggatatcgacatcagagatatgcctgggccaaccctatccggtacctacagatgccggctgtagggatctagcgttgtctctgatctcgccgggcacaaactcgaggaggaagactaccctgttgtcgactacgggatggtttcacggccgccctgtcgacaacagttagataggctaccccaaatattgtactggtgtgattatggtgaataagagcaactaccggcttcggccaacaggagtaaggttattacctgacaattcaggggcccgaacctgtataaaaatcctcgtcttcgtctcttttacctaagtctcgcatatatcctagtaccaacgatccctatactatgcaaataccggaatcgcaacatcaaacatcgacaatagccgatggatcagtacttacagcaaaagtagataatgtactggctaatactctaatacagacttatatgaacaaatcaatctatataaatatattagatagcaatcgatcaccatatatgaagtttaagcaagatcaatctaacttgatgtacttatataaagcaatctatctatataagtggcaaatatatacgtaaacagatcatgaaacatgtactatcgtttatattaggaaagatcagccgaaaccccaatactatccttaattatgattaattccaggttagtttttagattctaagcacgactaaggttgatgcataagtatgcaaagaagcataaagtctaaacaatcaagtaattaaccactttttaggatggtgggtatcttagctaatctaatctagtaaagtaatttagtcgataccggcataaactctaaagtgagaatcagccgatatgactaaattgaaatactaagactagattaactaagatatatgatagcaatggtcacgataaaagaactaatacttctaaagtgacataatagccccgatagcgcaggtcgttacctcttgtcgagagatcgcagccgatgccccgactggaagcaaaaacttgtcgaaaagtaaaggaaagggtggcgatgcgtcgaaagttgtattgattggattgtctcccttattacaatggtttggggtttatatttatatcctgagtacaaaacttgtccattatgggcacgattcaaactttcctaaagataaaatactaacaagtcctcacagcggactcttaccaaatctctaactcaaaactgacataaatatcctaattaatagatacaattaccttaaacgagctctgtctctaaacggcaatgacagatatctaaatcaaggcccataccgagtctacgtcaggctatatcgactgcttgccatatcagctcaatcagacttcgactctgtttcccgccgatgcgcaatccgtatttggcaagattcaatattcttcgattcctctttgatatccaactctaaatccgagtctatcttgccaaatttcactgccaacagttatacacaatttcattcagatgaagaaaatggagaacatataaatgccatacctaatctataatagcttttccagctttcctggtatcagtgtacacctatgattctttggcctctttcgctttaacataaatgattacccaaatagaccaaccatctaccaaagtatgttgacaagatggcaactcaatcataaccgtatagatccataaaaatttttgattatctatcaaataatgcaaaggtgaactattggcttgggtggtttcccattgagacttgaacaggtgttgaggcgaatttcgcataaacacacgaaggcctaagagatttgtttagctctagtgcatgttttaaaattgggtttagagcaatgcaattagtttgatcctgcaactaataacaagatagaaataaaagatagatcatggagtcgattagctatagggccaatatagtacctctgcctagttgtagacgatgaaatttcggatcaacggctataaccgatggaatattaataaacataagaaaaaatatattagccaaaacttgacattataatttccaatgatttgtctttagtaaagtcaatcttgataaagccgatgcattgaaataactgtcaataacttcaataaacaatttaatgaatcatcataagtcgctatcaaataaaagacaatcgttaggaatatttccttatcaatcataatcttgataggttggacataaccgaggcaatataagattaaaaataataaagataatcgctaattgattgtattagatttgataactaaccgatggagtagattgattattgataaaaggataatttaccaataaaacaacgaataatatctatcgatttgagcaaatctgtcttaataaaatatgacctgataaattggacataaccgagatagtataaagtcaatattgaacctgatagatttaaacaagccaatagatactgaagaaggtgattgatatattgattctaactaagacagcaaatccattgaagaaagaaccgatatatctgataggcgacgtgtgcacagaccaaattagtatattggacttaagaaagtattagccggaccgatacaatcatacaagcaaaatagatgaaacttacttttttgccaaagatcgaaacagatgcagcccaaacacgaaaatagggtggcgatgcaccgaaacttgtatatttacaaaacccaaggcaaacatatttataccctcagattagaaaagagtccaactcaaacacgactcgatcggctaaaaggaaactgagtgcaatttacatacgacacaattggtttagaattctatctgtagaaggaaattaaaacattccttaatacagaagttgatataaaatctgcgaaactatatctgatacgcttcccaaccgaatccactacaatcatggcgtcaatttcgcctttgacttgatcttgactaacgacaattaccaattctaccgtcaacaagtagtaggagcaattggcatattcggctaactgcaaatgccatgcattgcggcgattataacaacacagtgcatcctacattgatttcccctaatatcaaatgatagaacttacgagcgaagcaagataggaaaatagtgtagctctaggctccaagccatccatctacttcttgataatattaaacttgtctacattaaaagtttgttgctatatagtgcccatcaacgcaaacggtagttagaaatgagaaatgtatgattgtaacttctatgcatatgcaagtccaaatgcgtatgatatgcatgcatttgtcctttccaagaacaactgcatactcatgccttcacagatatctgctgaacattagttgcttgtaattttaccttatctgttgctcacttgcaattgattttactctgtaacttggaagtatattacttcctccgtttcataatataagtcattttagcattatccacattcatatagatgttaatgaatctagacatatgctatatctagattcattaacatcgctatgtctagattcattaacatctatatgaatgtggacaatactagaatgacttacattgtgaaacggaggaagtaatatctactccctccatttaaggttataagatgttttaactttgatcaaagtcaaactatttcaagtttgactaagtttatagacaaatatagtaatatttataatactaaattagtttcatcaaatcaataattgaatatattttcataataaatttgttttgggttgaaaatgttactacttttttctataaacttagtcaaacttaaagcagtttgactttgaccaaagtcaaaacgtcttataacctgaaacggaggacgtagcaaacaacttagcttatctcttaacagcactgcagcggcaaaacaactttcaaaattttcagcaattcagaacagaacctaaaccagcaaataaccagaccaatcatcagtgcagtacttcatgcccacgttaaatctcctgcgcacgtaaaacggagcggtttattagcacgttattaattaagtattaactaattgtttttaaaaattggattaatatgattttttaaagcaactttcgtatagaatatttttttcaaagaacgcactgtttaaccgtctgaaaaaggagagaggtgaattgggaaagttagggaaagaactcagccttaatagcagcatctcacatgaaggaaatattacgcaccaaagtacattgactcacaaacacaccgcacacgcctgcaatccgtaacactagtcttccacttccaccgggtgctggacaacacgatctgaagaagtgattccaacgagaagcaagagcgtacccagatggataattggatacccggtcaatgccatttctgcgatttcatctcaattaaacaattcccacattgttttctttggtgaggcctattcccactagtgagaacccatctcggtttgcaatccctttagtcctgggttgcaaatcgggatgtctaattcgggactgaagatacccatctttataactgggactaaagatctatttttagtaccagccaggactaaaggtattttttaattgttttttgttgcttgcatattgcccaaatccgcacatcaaattgacatcacagataaaatgcggaatgcctgcctcctcccgcacgccaccaacaaccaccgcccgccgcccactgctgacgccaccgacggagaaggggggggaggagaggagaggggagggtgctgccgccgcttgccacccgctgccgcctgccgctgcccactgccgacgccgccgacgatggagaggggaaggggaggaaagcgaggagaggggaggggaggggggaggagtggaagagccgtgaagtggataagtggaggaggcgtgcggctgcgtgaggaaataaggacgacgaggaaatagttaaaaaataagttgaggagataaggacgggtggggaggcgtgcggctcagtgcgctgttccggattttttcaacttttgacccagttggtataaacaatagggactaaatattgacaccaaccgggactaaagatagtgggggtgtgacattcgcctaacgactttttaaactgagacttaaaatgtaccaactgggactaaagattataaagtgttattaggttttgaactggggctacagatcttatttattcccggttcctattcaaaccgggacaaatgtgatttttgccatccggataaagatctgttctccagtactgttcacactcaaaaatttcaaaatgctgaaaactcaatgtacatatgcaaaatttgctcaaatactccactaaaactagcattttagtttaaaaattacaaaaatacaacacaaatagtctaatgggtcatgcctatagagtgagtctggctcgaatttaagtagggaggtcattttgggtcaaaattaagggtgatccaggacctgtatcaggggcggagcttgattagggggtgcccaggaacccggtcaagaaaattttttagctatacctcatctattttcaccatgtacgcacccccctcaatacaaacttaggcatccgcatcagcttaaagtcgatttaaagtagagtaaattaagcaagtgacaccatcctccatttcgctctagctccgcccccgtatcactcctgaaccccccatgctatctctgttcatccctacacgacgccagtgcaccaccagcatcccaccccacacacgtcctcacgccgttggacttctttaaccgatgtcgagggctagcgtgacatcgagcctgtgctcctcgcttccacccacggtcatggatcgagctcaagggcaaggaggcagagcgaggagagcgagctcgtcttggtgcttcgacaacgaccatcctggcgacatgctggttggggacgaccactggatgccctgctcatgtctcttgatctctgtttgtgcagcacgaaggggcgtcgaaggaggcctgacggacaaggccgtcggcgatgcagaggttggaggaattgttctccgcttcttcttgtgattcaaaccatggggctaaggggaatttcatccattgaagtggtaaaagaggcaaaatcaagccaatgaattaaaaaagggacgggttcgtttgaaagatcgttcagctttagcatttttgctgcgcgaaacaaaaaaaaataccagtattaactattataaacttttttataagaaaaaaaactatataaaaaatgttttataaaaacatattatttaccagtttgaaaacatagtaacaataaacaaggaaaggaagaagggcaactgtttattactacttccgtcccaaaatataagaatttttaaaattggacataattattaagaaaataggtagaattaaatggaggagagattgtgtttagttaagaagtgaaggtagacgagaaaagtgaatgatagagttgtgattagtttggaagaggatgttaggaagaagtcgttatatttttagacaagttctgagtgatagaagttattatattttatgatgaatgaagtatgagatgtagtagagacattgcaggtttacgtttcagtggaagctagcccctgttggcaaaatacttcgacttgtttgacaactcgagcgaagaggattggaagtttacatgaggagattgatggtgagattaagatgtgaatttgatttttaatcccaatatcttgtttagtagatatggtgaaaattgatagggagtttaatttgagattatgtcattaatgaaaaatggatgcttgggatttatttaggcagagtaaaggatgaattccctcttaattaccacctctattcaggtattgaaaaggagggagtctacagagtggcggatctaggaacttttatgagtctggacaagcctaacgatagagaaggacaattaactccatacaaccacgtgcatgatttaggatagatcaagttctaatttatttttttttgaagagaatcgacttctaatttatgaagaagagaagcgatgcgcaaaattatatcgatgaaatgtaactcgttaattgttaatgttgaataactagacagttatatatatagttagtcattttgctactttatgtgctgattaactgatctgacattcattagaactagttaattaaacacgtaatttgctacgggtagtattttactcaattgtatgcgacaggctaaccgagactggctctgccgctggagaaaattgatggtgagattaagaagagaatttaatttttaattctaatatcttgtctactagaggtggtgaaaattgaatgggagtttaatttgagattagattattaatgaaaaaatattattgagatttatttggacaaaataaaggatgaattatctcctaattaccaccccttctcaattctccatcctcattccccgcggcagcggcaggctcaatgccttctcgcatcgattcttgatcccaaggagatggtcaaggggagaagcggcgcttctcgattcgacggcgacgaccttggaggagggaggaacggcggcgcttcttgatccaacggcgacaaggcatggggggagcaggcgcaggagggttacctcttgtcgatcttggcctgacgctgacggcggccatgggtagagccgtagaggtggcctcctgcccgccggacgctgtgctccttctcccccgcatcgaacagtgaactgtgaggtgtccttgttgcctggaatactttggctatttcttattcccttggttccaaccaagaatttgattcacttttttttttttgtgctgctctcggttcgatttgcaggcacaaatgtgagcatcagactggatggccaacatttagggtgactccactccagagcgctgcttgatccatcttctgctttcattgttactatttctttgcttccaaaccacatatgcattcagggtgactgaccgaatccaatgccattgatttcttttgtcctctgtccaccaatcttcgaaattttgtctggctagcagggaaagcgagcaggcaggttcagtggtcagtgcagagagagcaaccctgcagctattgattcagtgcagagagaacccagcaccagttcgcgaaaaaaagaacccagcaccaaagctgcaatgattcagcagctgcagctgttgattcaatgcagagagaatccatcaccacatctgatcgcagaagatgcagatgcggttctgcagacgatcagccgccagcaaaacaaacgccagcgaaggaccagccacatcaagttcaacgatctccaaattgacatgcaacacaacaaaagctgattagaccatgggagaggtgcaaactggtgtgcaacaacaaaaccttattcgaccattgaacaggtgctcgtgtgcggagcgtgcgctgaattctcctgaagtgaaggctaccagcgccgtattggcacatcagggatatcaacttctacaacaaaaactgctcattagttcccagatgcaggggtattccaaaatggcctcttaatttgatccatcttatgtccagtggtgcctcagctaccattctttgggaatggatcttgttaggcaccaaaaactccaatggggaggcaccactttttgtaagcaaaatgttaatatattgtccaactagtaataactataatgataaccccatgataccatgctatggacaacttcatttcaaaaggtaagagtatggaataaagctgagtggtgagttaagtatatggactgaatgggacagctattagtggccccttttcttttttattttaattttcttttttgtccttttggcacaacaatggaacatcctgggtaccttttagtaatttcccagaaggttagctgagcacttgtgcgtggatgcagcgtatggccccaaaagtgagttgagccccttcttctacataaggaaagaactaactgaaatttggggctgtactcttctaaatttcagttagcgctcttcgtttaatttttgggagacgaaatttgtactctatctggaactagcgcatctgcactctctttcctgtgatcctatctaatctctattcatattgatctaacatttttttgaacaaacatgtgattgctttgctcataaaagacatcaagaagagcaagatcaagaagaggagctagctaggtagtctgatcattgggtagaaagatttgtgaaacaaattaaggacccaggtacgtgatccaattatttcccttctttactccagcttggtatgtttggagtatcagatatactacaattgtcagcagaaactgttattttccaattgtagacaaagtctgcatgttgcaatttcttgtgttcttggtcgattttatactgtactagtaagcttagaacaaaatttcaaactgtgcttgctgtcttacatgtttctttcactacgactagtcgaacttccagagaaattatgtgcctatttgagatatagttgtatgaaatacaattatacatttagatgtccaggcagactgcatgttgtagccttttgtgttgctcttcagttttgtactagacaagtaatgttagaacaagatttcaaaattgtgtgttttgtcttgcatgttgctttaaccaaaactagtcgaatttcctgagaaatcatgtgccttcaaccactagatacagtagacccggcataatttgctagactttaaaagcaaattgttttttgaatggtagatagataggtgttaggtttgccttcaaccactagatacagtaaatctagcttttccatgatgcatctctggaactcttaacagtttagcacttatgatcatgcagcagtgctcaatctggctatggacaaggtcgtcggaatattgaggggagtagctggtgttgctgctgacgccaatgcattccgtgaattcttccactgggtcacaccacacgtcttagctgccgtacgttctcaacagcagcagcagctgctgcaactggattcaggagggccagtatcagcatcaactggaaacaacagaacagctccactgcatcagattcaggatgatcttcagaaactcgagcacaacctttgggtgatccaaacaactattacatccacgatgcatgatctcatcgaccgccttgagtggcatagccacagggaaacagaagccaggcaccttcgccagatcaaggatgcagtgtacgatgccgaggacctccttgatgagtacaattactatgctcttaaggtgaaagtggaggcgagcaagaacttggggcaagatcactcacatggacccgttttagagttcttggacagtgtcaacttcaatggcaacttcagcaaagtgatggaaatccaagacagactgaagcatgttttcgaccaatccatgggtttaggcttgcacaaaacacccaagaagtttgatcgattagtcaggccagagacatgccgtgtccttgatgagtcacagatatttggtcgtgagcaagaactgaaggagttgatgcaaatgctaggagtagatggacacaagagaggcaggcctgcagcacacactaacactactgaagcaagaaggatggagttgcctgtgttgccaatagttggcatgggaggtgtcggcaagacaactatggcccaacaaatctgtgaggatccagaggtgcgcaaacattttcatcaccgcataatctggatatgtgtctcagatgaatttgaggtaaacaggttaacaaaagatgctctgaagtctcttggagtcaagtcagaagataccgatacaagggataatcttatggttaatttacgtgatagtgtcaagtcaaagaagtttttgctcgtccttgatgacatgtgggatgatgtcttaaaggatgagaaaggatggagaacatttcatagaactttaagcaatggtcttgatggcagtatgattttggtcaccactagatcttccaaggttgctaacttagtcagcgacggtaatcactatgagctgaaaggattgcaagatggggttttctggaatttcttcaaactatgtgcatttggatctgtccagagttggagcaacaggccagagttgcagcgcattcgtccagaattggagcgcattggtagagctatacttcccaagttgaagggttcacctttggctgccaaaactcttggacgattgttgaaatgcaaccgaagcatagagcactgggaagacatattgaaaagagctgtggcgattagaacaagaggagactgacattttgccggcccttcgactaagctatgcgtacctgccgcagtacatgaaagaatgcttctcaatctgtgctatatatccaaaggatcacatatttcaaaaggaatttttagcagacatttgggtagcacaagggtatgtggagcctcaagatgcatcctcttgctttgatgaccttgtaaaccgatccttctttcagcaagcagcccaccaatatgataatcagtatgtaattcatgatttgctacatgatacagcacaactagtctctaaggatgagcgcttcatcatacaacatgtaagtgacctagctaaaatccctccaaaggtacgtcatctatcaatattcactaatggaaatatcagatgttcagatttactgtatatttgcgcacaaaataaaaaattgcgttccctagtatgcaatgattcttacataaattgggaaccttttgctcccatgattgacggttggttcaatgaacttttgaatatccgtgtattgagttttgatctttcgactgtcagaaagctacctgagagcataggcaactcaatacatttgcgctaccttggtttattaggaaattctacttttgagacccttccttcatctgttagctgcctgtatcatgtccagactataaatgccaagggttgtgttttcaaaagatatcctcaaggttttagtgatcttatttccttaaagaaaattgaatcaaagggcttcatatataataaggataaagataagcaatgcctaaggtggcccataatgcgaacacctgacaggggcgaagccagaacaaggctgagccccccctatgctccaaacctggctctgccactgacacctgaagaacagttacagatgacagaggagcagattgaattgttacctcattggaaccttcagcatttgacaatagagtattacctgggtcaatcttgccccagttggctccggccagactgcctgaaaatgctgacttcacttaaactttcttattgcaagaacattcagagcatatcattctttgacccactctttcctgattcggaagattcaaagaacatttgtcaccttgaggtgttggatatccaacattgtcctaacatcaattggcaaggtttggtggctttaccttcttctcttagaaagattatccttggaaactttggccattcgacggatcactttgtgagttgcttttgtggcctcgctctcctgaaatgtctgcaaatacagtgtgaattcttaatgtctattcccctgcaagtttgtaaaaataatcttcaagccttggaggatttgcatatttatcagtgtagctccctcacatccatctatgtctcagaggcaagcagcaggcaccctgttggagtattttcatccctttcaagtgtcaccatttctctttgcaatgcactgttgagtcttgatgagttcctgatgcctgcttatatgcccgtcgtgaagaccattcttgtggaaagttgtcgacaattagcattactgccgattgatgagcttcatcgcttttcttgcttggaggtgctacgtattgaatcatgtcccaatttgaatacacggaggataatgacattaccatcctctcttcggaagctcagtttactcggttgtccaagcatagagttcatcgacaacagccatctggcgagttctgtgacactcaagggactcaacctgaaacttgttagctgtccagacctcatctctattgttggtgctatatctatctctgaaatacagtcgggttatatacatgattgccccaagctgatggagatgacacagcctttcacaagaggtcgctactggtacgtgctaaggaatcacacttgatagctcttttttttttctgttaaaactggttatcttcatctatcatagagtaatctcattaactttttgataattttttttgtatgaaatatttttaagctcacagcaaattgtcatgctagaagtgctctgcttccatatcataaattgtgttgtacttatttataacatctagagttctagactcgaccaaatctcataattggtattacagttagtcgtattttcatcaactgtggcaaacagaccggtttccgctggctgtcaagtccacaataagccgatactagctttttggagacttcacttttacaatactatgtcgtagaatactaatttgtttagatttagttatgctctaggaaaagaaagctgaaatgaagtacgagttgtactatttatattcattggatttgatagttcattgttgttaatggtttcagatgatttcaagataatgtcgagtgttcaagatgatttcagatgcaaacagcacagaacatgccagcataagttatgttggggatcagggagaatcatctcggcaaactctacatcattcacttatatcataatgtttgaagtttagtaataaactttgttattatatataggagagagccaaaagaaagtgcagactaatcagaccatgggtattggctaggagatgagaatctcaagagctgaatttgtgggtgtacaattgtgtattttactggatgataccccatgcattggtgtggagatttacgtgaaagactattatatatagagggacaaactttataaaaatataacggtatcatgatgaataactttgaatcactctattaaattttgtaggatgcagttttatttcagcccacggtggcttttgttgtgtgttggtcttagtagaattgtatcagggaactatagcctacgtacataaccgaagtatcttaaaactgctgagatgaaatctgtatgcaatggctcatgtattcttgataatgatatggcgtgctttatctaaaggctcctttatagtgttaattgcagttagtggatcagacaattatataggaagaaaggattacggtgttagaaaaaagaactctttatctctgttactgagcaattgatgtggagcacttagaagttggcagtgtagattttgatgtattgcctgtcagagctcgtcagtatgcaaatattagattgaactgaaatttgccaaaagggtttatattaagctgtaaggtgagagacatcagtaaagatggccatcattcatgggctgtggatgataacgaggagcatctggctccttttctgccgatgcgtttgctctacttgttgtcagtgctctattgtcttgaaatggcgtccgttgaaacactaccacatgacaacatcatttagaaatagagtaaatttcaaaataactcaggttgtaaggcatatgcatatgtaaagagacaattgcttatgggactagagagagtacatgacaacaataagcaaaacatacaccctccgttctaacatttatctagattcatctgcataagttattttttattagacgaagggagtgcatgacaacaacatttactcatttagaggttgtgtggccgaaagatttatctatttgtcactataagaaacggtcattctccaaatgctactattaaaattatcattacatttttttacactggagtgaggagaatgttttttttttttgctactttcgcatatatgggtgtgccaacgggggaataagtacactttgactccctcaaatatacaatcaatttaatttctatccctcaatcacaatagcaaatatcttaaacccttacggccttaactattaaaactggtgcaaaataactttctcggtggttataaagttggttttcattggcatgactcgttgatctagtccaatcgctgagtcggcatgtatggacccacatgtcatcatctctctccttcccttcttcctcctccccctctctctcccttctctccatgttcccatccctactccaacagcggcactgccgtgctgtggtgtcaacgacgaggccaccccgtcatcggtttcactttccctggtgccgctgcgcaaggtcgccctagtgaccggcatcacaaggtaggacgggagctacctaatggagcttctgttccggaagggctacgaggtgcgcgcgacggctctaccacatctaacatgacccacacacacaatcatcgatgccacgctagtagatgcacctccactacgccgacatctctaactcctcgtcgctccgttgcgtgcttgatcacatcctcctcgacgaggtctacaacctcaccgcgcagtgccatgtcgcgttgtccttcgaggtgcccgactacaccgccgacgtcacagccacgagcgcgctctgcctcctcgaggccgtccacctcgcccacaagcccattcgctactaccaggcggtcccctccgagatgttcggctccacgccaccactacaaagtgagtcctcccccttccacccatggtcccctacaccgtcgccaattcgccgccctctagtacgccatcaactaccacgaggcttacagcatgtttgcctggcagcagcgtactcttcaaccatgagtcctcacgccatggcgagaacttcagactaacattaccggcgccgtcggccgcatcaaggttggactcaccaaggtcttcctcagcaatctctctgtcaccagggacttgggcttcttcggggactaagtcaaagcaatgtggcatatgttgtagcaggaccagcacagcgactacgtcgtagccaccaaggagtcccacaccgtcaaggaattcctcttggccatcttccccagtagcagctccgtcaggtggctcctgtcatgcctcgtgatgctggtcaccaaggcgaccttccacgatggcaccagggaatgcagcatcaatggctggggtggcctcattgttgtcagcaccaccgttgtccactgttagagtggggtggggacagggagatataagggagagaggggagtagaaagaatggaaaaagagagaaaggatgacatgtgggcccacacatgctgacaacgaatggattaggtcaacaagccacatcaacataaacctcactcaaaaccaccgaggaagtcatttgcaccggttttaatggtcgagggtttaagatatctggtattgcgattgagggataggaattatagaatccagatcctctgacgtagcgcttggacaccgcatcgaacgaaagcgcggagtgtggcagccaaactggctcgcgctcggcccaaatcagcaaaatagcaaaatcggcatcggtcattcgctcccaattcctcaaggccgtcagccggtgaccgctcctcgtcgtctcctccggcccaagcgctggtggagcggatcctgcaggaagcacctcccctcgttgtcagccacctccccgtcaatcgcctcctcgcgcctcttgagagccctgcttcatccgggggatctgcctcgtctgggtctacctcgacgacgatggcttccacggcggagcacttcaccaccacccacatcagagcagtgagaccagtgacaggggtcgcgctgccacgataccacatccgttgctgccatgaccgcagcactgccgccacaacgatgaccaccatcaccacgggcttttggaggaaggcaacagttgcttgagaagcctagttgcgattgtaaattgatgtgaatgcggcaattggatgtcttctttactgattccagactgattaatttgtccaattgagaatgttctattatgcaatttgagatcagtacatacaaacttggcatatatgcatagagacttgcatactacttgcttttgcttgcaaaatggcaaaagatagctgtttgtactccacccgcacctgagccagactggacgggacaacgagcgaccgccggccgatggccacgaggaattaggagagatccaagattttgctggcaaattaaggaaacgagctctttcttctaacggaccgtgctatttcgctgatttgggccgagcacaagccagttttgctggctcactccgtgcgttcgtccaatgcggaatggacgacgtagacgtccatctgacgtcacgagtgatctggatccaaattatactggatgtatatttgagggactcaaaatggacttattctgccaacatgtactgtcaacacaaaaggtccattttgcctcttgtaggtagggatgaaaacggtacggaaacggacggaaaccatctttatcgttttcgttttcatatttttttcggaatcgaaaagcccggatacgaaaatggaatcgaatattatcgaaaccgaaaacggagcgaaaacgaagtggcacaaatacggtaacgaaaatttatcggaatacagaaacccctcaaactgataaatccaattctcaagtctcaacggtcaacaattcatcgtaaaacacaatcatataaatccaattgttaagtctaaacaatatatcacaaaacacaatctatgaaataaattatctatgtttaagagagtaatgttgttgataaatcccaacgcagaaaaaaaatattcttatgtaacttcatatttacataacaaatatttttttaaaaaaaataaaagccaaacaccatcgtattcagtacttaaaaaaagaattcaaagtatttcagtcacaaaatttccggaaattccgagaaaatttctagaaagtttctaactgattccggaaactacccttatcattttcgattccgtttccgagaaaatatttccgaatttgttctatttccgaaaaattccgaccgataaattccattttcgaaaataggtccaaaatacggaaagtttccgtaccgttttcgccactactcgtggcatgttagagaacaagctccatctccacttttcccctctagtactgatgttgttgctgacctgatggctattttttttcttctattttatctctcccatgggagcggcggagcttctcgatccgacggcgacagtcatggggagcagcaggcttcacggccatggctacctcggttggggtggctggctggctccctgcctcgatccctggccgccgggcactgctcctcctcctcggctccccaccacgaacaggactgaggtgtggttgctagctaatgctgcttgaactactttggttttttgtttttgttgtcccccttgttccaaccgaagaaatttgcgttttattggtgttcggttgctccagtgtacaaatccaaccaaatatcattctttgcctctctcgatttgtttccaggcacactggagatggactacgaacatcagactgtatagatgacgtgagagagtcaataatctagacagactgagtattcaaattcgtagtactagaatatatcatatctcttttaaatcctttatatggtcatgttattttctccaataagagttatatgaagattaagatttttgtggcacgtatttcaaactgttaaacggtgcgtaaaaactttctatatgaaaattactctaaaatatgatattaatctatttttcaaatttttagtaattaaaactcaatcaattgtacgctaataccacgttgttttgcgtaaaaaacttaactttcataggaaaaagacaccatctatatatggaacagagggagtatcacattccgtattaaattttttttttatgcgatggagggagttactgattaaccatgtgtcgcattctgccactgacgttagtgatgtgtcggcggcggcgcagtcaccgcgctcatgaactcctcgtcggcgaccagcctcgcgagcgcctccggtgccaggcaaatctccaccgccatgccgccgccgccgcctcgcctctcgtacaccgtaatcttcccgtccatcttattcccggcgccgctccggacgcccaccggcctcccccacccgaagtcgttgccgaacacgtcgaaccgcggcgagcccgagatcaccaccacgccggcgttctgcaggctcgccaccgtcacgaacctcggcgtctccggccacgccggcagcgtgcgcctcacgctcgcctcgtcgcccgcggacgccacggcgcggttcagcagccacgccgcccagccgagccctctctcgaggagctcgccggcggtggccctcgcgacggcgcccaccaccgtgttgcccatgtattcttgtggcacctccttgacccgcgctcgcagtcccacggagaggccgtgcctcgtctccagctccggcgcgaggcggcgggctcggcacacggctcgccagatgtgcgcgaccaccgactggagcgacgatatggcggcgccgccgccgccgccggccatctcggcgttcgccttctccttcagcgtcctcacgctctccgccgagaaatggaggaagcactcctccaccggcgtgtacgcaggccgccggaccatgtcctccagcttggcgaagggtagagggatcggcgccgggatgccgtccacgaaccatctgtcgaacactggcggcggcgtggagagctcgaggtcggcgttatcagcgccgctgcggcggcggttgatctccgaccaggtgcggaacaggtgccagaaggtgaacccgtcggcgacgccgtggttgagcgacatggcgatgaacatgccgtcggcgagctcggtggcctgcgcggccaggacagggcggcggggctccacggcggcgtccgtgccaagcatgccgttgagcgggaagaaggaccacaccacccttgggacgaagagcgagtcggcgatgtcggccacggtgacgccgggcgccacggcgtggacgaactccgccccctcgccattgcagcggagcgagagggagatggtcggacgagcaccaccaggcgacggcggcgtctcggcgacggcgaggcggccggccagcgggtagaagcgggccagcgcgcgggcgaacgacgagacaaggtgttcgacgacgtgctcacctccgccgggaggcttgggcaggacgacgcccttctggacgtagtcgccggtgatcatccggagatccaacggcgtgaggtggtgcaccgtctcgtgctccggcagctcgccggcgtgctccgccgccggccggaccatgcgccgcgacacgatgtggacgccgccttccattctcgactagctctcgagctcagtcgactaatggtgcgtacgtgttcgatgaacaagatcgagttttaggcattgaatatttatatttttttttataaagcatatggcatatcactccgcgaatatacagctttaaatttagctttaacaaacataaccatgtatacggatacttagttagagttttgttacagctggtagaaatccaatttaattatacgtatctgtgaactgatatatctcatattttttataatatattttttatatctagataaaatgcaagaaaacgagaggatgcttgatggggaaaaatccatatacgatgtacagctgtatacgatttgtgtggtttttgaaaaacaaacgagtacattcatgaatgaatgaattgataaagggcatccgaggaagcttacctgactttacacaagaagatccacaaaagagctaactgataaaaataagagaacagtgatgggtctaaatagtagtggtgtcaaaattcctgtatcaaaaacacacgcaattacaaatttaccattggtttgaattccacgttattgcaagactgctattaaaaaattacaaaaataccatagaattatcattcgagtagcattcttacataattgaaaaaaatcacactggtggagaaaccatctttcgtcggtcggccgatt

SEQ ID NO: 4504 - DNA, 785 bp, Oryza sativa
caattggtcttccattgagtagtgagtcgggggctacagatgttatatcatattttttataatatttatcttgattgcttgcgacataatctgagtacaaaagtacctatcgagttatggagttctatcttcctatgctttccgtttggtttgccaatggatggttgcctttgggccgattcctagcacccgggggctcgttggatggaccgagtaacgcaaggtgctaagtattattcggaataaatcaaaagcatagagataagataatttattttctgctcttaataattgcaaaagtacccgagtagtaaactccgatccgtgaaactttgttccattaatgacgaacttatgtcactcatatgcatgtttggaaagtgcttaggccgactcccagtgcttggtggctatgactagtcgggcagagtgtttaaacgtaatgagtcatctgctcggggaaatcaaaattgacaagaggagaaatacatatttataaatattttaaaatacttgattttttctcgagtattatatttatatcagatactactcatcctatatgtttgttctgcaggatccagatccagatatgcataaaagggattcatggctttaagcttatctcttacgctccaggaatggatcagtcagaacatcaccaccggctcgcctcgaccgccgccgactggtgtttccgcctacacggctggcctattatgccgccgttgttgggcgtctacgtcttcaccgaccggcttgccttcgccgccgccgactggtgt

SEQ ID NO: 4505 - DNA, 13092 bp, Oryza sativa
gcatcaaaacagaaaatatttcaggcctttttttttacattatttgaatacaatgatgggcttcacatagaaagttttaaactttaagcaggcatgcatgcattttcaagaaaaacgagctactgtttttcctgtatgctattgtttctccctgaacataaaaaatgtacctgctggaatcaagatctttgccttttattttcagtgtataatgacgattgaggtatcttccgcatatatttggtagctgaaattctagcaggctttcaccattctaatttgtttttgaattcattatgtgttgcagggagtccagcaatactccatcatgcaaagccccagcaaggtttctgaagcctctggctcagcaccccctgccacgtctgtgatcgaaggttgggcagaactcccagagggcctgcttcactccattgttgctctattgggctctttccttgacctccttgccttcactggcacctgccattcttggcgtgctgccttctcatcctacccatcaaaatctaactttcgcaccatactcccacccctcctcgtccgacccaatgtccgcgtcaaagccccttatagcagcaatggtcatcgcaagctacgctcgtgtgaggtcattgatctagccaaccgaaacaccccactccgctgccagattcctcaagaaactctgcagaggatgcattttgcaggttcttcccatggtcagctcatctgctgccgccgtggttattgtcttgttgttgatgtgttcaccggtgctgaggtttcacctccacgccttccattcagtgagaactgtgatgagttctactactgtggcattctgacggctcctatcacgtcacctaactcacatctcattatcagcactcagtcctccctgtttgattggccagttggaagtgactcttggtctgagctcaagctgcccgttaatcgggtcgatcagattgtggaattcaatggtcagctcatcgctgtgattgaatacagtctgtacactttgcagttggcccccattcttcgcttggaaaagataaaaactctctggtgggataacatgaatgaatgtccgtatatgagaccatggtttgtggtttgtggtgacatgcttctcattgttgaccactacataagtttttcatttggagcaccggtcctctacaggccataccgtctggacatgtcgaccaagcctgcaaaatgggtggaggtaaagaagctggagaactgggcactcttcattgggggtgatgcaaggagccctccattttctttcaagaacccggagcgctggggagggaggagcaactgcttgtactatgctcactactctcagccattgagcctgcatgggttgggtgatgatgcagatgctgtgtgggatcctaacactgatgacaacctcgtgttcaaaagaaactggtaccgccagctgcaggccttgtgggtgtacccaagcatgttctattcagcgggagacggccagtgattgctgcacaagagctctgctcttatcatctgattctgagactctcttctgaattctgatgtagggcagagcatcttaatgcttagcttaataatacttgcagtcgttttgtagctcagttgttagctgcattctctagtctaatattttcgaggtgcactggatgcttttgtacctaaactattagtagctgttgcttttatgctggaagtctggattctggaactcgctaccgttgaggatttccactggtgatggagataatgtttcgttttacgagtgtttgagcttagctgctatattttggaacattaatatatattcttgtgtgcacttggcttgtgatttggttctgaatgtaacctatatgttgttcgagcttcccaatataaatggacattcaggcagggagtctaaagctgagtctgaagctggggatgtcgtagatgccatcaatacgagtggtgcgtctttcttgaggaatcttaaggttggatcaaagttgggagcaagtgaatcttgaaacaagctgtgaatgtcacgtccgatgaaaccgctgttaaaaccgctcggtggaagtcatataaaccagtattaggctgtgttcttcaccccttatttcccaactcacctactttttttcacgcgcatatttttcaaactattaaatggtgcgtgttttacaaaagttttctataaaaaagtttctttaaaaaatcatattaatccattttttaagttttggggttaatatttaattaatcacacgttgatgagtcatatcttttttacaaaagttttctataaaaaaagttgctttaaaaaatcatattaatccatttttttaagctttgaggttaatatttagttaatcacacgttgatgagtcatatcgctgaacgtgatcgtggacagccgcatccctggagccaaatcgctgtgctgcatcgacctctccctcacgcgctacaacttgttcaacactacaacaccatgggctcctctgtttatatttcagaggaactccgtgggctttctgagggaacaatgggccgcttttcacaatggaccaccatttgggctgtatctgtaaatgggctgtatatgtataaacagtctattgtacctccccaactatgttcgagtccaactttccctcctgaacaaagacttgtagcttcgatttgattcttacagaattttcaaccaatggatatagtccgttttttaaaaaaaataacaaaaagatagaaccatataaaaaatcgtaaatcgagaaaaaagttataaaatttaattctggtgcatttgtaatcgagtgtaaaagttcgatatacaataatacgaatcttgatgcaagatcctacatatgaaaaagtgaaagatactagcccaaaaatatgtcgcaagtaaaatagcaaaccaaaaaaaaaaaaaactagactcggttattaatactggtttatattgcctccctcgagcggttttaacagcggtttcatccgacatgatactcacagcttgttcaagatgcatgtgtatcatttctcacttgctccaactttgatccaacctttagattacgcaagaaagaggcaccactcatattgatggcatctaggacatccccagcttcagactccctgcctgaatgttcatagagatgaaatgcagcactcaggatgaagctatccggtttcagaagtcgacatgccgtttcgaagaacaagatgccatcatcgacgtaaccgtgatccagatgcatcctcatcatcgtccgacaacatgccaagtcagcaggtatgcctgcctcctccatttggttgtacatcctctgggcttcatcaatctgaccttccttcagaaaggcggaaatgagatggttgaaatgagtgcatgaaggggtcatgttgcttctcagcatcatctggatggcttcctcagctttggagtagcatttaccctcagtgtatgctctgatcaaagcaagatatgtgtgcgaatcaggcacatgattgtttttctgcatttcttggaatataatctctgcctcattgtgcaatcctgaagtggcataggcattgatcatggtgttgaagctgatctgcacattataagttaaggtccaaattacatattctggttaacctcaaggctaagtataccatttcttgctttgccactaacaaaaaggaatacctttccaggcctgataccatcttccttcattctactgaacagtaaggatgcctcatgatgcttccctgcagaaataacaatttagcactgaatagaatgaagagcaaaaaaataactaaaatgtaggatctctctttgatgcttttatcaaagttccttagatctgtgcacaatgcagggaaaatttaaattacctgcttttccatagaaactaagcatgtttgtgtatgttttctcatcaatcggtaagcctagttcctgtgcagcactaaacatttcaacagctttctccagctttcctccttggccataaacactgaatgagaaaaactgaaactaatgacataacgttctcagcaaaaaaacatcaaagggaaaaataaagcccagtttcctggcttgtttttctgaatattatctaccttatcattatattgaatgtctgcatggaccgaggaatgccagaagatatcatgcgatcatatatgctgacagctgagtacagtttgcctgcttggaagctaaagctgttacagttagctctaacaccatgtgatctgaaatgttttcttctctacctaataaaaagacattatccagacctgattcaagcattgacttgataaaagtattatatacaacagtgtcgagctcagcttcatcgtgtaaacagcgatatatgatgttttctgcctcctgaaatttctctggaagtaacatcattacgtcagtgcaaatagaagtaaagtaaaatatatcggtaaaattacagtgcaatattgatgcatagtttttggcctctaaacagccagtcaatcagtcacaaattcatctggagcaatataagttatatagcagccaaagaaagcaaccgtcaaaaaaactcaccttgcttagtcaggtgtgtgacaagtatgcttattgtcacggcatctccattatgaccttgatcgatcaattccatgaaaagacgatatgcctcctcagttttgccacatctgcacaatgcatcaaccattgcattgtagacagatcctcctactggaaacgatgttgatgctgtctcaaacagtttttgtgcttgttccaactgctgggcctggccatattgtacaattaaagtagctattgcagtatcatcaggcttggctcccaattcagtaaggtgttcatagaggaatttggcctcatctgtactccctgcagaagaatccatgtagagccagcagtaagaagcagtatgttcaagcatgaatacaatgttatgtgcggcatctagcctcctcaccttccctagcaaatttcatgatcaattgggacacactggacaagcccccaggtttgtccaacaaggatttcaacatcatactaagtgttgaactatctgttggatttagcacctttgatgagctaccttcattctgaatcacttcagttaaattatccgtatccttatttatactggttttgcaacaaacttccaacacagtcacacatagatcctcatcaaactggagagcttccttcctcattttcagaatgagtgccctggccttgtctagatggccaagcctcatatataacctgagaagatcattacagcaaaacacatcgggcgggccataattggagagagctctgaaagtatcttcagcagcatccacatcttcctttgccacatgacatcggagaagagcactgtaggagaattgtgatggctttacatttctcgccctcatagcatccaaaacttgcaatgctctatcatagttttggacattcatatgaacttgagccattgccacataagtttgctcatcgctcaaaagacctgccttgtcaatctcctcgaacatacgctgcgcgtcctcataaagcccaagcttaccatatatcctaacaagaattccatagataacttcatcaggaacaatcttattctgctccatctcagagaacagcgaaagcgccttcgagtaatcctcattcttgtaatagagtgtcaggacagatgcacatgtgtagttgcttgggacaatactcttaaccttcatctcatcataaagccccaatgcctcttcccctttgccatgcttggcacacaagctgatcagaaggctgtatgtcgcctcctccggcacaaatctgcggcgcttcatctcaccaaatgcatccatggcctcctccaacataccttccttggcatatgacccgatcacaactgtatatgtgaactgatttggggcaacattggcttccagcatctgctcccacaggtggattaccttgccatgtaatttctgcttctgcagagatgagaccatgaaattgaagaccgagatggagggcacaatgtcgcggcggcgcaccgcggcgtagaacatcaacatgtcattgagcttcccccatcttgcgtacgcgcacaggagggttccacatgccactgcgtctggctcgcacccggcctgaagcatctcaagaaatgtcacctcggcgagcttgaccttcccaacctgaccgtacaatctgagaaggattgtgtaggcgacaacgctcggttcgtagcacagctggatggatcaagaaacaaattcatggtgatcagctcataaatcgaggtgaaatcgttaggaattcagaaaaaaaaagaggaaaagattcagtctctttgcttacctgaagcttcatccaggcgaagaaatcgcgggcctggcgccagccgcggagctcgtggagcacgaagcacatctcgcggaaggtgagcttcgcgacgaacgacgccatggcctcgcgcatgtcgccgaaggaggggctggagcaggacgccgtggcgcgccccgcgcggacgccggcgaccacgtggcgaccgtacacgtggccggcgcggtcgtcctcgacgtagcgggccatctggtccggggtgcggcggacccaccggggcgtgtgcgcgccgctcccttgcccccggcgctcgcggcggaggcgctgcgcctcgtcgtggaggaggcgccggtacgggcgctggcgctgggaggaggaggacgacgacgacgtgccggatgagagcgaccatgaggtggcggctccgtcgtcttcgtaggagtaggaggagcaggtgatggatacggcggtggatgcggcggcgccggcgatcgcccccgccattggagggtgaggagcgcgggaaggtgagaggagataaggttagattattagtatttttttttcctttttatcttggctttgggtaactaacagtggggcccacatgtcagaccaatggccagaagaacagatttattatttcatcttagggcgtgttgtaaagtgtttaggggtaatgagtttttgacaatttttcaagggcacaaaggaatgagttaaatattttaaagttaaaaagtcgattgaaaatgttttctaagaaatgctcatcaaggtttttgcaaaacttataccatttaatagctcgggaggaatgtgttcatggtaatcatcatccattaactgaagaaaaaacctttgaatcttatagattttttttgcagtaattaataactggtaaaatgaccaaagaacaatatttatccacaacattgggggtcggagaattaaacaccgaccccccggttgtgtccagaactccaggaaatgattttataagctcacacaacacaacttacacaagtcacaaaacacgcatgataatgattttacaagctaaccatttctcgtcctccactatatttgactggcaaattagtatgaaagtgtattaattaatgatctataaagaacacacaataatcatcatctccatctgacaaactaatacagcaatactactatacaatacaatcagtaacgagatctctgcctgcacagaacgaaatcggttgcaaatcacccaggggaaaaaatactactgaaaaaagaagagcaacaatctccagtttctttctgggcaaaatgtgcatcattcttgtctgatcagacgtgaggagctgagctctgtggtgctgtagaaggactcatctgggtagtacccacccccatccttctcatcctcccatttgagcacctccctgatgaacttgaaggcctcgtcgacggtcagcctgtcgcgggctcgcgcctgccacacgaacagcttgcgatccgtgcaggcggcgtacaactccttgaacttcatcgcgacatagtagaacgcctggtgagccagcgactgattgttgtggtgagtccggagagggcagaagtcgctgaaccactcgcaggtggagagcgggacgcgcccgattttctcctcgaagaggtcgaacttgttgagcacaagaacaaatggcatgtcgcggaaacatggttgcctgggacaagtataggttagtaactttggtcctggaatgagattttactaatttcaggaaagctgtaacattgttcgcattatatataggcaatatggtattcgcaaatatgaaatgtgcaatcttcccaaactattagattcaattgaaacaagctgtaacattgtccattttgtacacaagcaatacggtattcgcaaatatgaagtatgcaatcctcccaaactattactagattcaattggaacaagaccaacctcccttgatctatcacttgtcactttaaatatcttttttctgattatgcgcaattatggaactgttaaagttacaaaactatctggctaatgccaatagtacctgattgtagcctcaaacaagtccctgctttggatcatcttattcacaaggggactgttgccaccacttgaaggggcccccagctggtcatagtcactgagtgctaccgagaatattaccatgctgacatcctcaaacatttccacccacttgcatccctcattcattcccttggcacttactctaatcagctgatatctgaaaaggaataaaagctgatgagacaatagctttccggtacttgcttcgcagggcaaataaataatcaccccaagcaaagagcaggtagcctacctatttcactgaccagtagaaatgcattttaccacaatcgaaagatacattgccaacaatttaatatctaaggctattttatttatagagagctagtaacaaaaaaaatgacggatggaaaaggaaaataaaaggcactgtttagggtatatggatatgtagagatgtgtactattaaaggatttatatgcacttcaggcatgagtcatgaagaaagagtttacttgtttagtgtctgagagtgaggctcatgattgtcagtgtacatttctgacatagggctacggtcatccagagtaaactcaatgaaggctaatccattcccttgtgttactccttcagcatatattatatctttctctgaaggttcatactcattacttgatacttcaatggcctgcaaggatgtcataaaaagacaagtcaatgagggattcaaacacctatagtgtacacaaaaaaaaaaagtaagtgcaggggcacattatgttatgcttggtgccggagtaaggcaaatgattagtggttcaagctgttgtagaatttttaggaacagatatgatataggaatctagagggattcactgacacttataaagttataaccataataggtactggtgtagcacaatgcacaaaggcaggttgtgaataataatgcaagttttcaatgataaattcactctttgtttaatatataagctgagttaaataccctgctcaagaaatattcggcaacatcagggagaaaatgcaattcgtcttttcttttatatgttgcttgtatggcaggatccttccacatttcctcaacaattggagcatattcacgcgtagctgcagggaagaatgcatcgaggtctcccattgctattatatccaaaagccaatccgagaacttcttcagctttgcatttatcgagtatatgcaagaatctgaaccattcgatttatttccatctgcatcaataagaaaaacttaaagatattgcatatagccctgaaaaatagaagtgaagaatatgtgttagctgtggttctaccatgctgcgtattctcatcctctgagcttgggttattcgatccagccaaagcctcttcctcaaaacgctcacggccctcaagaaggatcccaaggtacttgaacatattactttggatcataagtttgatactatcaagttcttcttgggtaaacctagtgtcgtataataactttgcctgttttgagaaaaaaaaacatcatgcaaatgtatacaagataaataatagggctgactcctcaattgtccactggaaactgtgcatccacatatcagaatgaataacttgtgtggtgctccataaaaatttgcaggcatttattggaaaagaaacacaccagagataactaaactacacatgaaaattgatcagtgatagtttgcagaatgtcatgtcacgttgcatatgtgattgtcacctataacagttaacctgcagtcctgtgcttccgaacggcgagaaggtttctatgtcactaaacggagactataaatcaaattcaagctgtatatcatacagggccagtaggtaaaggtagagtccaccctaagagatgtataacaaagtaaaagtttactgcagttttaaatgtcaaatttggtcgtacctgcttgaatatggtgcttgtaccagctccaggcgatccaagaataagaagcttttggattcttttctgatctaagtaatcaggaacagttcttgctgaataaggagcttcgtcctttggttcgtcagagtttgctggaggaaccggtagtgaaaacaaggcacatgcaaaacgtgtcacaggctgcaaataaggacatgcaaaatcatgttaagaaaacaacaagacatgcagtagttttaggaagtacaatgaatgggttagaactcctttttctttacgtgaaacagtaggagaggctcctactgcattaaatattaaaaataagataaattacaaagagggaagggagaatgcactggattatgtacggggagaggggcagcagaggaaaagaaggaaaatagaacacgattataaaagtgagctaatccatgattgccaaagtggttagaactcctttgagcaagatacataccgattcccatatcttccctttgatattgttttgggcttctttcctcatagccaccatcatggtaaacccaaaagtgagtgtcacgggggcactgaacttgtgcaatctacaagaatgattcagatattgaggcaaattcagtgatagtgatagcacaattatagtaccagcaaaaaaaatcgccttattcgtttcctaaaaaccacgcacatagtccttacactctttcttaatctggtgaaattatagtcagactacatgctacattcatcttcatgtgttttgctattaatagaatacaacattgggtataccactcaagtctttcctcttaagatagataacaccaaaattgctgggttcactttaagaccatccaaacttcacaaatctcatcaactactattcccgttacctcacgtccaatctcctaagagagactcaactagatggctgatctggcttggtttgacttcttccaaaccaggacagtagacagaaccgcagaaggaaagtgaggcactagacagaggccaatccttcttacccaaagccaagccacaccagatcagccatctagttcaatagctattagttggtccaacaggtggtaatgatagtggtcaatttacaagagttatgaagtttggacggtattaaagtaaactttattttttgtggtatgtggtatatttctaaagaagaaaatttggatggtatacagtatacacctagtttctcccgtaatattgtcttcttggtttgaacaatcatatgaaattctatgaaaggctgtatgcctataagaaagtgtgtctatgatataacttagacatagtcttaaaaaaatgtgtcatatatattaatattgtttcataatggatatttctgcaattgtacccgctttcaaagatagatgtacaatgatagaacactgataccttcagaactctcagttcaatcttggtaatttcccttccattcatataaacctgagtgttgccattactggcattgggctgaagctttccattaaaggttaggttagtgctgacaaccctgtctggcttttctccttcctatcagcaggaacaaaatgtcattagcaaaagctcagactgcataagaaggtatgctcttctcctaccaacactaacaggcttacctttccccacaagcctgactccttgtcgtaccaatatcttccaggcttgagcttttgaggaggccgttggcaactaagcaagctggccatctcatctggattaagaggaaaaccatttatgatgagttgctcaggccggagctggtttgcttggcattccttctcagctttcagtatttgccttacttccaacgggctgagcagacgtgatagtatcctcgaacccttcccgagcttcgaccgcttgctctcatcgattggctggccaatgcaagtgatgcacttgcgcccttctggcatcgagcccatggccctgagcacgcagtagctgcaaaacctcgcgtcgcaaacaatgcatgattccttgctctcccacttccttttaccgcaacggctgcaggtcctccctctcttctccttcttggtcaccgccacgtactgttccgacacatcatcaaactctttgctctcatacctgctgtcctcagtgaccccaaatgtgacaacctgagctcttcttccctcctgagcagctgtcctaccacctctctgcccatggaaattgtgcgcggattcttgcgacaccgagcatgagtcatcatcatcagagaacccctcattctgcggcgccgaatcgaccgattccgagcttctcctcctcctaccctgtgccgcaaccggcggtggctcggcacggtgagcatcctgcttccggtgcaccggcggcataaacaccggcctgacgaccggagccaccacgccgttgctcctcccgggcaccagcgggccggagacgggctgcgcggtgggaatcgccggcaggtcgacgggatcgatcctggggagctcgtaggaacaccggagggccgtcgtactcgagcgcaatcgaatagtcgaggttggccggcgcctccgggatggtggtccccggtgggagcatcctcctcaccatctcctcccagttgctcccccccacggctcccgctccggccatctccccctccaaaaacctaggtaacctaacctcctcctcctcacctcccaaatcgagtaaacatggagtagtacaat

SEQ ID NO: 4506 - DNA, 627 bp, Oryza sativa
cacaaagcaaggttgtgaataataatgcaagttttcaatgataaattcactctttgtttaatatataagctgagttaaataccctgctcaagaaatattcggcaacatcaggaagaaaatgcaattcgtcttttcttttatatgttgcttgtatggcaggatccttccacatttcctcaacaattggagcatattcacgcgtagctgcagggaagaatgcatcgaggtctcccattgctattatatccaaaagccaatccgagaacttcttcagctttgcatttatcgagtatatgcaagaatctgaaccattcgatttatttccatctgcatcaataagaaaaacttaaagatattgcatatagccctgaaaaatagaagtgaagaatatgtgttagctgtggttctaccatgctgcgtattctcatcctctgagcttgggttattcgatccagccaaagcctcttcctcaaaacgctcacggccctcaagaaggatcccaaggtacttgaacatattactttggatcataagtttgatactatcaagttcttcttgggtaaacctagtgtcgtataataactttgcctgttttgagaaaaaaaaacatcatgcaaatgtatacaa

SEQ ID NO: 4507 - DNA, 1215 bp, Oryza sativa
tgttgttgggcgtctacgtcttcaccgaccggccgcctcgtcagtcaccgactggtgtctccgcctgcacggctggcctattatgccgctgttgttgggcgtctacgacttcaccgccggcttgccttcaccactgccgaccggtgcttccgcctgcacggccggcctattatgccaccgttgttgggtgtctacatcttcaccaccggcttgccttcgtctccgccgactggtgtcaccgcctgcacggctggcctattatgccgctgttgttgggcgtctacgtcttcaccgaccggccgcctcgtccgtcgccgactggtgtctccgcctgcacggctggcctattattccgttgttgttgggcgtctacgacttcaccgccggcttgccttcgccaccgccgactggtgcttccgcctgcacggccggcctattatgccaccgttgttgggcgtctacatcttcaccgttagcttgtcttcgccaccgtcgactggtgcttccgcctgcacggctggcctactatgccgccgttgttgggcgtctacgtcttcaccgagcggccgcctcgtccgccgccgactggtgtctccgcctgcacagctggcctattatgccgctgttgttgggtgtctacgacttcaccgccgacttgccttcgtccgccgactggtgtcaccgcctgcacggctggcctattatgccgctgttgttgggcgtctatgacttcaccgccggcttgccttcgccaccgctgactggtgcttccgcctgcacggccagcctattatgccgccattgttgggcgtctacgacttcaccgccggcttgccttcgtccgccgccgactggtgtctccgcctgcacggctggcctattatgccgccgtcgttagacatctacatcttcaccgaccgaccacctcgtatgacgccaactggtgctatcgtcttcacggctggccacgtcgccgccaccgctaataggcgtcgttatcttcaacacaagttgtctgcgtctgctgccgactggtttcttcacttccatggctgcatgattatgatactattgattggccttatagtcttcaccgccagtcgtcttgtctactgattgactggtgtcctcgcctctacggctggtttataccgctaccactactgatggacgtcatcgtcttcattgctggctgccttgtctgacgccgactgg

SEQ ID NO: 4508 - DNA, 9754 bp, Oryza sativa
  unsure (1)..(9754): unsure at all n locations
ccagccgtgcaggcggaaacaccggtcgacggcggcaaaggcaggccgacggtgaagacgtagacgccctacatcggcggcataataggccagccgtgcaagcgaggacaccagtcagcggtagacgaggcggccggcggtgaagacgtaggcgcccaacaacggcttcataagccgtgcagacgaggacaccagtcagcggcgaacgaggcggtcgacggtgaaagcgaagatgcccaccaacggcggcataaaagaccagccgtgcaggcggaaacaccggtcggcggcggcaaaggcagtgtaacgtcccgccttcccccaggccgggcccgcttatatctgatagctttcataggtcatataacgtcccgccttcccccaggccgggcccgcttatatctgatagctttcataggtcatagactgccctcacagaccaacacatatcttttctgcacactttgtcctcactcatgtgcacccgggttcccggtcggtcacccatcccaaattgctccaggcccagcacgcttaaccctggagttctttggagattggcttccggaaaagaagttgcaacttgttgatatgagtattctattaatcctattaagccctaggccgggatgttacaccctcacccccttaagagagatcgacgcccccgtcgatcaaccctaggccaggaacgtcctctcttggccacgtccatgtgtccagtgccagcgcatgtgccatgctgtgtaaccactccgggtctacaccagccatgcgcaccatgcctgcgcaactgcgacacacgcgcccgtgaaaccgcgagagtcggctctgataccattttgtaacgtcccgccttcccccaggccgggcccgcttatatctgatagctttcataggtcatagactgccctcacagaccaacacatatcttttctgcacactttgtcctcactcatgtgcacccgggttcccggtcggtcacccatcccaaattgctccaggcccagcacgcttaaccctggagttctttggagattggcttccggaaaagaagttgcaactggagttctttggagattggcttccggaaaaaaagttgcaacttgttgatatgagtattctattaatcctattaagccctaggccgggatgttacaggcaggccggcggtgaaagcgaagatgcccaccaacggcagcataataggccagcggtgcaggcggaaacaccggtcggcggcggcaaaggcaggccggcggtgaaaacgtagacgcccaacaacggcggcataataggccagcggtgcaggcggaaacaccgtcggcggcggcaaaggcaggccggcggtgaagacgtagacgcccaacaacgacggcataataggcctgccgtgcaggcgaggacaccagtcggcggcagacggaggcaggccggcggtgaagacgtagacgcccaacaacggcgacataataggccaatcgtgtaagcgaggctgatttgcatgtagattcgtctctctgattttgttgacatgatgggcttggtgcagccaaccggccttagaggtgttgtgtgtggcatgagcgaacgctgcatcatcaacatcagtagtcgagccacgcactatgtcctggcgtacccctctcggcaacatggttacagtaggaagcattgcaccgacggccatacatgcaataaaaaatcatgagaagattaatatgcgttagtaattaatctaaatatataaattacaaggaggtcaggaaccgcagcactgccaaatcccatcactcgttaatgaacgattttttgatctcaattgccatcctgggcatgcgaccaaccatgcatcgctccagtatacatgcaaaataaacaaatataatttgattagccttaaaatattacatgcttaactgtgtaatacatatatcaagctagggtttgatattaagccgtgcatatcagttgatctgcatgtgaagcactcaattgctgttgatcccatggacatgaattgttcccgtgtcgtatgaaggttacgccggtacctatacagatcgtactgggcgacgagaagacacaccgggacttcgtcttgatctcagccggtgcgtgaaaacaagaaaaagaaaggtaataggagattagtctgcagttagagaacaatctaactagtgaaacgacaaagccaatgacattggagattgaatcgatgaaatcaccgagattgatcccttcggctggattgaatccgagatgaaaaagacatgcttgatgaatctggtgatgtcgcacattggttccatcacactcgtgacaggaaactcgatgctcccttacctgacgcgccaactgtcgaaacatgaattcggcaataataaaagggggtagcgcacgagacctaaaagtggatggatgcggagacaaggatttagacaggttcaggccctctcaatgagaggtaataccctactcctgtttggggatttgaatctgccgggtgtagtatagatctgacgatcatacgtgctcatgccccctagagggcctcctgcccaccttatataggatggagggcaggattacaagatagaaaccttaaccaatacggtatcggtttcctaaatctactttacaatcttatcgaaccaggactttaggccgttccgtaatatacaaggaaacgtaatacccaagtcatgatctattacatatttcatagatatatgagttatcccctataactagtcggataaacatgccgtgtgagtatggggtacccataatctacacaggaactttttgtgctggaagtctggaacttggtactgttgaggatttccactggtgatgctagataatgtttcattctgtaagggtttggaacttttgttcttcttcgcagcaatggtttggaacactaatgtaatgcttgtgcactttggcttgtgatttggtgctgctccaaattttcttgcagcacaaataattttggagatattttcttgtactacgatattttctatgtacttctgaatcggaatcacattggtaacttcgatctttaataattttggagtttcaggaagcagaaagaagcctagtgttccggtaatgggctgataaatatattggggcaattgcaaatttgccacaattttaaattgttattgcaaaactaccacattcgaatagcattcttgcaaaatatcataaaaaccagagttgtaagttagattaagaaaaacaatggacaagtttgcaaatgccccaaacgtataagatttacataaaccctgtttacacccaaatttggcacctagagattaaataggagaaattgccaaagtttggaagtctgccggtttcctccgagtagggccggtctgaccgccgtgcgttgggctgtcagactgccggtttcgggccggtcagaccggcggcatgtggccggtctgaccggcaggtccgagtccgactgtgtttcgtcgggtctcaaggtttccttgctcgggaaggcatgtttcgggtttcctttggtttctaccccgagttggacgtggaggagggcctgtagagggcaaaaccaacccctatataagggatatggccagttcaattataactaatcaatctacaatcaatcaatcgaatcgtttttcatattgcttttaattttctcttagtttgtccatctttgtcgatttgcaccgaaaattgtccaccgccgctgcgagagtgcgacacccctttgttggtttatcctgaaaaccttccgttttgcccacgagacgggtagttatctagaaatcggctccgctagccggtttagttatcaaaacccatcttggtctagcttttggctagatcgaggtggttggcaactccaaatcaccgcaaggcgtttaggtgctgcgatcgtgcttgtcgacttttcacaaaaagttgccaacacgaattttggcgactccgctggggaaatccgttcaacgccatctcaacttcgacatcgccatgacgaagcctccatcaaccaaggcggaggtggatccatccaatgtgctgccggtgatgatggagagtcttgatgaggaagcacgcatggccttcgatgaacacatgaagaagtatgccgacgagcttttaaagacatgctcaaagacccgtcatggcgtagtcttcaagccggatttggtgtcttcatctacttttgacaaggtaagtattgaggaattatcacaatctcttcaacaacaagttgctcatacaatagatgcatctatggttgctttcaataacaaattagaagcatcttttgaaaataattgtgaaaagtttatgagaaataaactcggccctctcgtggccgattttgtaatcaaagataaagcctctaccagtgctagccaagctcctatagatcaaataaatagtaaaaccgatggagcgaagacacaacaaatcggcgagggctttccggcgcaaactgctgatcagaccgggccagataaagccactgccggtcagaccggccagatctggccgggtttcaccccggcggtcagaccgggactcaggccggtctcaccgcgcctatggacgccggtcagaccgggctctggaccggtcaaatcggcacaatagtgccgattcaggggatagattcaatgactaatgttagttatttgtattatcttagaacatttggtcctcctgtatctactgctgcaagtaatccccaagttcccccacatgttcctaatgcttataatgatgtttctagggggtatcctcctgatactaggcaaggccaatataatcatattgcgccacaacatcaacctattaggccaccaaatccaccaccaaatcaacataggcctgataatatagagcacttgattagtggaattattagggataaattcaggattgaagctaggaatcgtgctaaggtttaccaaaagccgtatcttgattactatgataatgtgccatatcctcgtaattatagggttcccgaatttaccaaatttagtggtgaggatagtaggactacatgggagcatgtaggtcaatttttagagcaatgtggagaggctaatagtgatacttttaaattgcgcttattttctttgtctttgtccggtactgcttttacatggtttacttctttaccgacaaattctattcatacttaggctcaattagaatagatatttcatgattatttctatactggtgaaattgagcttaggttatctgatttaacatcggttaagcaaaagtataatgaacctatcattgattatgttaagagatttagagatgttagaaaccgatgttatagcttgaacataactgatagagatttggctgatcttgcttttaatggtttaattactcctattaaagagagattagatggccaacaatttattgatgttagtcaactcatgcaaaaggctctggctcaggaaagccgggttaaggataataaaaaatctgttagaccatatgagaaaaagcctaatgttaattcaattgattactttgaggctagtgatagtgatgatgagggtgatcatgacatatatgttgctgagtggacatggactaacaaaaataagccttttgtttgctctaatttaatgccgactcctcgtaaagatcggcaaagtgagattaagtataggtttgatgtggccaaatgtgataagatttttgattatcttttgcaagaaaaacaaattagattacctaaaggccatattgtcagggttatggataccacatacccaatagtagttgactaaatctcggcaggacccaccacataccatgtcttatacggaaactgactttgagttggaggaagttctggataaggaaagacaactagagttctatatggaaacggcaaggactagtcggattgtatccatattggactccctagttctacttggacaaggggacacctatgggtataaatacaagaccccctaggaggagaggggacacgcaacaatagaaggaacaacagaagccaacatacgccaggacaagccgccggatattaacatcagagatatgcctaggaggaccctatctggtacctatggaggccggctgtagggatctagcgttatctctgatctcgccgggcacgagttcgaggaggaagactaccctgttgtcgactacgagttagcacttcagactgccaagtcgacaacagatagataggctaccacaaatattgtactggtgtgattatggtgaataagagcaacgatcggcttcggccaacaggatgtagggttattacctgacaattcaggggcccgaacctgtataaaaatccctgtctatctcttttacctcaatctcgcgtatatcctagtaccaacgatccccatactatgcaaataccggaatcgcgacatcaaacgttgacacatatcataccatctcaagaagaattgaagcgtcgagcttattgtaaatgtcatgattctcattctcattctactaatgattgcaatgtgtttcgacgacaggttcaatcggccatagatgaaggacaattgaagttcactgatggttccaagatgaagcttgatcatgatcctttttcggtgaatacaattaatttcaatgataagaaggtgttgattcggccggagcaagccgaatctactaaaggaaagggagtgatcattggtgaacctaggccaaagatgatagtgccaaagaaactggaggttggtgtatggaaggagaataggagtgaggcttcaacttctaaagcacctaggaagactaaagtgactttggacatgcttttggagaagtatgagaagcaaggtggtgagagaactcgcaacaaaggaaaaagaccaagatcacctcctagggagcgatttggtcattcaccaaaacggtcgcaatcacctccatatcatcattcacaagacatgtcatggggaccttatccaatgccgccaccgggttatccttatccttactacatgccatggggggcaacaccgccaatattcaaccatatgcctccaatgcaattcaactaagggtggggaggaccaaggaggccaattcatgagcgcttgtcttcaccaaataatagccggttttatggaaaaaatcgggttaatgaagaaaagagggaaggaaagcgtgttaaggtggaggcaaggacttcggaggtgattaccatcaaagtgggatctcatgatatgccaataccttctggagatggagttgggaagtcatcaagcaacaaatccgaaattgggaccagctcatcgcagttggccggtctaaccaggccctctggccggtctgaccgtagctctgcggaccggtcagaccgggccatcaggccggtctgaccaccgacccaatgtcggtctgaccggcgcttctagccggtctgaccggtggtctacgtccggtttgaccgggcttcaacgccggtttgacaggaggtttgaaaggagtagtgcaggggcttcattgtcttcaagcaaaatcaatagggggcattatttacctcctggaacagagccgaaacctaggtggatccctaaggatttaacggctactcaaaggagaaggttgcagcatcttcgggcccaagagataagagagaaaaaggccgaagagcaaagagataagaggttcaatgaattgcgaccaccaccttttggaggcataaatccgtagagagggaagaaccggttgttgtagaggagaaagaagaacaatcggttgctaaagatgagtcatctccaaaggaggacatggatatcaacatggtgtgtatgttgcctatggagttttgtgctatggatgaagccgaggttgctcaattttcactaggtcctaaagatgcggtttttgagaagcccgatgaatcaaaccgtcatatgaagcctctctatctcaaaggtcatgttgatgggaagccagtctctaggatgctagtagatggaggtgtcgccgtgaacttaatgccgtattcattattcaagaagttggggcgtgaggataatgaattgaagaagaccaacatggttctcaatggcttcaatggtgaaccaatggaggcgaaaggtatcttttcggtggagctcaccgtgggaaacaacacactaccaaccgctttcttcatagtcgatgtgcaaggtaactacaatgttattttgggtcgttgttggatccatgccaattgttgtgtgccttctaccttgcatcaatgtttgattcaatgggacggcgatgatgttgagattgttaaaacggatacatcggccgaggttgcaatggccgatgctacatttgaatggcgtcatggaatatccaatgcttatcggggagggatctttctactatgatttcattagtatctccgatggcaaatttgtacttatctctgtaaagccggctagtgtagcacggctaggctatataaatttgtataatgagtaaagaagctaatttagagtggttgcaaaagagggtgcaagaatatcggtctacaaagaacgatattggtgaaactattgaagattttgatgaagtagagaagcttggacaagggtttacatcggccgatccattggaggaaatagacataggtgatggaacaaagccaaggccgaattttgtaaacaaaaatatgagagccgattataaggttaaaataatcgagctacttaaggagtatgtggattgctttggatgggagtatcatgagatgccaggtcttagccgtgagtttgttgagcatcggcttccaatcaaaccaggttttaggccttataaacaaccacctcgtcgttttaatctttgctatatgatcgagtcaaagaggagattgatcggttgttgaaggcggggtttattaggccatgtcgttatgcggagtgggtttctagcatagtcctggtggagaagaaggggagtggtaagattagagtttgcatagattttagagatttaaatanagctactcccaaagatgtatatcctatgcctatagccgacatgatgatcaatgatgcctcgggtcataaggtgattagttttttggatggtaatgctggctacaatcaaatctttatggcggaagaagatatgtacaagacggcttttaggtgcccgggatttgttggtttgtttgagtgggttgtcatgacttttagattgaagaataccggtgcactatatcaaagggcaatgaatttgatctttcatgatttgctaggtattatcttagaaatctatattgatgatattgttgtcaaatcggatggtatgaagggacatatagccgatttgaggttagcttttgagaggatgcgccggtatggtttgaagatgaacccacttaaatgtgcttttggtgtgtcggcggggaggttcttgggattcatggtgcatgagagaggggttgagattgatcctaagaagatagaaaagattcgtgatttcaaagcgccgacatgcaagaaggaggtccaaaagttgctaggtaaggtgaattatttaagaagatttatttctaacttagcgggtaaaatcgatgcttttgttcctatactccgcttgaaaaaagaagccgattttacttggggggcaaaacaacaagaggcatttgaagggttgaagaagtatttatctactccacccgttgtgcgggcgcctaaagccggaaagcctt

SEQ ID NO: 4509 - DNA, 51075 bp, Oryza sativa
gccgcgggggcctccgcctggacgacgacgacgacatcgccgacgcggcggaggcggaggcggaggcggcgagcccaagctaggtttagcgatctggtgagaccaaagcgcgcgggcgccggcgcggcgccgccgccacggatgggcgcgcgcctggcggcctggcgggagctggccagccgggaggagcggcggccggcgggaggagcggcgggagcgccggagtcgcgccggcggccggcctgccggctcacgtcacggtcgccgggtcgcggcagcgccgtcgccgtgacgccgtcgagtgggaggggagagagcgcacgggggagacagccagactggagaagagttagggttttctttgttttgatgggccaggcttttttcgtgggctaaaaaaatgaatacttggggttctctgggtcaaattctagggtagtcctgggcctacctagactacccattgggcccgcccctggacggccggacgacgcggcgggacggagagaggacgcggccgcgcgggcgctggcgcggctctgccgccacggatgggcgcgcggctggcggcctggcgggagctggccagcctggaggagcggcgggagcaccggagtcacgccggcggctagcctgacggctcgcgtcgaggtcaccgggtcatgggagcgccgtcgccgtgacgccgtcgagtgggaggggagagagcgcacgggggagacagccagactggagaggagttagggttttctttgttttgatgggctaggcttttttcgtgggccaaaaaaatgaatacctggggttctctgggccaaattctagggaggcatataattatgctagtcaagatcaaatcagtacagggagatatgaacgcagaaaggcactcaccgtggtggaacttgtgaccgcatcgctgccatatgggttctactgacacataggcgctaccatggcatgccacattagcacacggagtgagttggagcccatttagacctatatgacacccaagataagttaaggggcccaaaagtgcattctgagagttcagggacctaggtgacacacccgcacaagtttagggaccgctcgtgcactttactctattctgaaatatacaggacattatatccatagcaagtgtaaattatcattggttccatgaataattgtgtttactgcattagtttttttttctaaacatgtaaattataacagcaccatattctttgttcttatccattgcagcatatgtgttgcttggattaacaaaagacagatcgatatttgagttgctctaaagggtagattagttgaactcaattattatagggccaccaaaaaattcggccgcacagagcaaatgttagaccacaaagccgttacaaatttgtcctaacctaatcagaacagaaggcacaagcaaagccccagaggagccgtaactgatttagccacaccagaggaagcaggagtcacgggggcgagctcgccgggatccctacgaagcccgcggagcagcctctcctcctcctagaagtgtggtgatattgccaattgaggttcctgagaaattattgcttgtcaagctggctgaaattattttgaacagatataattagacagggttgtatatatgcatgcaattctaatacgaaatatcagagactattcttgaaaagaatgtgaagaaaatgaactgaattactcagattctgtggatagtttaattaaacacgcaatatctttctttcagttaattctgacttcatgcgttcttaataggaaaatcattcacactgcaagttaaactaaaggaagcaatgaattgtccgatcatgttggcagtccattatttctccgccgtgttcagcacacatcacgtgcaggaggaggagactggaccccaagccaacacagtacacgtgaaccctttgtagatcaagaaccagattacattgaaattgaatactcctaaaaaaaccattgttggatctaataacagtgccaaattaatactcctaaaaaaaccattgttcgatctaatacattgtcataagaatatacattatattatgcttcatttggttaaacacacaaccgaactactgatgtttgagagacaataaaaccgaagtacctgatatcttatcacctaccattttcttagtgagaaaaatgactcgaagttcaacaggacactacaaagtatgcgaaccatacaccaccgtaggcgggggattgagataagacctgaggggagtagcctcgccgtagacctcagtagtgtcaacgcagaccgagcagcaaattgagcactggaccactgtcactgacgcgaggtcatccccggcgaggcagctgcgcgtggcggggatagggcatcaaagagggtggaggcaatcgacggcggcggtgatggcgaggcgaagggcgatgcgcggaggcgcgggctgcgtcggcgcggagacgcgggcggcgttggcagagaggtgaagggcgtcggcggcagcgcgtgagaggggaagaggagggattagggttgggggagggggcgcaggtcaccaggtcgggctgtcagggtggggagggaggtggggtgaatccggagcgttggatcagagtgaggtaatctggaccgttgagtgaggaatgaaagaatgagtgatgagtgaatgagtgaaagaatttgcccttgttgaactatagggtagatatttgttgaactttagggtagacgtgtcacgctatatgagtgtactgccgatttttcataactttcatatacctaaatcaaatggttgagacgattattagtaaaagtttagtaataaaaaaaattagtccgtgtagcagtgctcagtaaatgaatgcaaactgtgaaagccgtggaaggggtcgttctccggcgatggctccggcgacggctctggctccggcggcttgtccttgtccttgatgagctccgccgtgcgctgcgcggccacgctgagcatgttctccacgtccatcgagctggcctccagcctgagcatgtccgtctcctcctcatcgtcgctggactcgccatcatctaatacctcctcttccttgccttcagcttcgtcgccggcggcgtgcttggcgcagtactcgaccatctcggcgaggggtttggcggcggcgcagccgtcctcgatcagttgccgcagttcccgcaacagactcgccgccctctctgccattgatgatatctccccgtcggagctcatcatcttgttgatatcttcttccgccattgatgacgacaactgtccagcgagctagcgaccggtttgcacggagaaatcaattagtaatatgctttgtcgatcatctattttattagtatatattaattaattgcatgaaaccgatctaatccgagtctaatttcaacttattacgaaatcgtaaaccaactgttgcgatgaatccgtttctgaaacatgcacacgcgtgcagttgagtggatttgctctgatccagaggggtttgttggcaacttttcgtaaaaagtcgacaagcacgatcgcagcaactaaacgacttgcggtgatatggagtcgccaaccacctcgatctagccaaaagctagaccaagatgggttttgataactaaatcggctagcggagccgatttctagataactacccgtctcgtgggcaaaacggaaggttttcaggacaaacctataaaggggtgtcgcactctcgcagcggcggcggacgatttacagcgcaaattgacaaagatggataaactaagagaaaattaaaagcaatatgaaaaacgattcgattgattgattgtagattgattagttacaattgaaccggccatgtcccttatataggggttggtcttgccctctacaggccctcctccacgtccaactcggggtagaaatcaaatgaaacccgaaacatgccttcccgagcaaggaaacctcgagacccgacgaaacacagtcggactcggacctgccggtcagaccggccacatgccgccggtctgaccagccctaaaccggcggtctgaccgcccaacgcacggcggtcagactggccctactcggaggaaaccggcagacttccaaattttggcaattttttctatttaatctctaggtgccaaatttgggtgtaaacacatgccccccctaccttttttatgaacaacgtgaatccaaaagcatagaacatgtttttggtcttagggcgataatccaattactggccatagcacctcctaagcgtcttgccaaacgctcgggaagtatttcttcaagtatttcccgttgattgctcgctgaaaaggctccccttgaagtgtctccaaaaaatatgcgttccctcgaacaatgccgcatattcgataaggaccttccctactaggagaccacttaccgaatttccaaaaaatatgccgcatattcgataaggatgccgatacaaatttccagtatcttttggtttgaacccaacctgctccctcattacatcggcaatcatatcagcccatgatgtttgctgaggtactccttgtgtttgttgctgcattagctcaaactgattgaactgaggagcaaactgaggttgaggcgatcctgcctgctgatactaaacatgaggtgacagaggctgatattgataattcaaatttcttccttgatagttctagaagttcggttgaatattacgtaccaaatgttcagggataatctgaggcacaactgattgatcggcctgtacatgatggaccaagtgttcaggaataacttggttcacagtatgctgcattggccgattgtcaggtgttctcaatctcgctgacgcatgttgtaagttttgctgctgagtcggatgaactgtctgctacctcggctgtgcttgctgagtcggcaacggctgtgttgggtcggctattgtcggatttggcaagaacattgcagcaacttgctcctgagtcagccgattgacattttgcccagcatgttgtggttgttctctggtcaacaatctggggttaaccatctgtcttggtgctgattgtcacgcccagaaatttagcccaaatttccagactattttgtgtattaaatccctgtccaggaccagccagggtacacaaaacgacaagtaatatacagttccaaacgtaaataaagcgtaaaatacttacagaagaggcacttagtcctcacaccgaaacaaaagcagcagcagcggaaaaaggcgatcctagcggggcttcagctccactccacaggcaaaactcaactggggtctgagccttggtcttccaacttcgtcttcagctcagaagcactacacttctgaaaagggggaataatagcaaggctgagtacaaccaccgtactcagcaagccacaccaacgatgcggacgtgcaaggggatacaaggaggggtttgtggctatttgcataaaggcggttgtaaaacattttatttagcaaacagtaaaactgttgaataattaaagtgacattaaaatctccactgatcaacgctacaccacgttgaacaggcccaaccaacccacctgtactacagtgcattgggtcgatttattaagtgtgagactaatcacggtgaatctggtcgatcgcccataaccgcgggcacggctattcgaatagttttactctggccagaggtgcacaactgtacccacaagacacaacccaccgacatgtcaccgcgtcatcatgtgcccatgatgcacacgtcaccgtgtcgagtgattgtgacgagacccttcgcataaccctcccctaaccatccacaccacgctaaggtttcacccccacccctcaaaaggcagtgggcggtcccctcttgcgccgcggtgaatccggcagctggacaaccggacaccccggccgacccaactccatcacgcccaccctcgccaccggtgcctaggaaagggtcgagctatacttcagatcaagcagttacccactcccgcttgtggtaagcactgtaagtcttccagggtttctcgtgaaccggtccttaattgccatgggtgcgactcgcaaaaccatgcacccacagcccaccattcagtcgtattttagttggataattacgaccatgaaacatggccagacgtctcgagcacgcagctcaacaagatactagaatgtctaatactgcaattatcccatcgactgagctagtggtaattaagcatggctaagcatatagttctagctaggtcacataagtaacacgagctagtcaatttatcacccaaggttgacaaaggatagatatcaagtaaacatggcacaagcgagcagataggtaaaccctgaccccgtgtaattagcaaaacatgcatatttatttgtaaacggtaaaacatttataaattaggatcaacatgctcaaggggaatgtgtgacttgccttgcttcttcacttggatcttctaaactcttttcctcgcgaccgcggacttccgaaacgacggattctacacgctggcacgcaaaacgaggaaaaactctaataaaaaccaaggaaacagtacataaaaactaaacaaacatgtagagctcaattttagatgaattttgcaagttgaatggctcaattcggaattcgaatgaattagatatgaattttggaagttttgagccattttaatggatttctagaattattaccgatttattgcgcaatttaaatcaattatgacgtcatccgacgggggagaggtggcgccggcaagcgggccccacctgtcggtgactcacgggtggcgggcacaccgtggaccgagtccacgcacgcgctggtccgcgggcgcaccacgtggcagacacctggcggccacgacggacggctagcggaggtggcgccgacgtggcgccacagaggcaccgactcgggcggcacgggagggccacgtggacggcccagatcgccccgaagggggatcgggcggccacgggcgagcgggagccggctgaccgatcggccggccgggagcgacggcgcacggcccgatggtcgccggcgacgaccaccggcgcgacagcacgcgcgggaggcgacgaaaagaggggaaagggagaggagatggagggggtcctcaccgaggggcgccggcgacggaaggcggccggcggagctcgggcggaggatggcgtcgctgctccggcgacaagcggcgcccgggaggaagcggacgagggcggccgcgacctcgcgtggcgggaacgggcatcggcgacggggagctcggatgaggggaacgccgggcttcctatcgacgctgcgatgccactggaggaggacgtgaggccggaaatggtttggagcggcggcgagtggcagccggaggcggctgctatgatggcggttcgggtggtgtggtggagtgacggttccagcggcggaatggaggagcggaggggatgccggggtacgggacgacgcaacgaagccgtcggtgacagttgcgcggagcagcgacggcgggagtgacggtggcggccggctggagggcgctggcgggcggcggggctcgggcgcgcggtgcagtggtgtttcggaggcggagaggggaaaaggagtaggggccggggtgcggcacggcacggcgatgccaatgatggtggcggcgcagcgcgggggcgactggagcggcggtggcgtgcggctggaagcacggcgacgagcggcggagctcgggttcacgcggggagagcgggagaaggcgcgacgggcccgggaaaattggggaaatgggagaggagagcacagggatcgtttttatagcctcgagagggtgggagagagcacgagcgaggtggatttggggcggcaaccggcgggaagcggggtgtcgacgtggagctcgtggcggggcaaaccggcgccgttttcttggggggaaatgggggaaacggtggaggaggtggtgggggtgcagttccaccacttgggcgcgagcgggaggggcggggtggtgcggattttgcggcggagtgggcggcaaccgccgggaagcgtgggcggcatcgtggggtgtgggtggcggttttggaggggagagatgggggaaaacggcgcggacgtgggcggcgaggtcccacggacgaacgcgcgcgcgcggggtggaggaggtgggcggaaacggcagcgtcgtggggcggctcgggcggccatggcggcaacggcagctgccggcctgaggttggggatgacaggtggggtccacgggtcccacctgtcggagagagagggagggagaggccggctggggaggcaaaacagacttgagggagagagagagccgagcgggccgagggaggaggccggcccgagagggagagaaaggaggggttgggccgaaaggggcccaaagagaggaaagaggattttaattgttttctttttattttaattgatacaatgatctttgtgttattaaaattatttcttgagctccgaaaattcacggaaaattccggagagtattttagggcacaaaggatattacaaaatattcccggccaatgatttttaagggaaaattttaattctcccaataattcacttgattaagttgatttaacttttatttaatttctagaaaatgcattatttaatgatttttaatcccgaacgaaaatcggggcgttacactgatgatgtagcttgtgcagaagttgaagctgaagccatcggctgagccggtaatgcatgggagacattcgactgatttgctgtgaccaatggtctataatttggaaaaacacctcctggtaaatagactggtcctgaagcttgatgttcggctatcgaaccatcgacaacagtctttaccatattggttaaggtattaactaatactccagactgattgatcaaggcatgttgcacggcatagtcgatcctatcttgaaaattattgaattgcagtggctcttggttgccatctgcaccaaggtcttcaactgtaccatcttgaggaatatcacttttgttacctgagccagttgcagtacctttgtcaccctgagatgaacttgggctgacctcatcggctgcgaccaccttcaacttgtacttttgtacgatggttcctctgcgggtctcctgaaaagaatccatgaatttgttcttcacgttgctcatcatctgttcaagttcatccctttgctcagctgtcagcctatccaatgtgattggaacaatattggttgggtccacttcagctgatggatttttggcccccattttatttacgggaggtttgactcctgttcccggtgatggtggtggtttttcggccatcgggatgaagtcgttgaaaactcaggtcccaccgggcgtgccaagagagtgttgatgtaaaaacacgaggcctgggagatctgcttaactctagtgcaggtccaaaatcttgcctttgaggttcatgagcatgccagttgatttgatcctgcaatcaacaagaaataaagacaaagaaatagtagttagtccataaatgatagccgatcgaccagccgccgatgacgtatcatttgtactcgagccgatgtcatctttgcatcgatcggctgtgcgaggcaataataaagaaactaaatctattcaatcggctgtagatatcaatgataaataatcttcatgtcgatatatacttaaatcaagtaattgggatagatcggtcgccatgccgagacagtataaatcacttagaccgaaatatatattaacaaggaaactataatcattcacagcatagctgatcaaatagatctagcttgtatcggctaatactccgatactactctaccttaagatattaaagcaagtaaaatatatcaaacgtaaagtttaacacacctaaaagcaataagatcttaacataaagggcagatttaacatatcaattaagcacatgaaatataaggctaaattaggtaagatcggctgaaaccccgatactactctaatcgacaaccaagaagcaggctagagattatagttctaagcacgacttatgagatcaaactcaactgatgcagccataagtatgaaaagaaagacaatatttaggcaatcaagctattggaagcttcataaagtggtagatatcctatataatctaagccaacgtcgatacttaacctaatcggctgctctccagcgatagacactagccgattggaggttagatagcgatattgtcagagattatataagatatatgataactcaacaacttacatagataggattagagtatcataatgatggaagcaccaatctcgagaacgcaagccaccataacaagtcatacctctagttgaagatcgaaaccgatgcagttcaacccgaaagcaagaactcgtcgaaacaaaacgaaagtaaaagggtggcgatgcgccaagattgtatttgaacgtgtgttaattgattacatgggactcggggtctatttatacccgagactacaaaatatgtcctttgtcggacacgactattatctctaacaaactctaagataccataagtctttgcagcagacttttgcccaaacttatctctaaggaaattacataaaatatcctaattaatagatacaattgccttcttagaactctatccatgtgtggcaatccatgtgaagcacattaactcagctcgataatgtaaaccgattcatattgtcggaatcggctgtatcggctaaccctatctgacttggactcagccgatctggtcgtagccgatctggactcttctgttccctgggcacaaatgtccgaattcacagctaattcggtctttgaatcaattgcggcgtgccccccatcgctctgtccagaatcggtcagaccagccatacaagaccgatcagaccgcccggggtggctggtcagactggtggcatgtggccgatcaaaccgcccctgctcaccggtcagaccggccgtgcaacgccggtcagaccgcccctggtctccagttttgccaattttgcacaaaggtttaaaaatcaagcaccggctcttctagtatcagaaataatcccttcttcacattatagccagatgcttgttgtgccaaatcatttgctctagaattatcgaaattagcaataatgtccaagcatgaatcaagatacctatttagtgatccgtccaaacatttgtagattccggcgacttgttgcaccaccaattccgaatcaccaaaagcttccacgtgcttagctccaatcatctccatcacttgtaagccgaataataaagcattatattcggcttgattatttgtacaataatactccaaatgaaccgatgcctcataacacatgccattaggtgaaaataaaactacttctataccttgaccttctttgcatgaagaaccatcaaaataaatcttctaaggtataacttcaactaagcaaaccccttcttcataagcaatatctacatgatggtctactataaaatcacatacaatttggcctctcatagatttcaacggttcataatccaaatcatactcaatcaaagcatatgcccacttgccaattcttccacttagaattggccattgcaacatgtgtttaataatgtcggcttgacaagcaactatgcatgtactagataacaagtaatgcctcaatttggtacaagcatagtataagtatagacaaagtctctctataaagacatacctcgtttcggcatccaaaagatggcagctgaaatatgtaatgatatactccttgccatcttcctcttgcggcaaaacagcaccaatgactttatcctcggaagcaatatacaaccaaaaaggctttccggctttaggcgcccgcacaacgggtggagtagataaatacttcttcaacccttcaaatgcctcttgttgttttgccccccaagtaaaatcggcttcttttttcaagcggagtataggaacaaaagcatcgattttacccgctaagttagaaataaatcttcttaaataattcaccttacctagcaacttttggacctccttcttgcatgtcggcgctttgaaatcacgaatcttttctatcttcttaggatcaatctcaacccctctctcatgcaccatgaatcccaagaacctccccgccgacacaccaaaagcacatttaagtgggttcatcttcaaaccataccggcgcatcctctcaaaagctaacctcaaatcggctatatgtcccttcataccatccgatttgacaacaatatcatcaatatagatttctaagataatacctagcaaatcatgaaagatcaaattcattgccctttgatatagtgcaccggtattcttcaatctaaaagtcatgacaacccactcaaacaaaccaacaaatcccgggcacctaaaagccgtcttgtacatatcttcttccgccataaagatttgattgtagccagcattaccatccaaaaaactaatcaccttatgacccgaggcatcattgatcatcatgtcggctataggcataggatatacatctttgggagtagctttatttaaatctctaaaatctatgcaaactctaatcttaccactccccttcttctccaccaggactatgctagaaacccactccgcataacgacatggcctaataaaccccgccttcaacaaccgatcaatctcctctttgactcgatcatatagcaaagattaaaacgacgaggtggttgtttataaggcctaaaacctggtttgattggaagccgatgctcaacaaactcacggctaagacctggcatctcatgatactcccatccaaagcaatccacatactccttaagtagctcgattattttaaccttataatcggctctcatatttttgtttacaaaattcggccttggctttgttccatcacctatgtctatttcctccaatggatcggccgatgtaaacccttgtccaagcttctctacttcatcaaaatcttcaatagtttcaccaatatcgttctttgtagaccgatattcttgcaccctcttttgcaaccactctaaattagcttctttactcattatacaaatttatatagcctagccgtgctacactagccggctttacagagataagtacaaatttgccatcggagatactaatgaaatcatagctagaaagatccctccccgataagcattggatattcccatgacgccattcaaatgtagcatcggccattgcaacctcggccgatgtatccgttttaacaatctcaacatcatcgccgtcccattgaatcaaacattgatgcaaggtagaaggcacacaacaattggcatggatccaacaacgacccaaaataacattgtagttaccttgcacatcgactatgaagaaagcggttggtagtgtgttgtttcccacggtgagctccaccgaaaagatacctttcgcctccattggttcaccattgaagccattgagaaccatgttggtcttcttcaattcattatcctcacgccccaacttcttgaataatgaatacggcattaagttcacggcgacacctccatctactagcatcctagagactggcttcccatcaacatgacctttgagatagagaggcttcatatgacggtttgattcatcgggcttctcaaaaaccgcatctttaggacctagtgaaaattgagcaacctcggcttcatccatagcacaaaactccataggcaacatacacaccatgttgatatccatgtcctcctttggagatgactcatctttagcaaccgattgttcttctttctcctctacaacaaccggttcttccctctctacggatttatgcctccaaaaggtggtggtcgcaattcattgaacctcttatctctttgctcttcggcctttttctctcttatctcttgggcccgaagatgctgcaaccttctcctttgagtagccgttaaatccttagggatccacctaggtttcggctctgttccaggaggtaaataatgccccctattgattttgcttgaagacaatgaagcccctgcactactcctttcaaacctcctgtcaaaccggcgttgaagcccggtcaaaccggacgtagaccaccggtcagaccggctagaagcgccggtcagaccgacattgggtcggtggtcagaccggcctgatggcccggtctgaccggtccgcagagctacggtcagaccggccagagggcctggttagaccggccaactgcgatgagctggtcccaatttcggatttgttgcttgatgacttcccaactccatctccagaaggtattggcatatcatgagatcccactttgatggtaatcacctccgaagtccttgcctccaccttaacacgctttccttccctcttttcttcattaacccgattttttccataaaaccggctattatttggtgaagacaagcgctcatgaattggcctccttggtcctccccacccttagttgaattgcattggaggcatatggttgaatattggcggtgttgccccccatggcatgtagtaaggataaggataacccggtggcggcattggataaggtccccatgacatgtcttgtgaatgatgatatggaggtgattgcgaccgttttggtgaatgaccaaatcgctccctaggaggtgatcttggtctttttcctttgttgcgagttctctcaccaccttgcttctcatacttctccaaaagcatgtccaaagtcactttagtcttcctaggtgctttagaagttgaagcctcactcctattctccttccatacaccaacctccagtttctttggcactatcatctttggcctaggttcaccaatgatcactccctttcctttagtagattcggcttgctccggccgaatcaacaccttcttatcattgaaattaattgtattcaccgaaaaaggatcatgatcaagcttcatcttggaaccatcagtgaacttcaattgtccttcatctatggccgattgaacctgtcgtcgaaacacattgcaatcattagtagaatgagaatgagaatcatgacatttacaataagctcgacgcttcaattcttcttgagatggtatgatatgtgtcaacgtttgatgtcgcgattccggtatttgcatagtatggggatcgttggtactaggatatacgcgagattgaggtaaaagagatagacagggatttttatacaggttcgggcccctgaattgtcaggtaataaccctacatcctgttggccgaagccgatcgttgctcttattcaccataatcacaccagtacaatatttgtggtagcctatctatctgttgtcgacttggcagtctgaagtgctaactcgtagtcgacaacagggtagtcttcctcctcgaactcgtgcccggcgagatcagagataacgctagatccctacagccggcctccataggtaccagatagggtcctcctaggcatatctctgatgttaatatccggcggcttgtcctggcgtatgttggcttctgttgttccttctattgttgcgtgtcccctctcctcctagggggtcttgtatttatacccataggtgtccccttgtccaagtagaactagggagtccaatatggatacaatccgactagtccttgccgtttccatatagaactctagttgtctttccttatccagaacttcctccaactcaaagtcagtttccgtataagacatggtatgtggtgggtcctgccgagatttagtcaactactattgggtatgtggtatccataaccctgacaatatggcctttaggtaatctaatttgtttttcttgcaaaagataatcaaaaatcttatcacatttggccacatcaaacctatacttaatctcactttgccgatctttacgaggagtcggcattaaattagagcaaacaaaaggcttatttttgttagtccatgtccactcagcaacatatatgtcatgatcaccctcatcatcactatcactagcctcaaagtaatcaattgaattaacattaggctttttctcatatggtctaacagattttttattatccttaacccggctttcctgagccagagccttttgcatgagttgactaacatcaataaattgttggccatctaatctctctttaataggagtaattaaaccattaaaagcaagatcagccaaatctctatcagttatgttcaagctataacatcggtttctaacatctctaaatctcttaacataatcaatgataggttcattatacttttgcttaaccgatgttaaatcagataacctaagctcaatttcaccagtatagaaataatcatgaaatatctattctaattgagcctaagtatgaatagaatttgtcggtaaagaagtaaaccatgtaaaagcagtaccggacaaagacaaagaaaataagcgcaatttaaaagtatcactattagcctctccacattgctctaaaaattgacctacatgctcccatgtagtcctactatcctcaccactaaatttggtaaattcgggaaccctataattacgaggatatggcacattatcatagtaatcaagatacggcttttggtaaaccttagcacgattcctagcttcaatcctgaatttatccctaataattccactaatcaagtgctctatattatcaggcctatgttgatttggtggtggatttggtggcctaataggttgatgttgtggcgcaatatgattatattggccttgcctagtatcaggaggataccccctagaaacatcattataagcattaggaacatgtgggggaacttggggattacttgcagcagtagatacaggaggaccaaatgttctaagataatacaaataactaacattagtcattgaatctatcccctgaatcggcactattgtgccgatttgaccggtccagagcccggtctgaccggcgtccataggcgcggtgagaccggcctgagtcccggtctgaccgccggggtgaaacccggccagatctggccggtctgaccggcagtggctttatctggcccggtctgatcagcagtttgcgccggaaagccctcgccgatttgttgtgtcttcgctccatcggttttactatttatttgatctataggagcttggctagcactggtagaggctttatctttgattacaaaatcggccacgagagggccgagtttatttctcataaacttttcacaattattttcaaaagatgcttctaatttgttattgaaagcaaccatagatgcatctattgtatgagcaacttgttgttgaagagattgtgataattcctcaatacttaccttgtcaaaagtagatgaagacaccaaatccggcttgaagactacgccatgacgggtctttgagcatgtctttaaaagctcgtcggcatacttcttcatgtgttcatcgaaggccatgcgtgcttcctcatcaagactctccatcatcaccggcagcacattggatggatccacctccgccttggttgatggaggcttcgtcatggcgatgtcgaagttgagatggcgttgaacggatttccccagcggagtcgccaaaattcgtgttggcaactttttgtgaaaagtcgacaagcacgatcgcagcacctaaacgccttgcggtgatttggagttgccaaccacctcgatctagccaaaagctagaccaagatgggttttgataactaaaccggctagcggagccgatttctagataactacccgtctcgtgggcaaaacggaaggttttcaggataaaccaacaaaggggtgtcgcactctcgcagcggcggtggacaattttcggtgcaaatcgacaaagatggacaaactaagagaaaattaaaagcaatatgaaaaacgattcgattgattgattgtagattgattagttataattgaactggccatatcccttatataggggttggttttgccctctacaggccctcctccacgtccaactcggggtagaaaccaaaggaaacccgaaacatgccttcccgagcaaggaaaccttgagacccgacgaaacacagtcggactcggacctgccggtcagaccggccacatgccgccggtctgaccggcccgaaaccggcagtctgacagcccaacgcacggcggtcagaccggccctactcggaggaaaccggcagacttccaaactttggcaatttctcctatttaatctctaggtgccaaatttgggtgtaaacagggtttatgtaaatcttatacgtttggggcatttgcaaacttgtccattgtttttcttaatctaacttacaactctggtttttatgatattttgcaagaatgctattcgaatgtggtagttttgcaataacaatttaaaattgtggcaaatttgcaattgccccaatatatttatcagcccattaccggaacactaggcttctttctgcttcctgaaactccaaaattattaaagatcgaagttaccaatgtgattccgattcagaagtacatagaaaatatcgtagtacaagaaaatatctccaaaattatttgtgctgcaagaaaatttggagcagcaccaaatcacaagccaaagtgcacaagcattacattagtgttccaaaccattgctgcgaagaagaacaaaagttccaaacccttacagaatgaaacattatctagcatcaccagtggaaatcctcaacagtaccaagttccagacttccagcacaaaaagttcctgtgtagattatgggtaccccatactcacacggcatgtttatccgactagttataggggataactcatatatctatgaaatatgtaatagatcatgacttgggtattacgtttccttgtatattacggaacggcctaaagtcctggttcgataagattgtaaagtagatttaggaaaccgataccgtattggttaaggtttctatcttgtaatcctgccctccatcctatataaggtgggcaggaggccctctagggggcatgagcacgtatgatcgtcagatctatactacacccggcagattcaaatccccaaacaggagtagggtattacctctcattgagagggcctgaacctgtctaaatccttgtctccgcatccatccacttttaggtctcgtgcgctacccccttttattattgccgaattcatgtttcgacagttggcgcgtcaggtaagggagcatcgagtttcctgtcacgagtgtgatggaaccaatgtgcgacatcaccagattcatcaagcatgtctttttcatctcggattcaatccagccgaagggatcaatctcggtgatttcatcgattcaatctccaatgtcattggctttgtcgtttcactagttagattgttctctaactgcagactaatctcctattacctttctttttcttgttttcacgcaccggctgagatcaagacgaagtcccggtgtgtcttctcgtcgcccagtacgatctgtataggtaccggcgtaaccttcatacgacacgggaacaattcatgtccatgggatcaacagcaattgagtgcttcacatgcagatcaactgatatgcacggcttaatatcaaaccctagcttgatatatgtattacacagttaagcatgtaatattttaaggctaatcaaattatatttgtttattttgcatgtatactggagcgatgcatggttggtcgcatgcccaggatggcaattgagatcaaaaaatcgttcattaacgagtgatgggatttggcagtgctgcggttcctgacctccttgtaatttatatatttagattaattactaacgcatattaatcttctcatgattttttattgcatgtatggccgtcggtgcaatgcttcctactgtaaccatgttgccgagaggggtacgccaggacatagtgcgtggctcgactactgatgttgatgatgcagcgttcgctcatgccacacacaacacctctaaggccggttggctgcaccaagcccatcatgtcaacaaaatcagagagacgaatctacatgcaaatcagcctcgcttacacgattggcctattatgtcgccgttgttgggcgtctacgtcttcaccgccggcctgcctccgtctgccgccgactggtgtcctcgcctgcacggcaggcctattatgccgtcgttgttgggcgtctacgtcttcaccgccggcctgcctttgccgccgccgaccggtgtttccgcctgcaccgctggcctattatgccgccgttgttgggcgtctacgttttcaccgccggcctgcctttgccgccgccgaccggtgtttccgcctgcaccgctggcctattatgccgccgttgttgggcgtctacgtcttcaccgccggcctacctttgccaccgccgaccggtgtttccgcctgcaccgctggcctattatgccgccgttgttgggcgtctacgtcttcaccgccggcctgcctttgccgccgccgaccggtgtttccgcctgcacggctggcctattatgctgccgttggtgggcatcttcgctttcaccgccggcctgcctgtaacatcccggcctagggcttaataggattaatagaatactcatatcaacaagttgcaactttttttccggaagccaatctccaaagaactccagttgcaacttcttttccggaagccaatctccaaagaactccagggttaagcgtgctgggcctggagcaatttgggatgggtgaccgaccgggaacccgggtgcacatgagtgaggacaaagtgtgcagaaaagatatgtgttggtctgtgagggcagtctatgacctatgaaagctatcagatataagcgggcccggcctgggggaaggcgggacgttacaaaatggtatcagagccgactctcgcggtttcacgggcgcgtgtgtcgcagttgcgcaggcatggtgcgcatggctggtgtagacccggagtggttacacagcatggcacatgcgctggcactggacacatggacgtggccaagagaggacgttcctggcctagggttgatcgacgggggcgtcgatctctcttaagggggtgagggtgtaacatcccggcctagggcttaataggattaatagaatactcatatcaacaagttgcaacttcttttccggaagccaatctccaaagaactccagggttaagcgtgctgggcctggagcaatttgggatgggtgaccgaccgggaacccgggtgcacatgagtgaggacaaagtgtgcagaaaagatatgtgttggtctgtgagggcagtctatgacctatgaaagctatcagatataagcgggcccggcctgggggaaggcgggacgttatatgacctatgaaagctatcagatataagcgggcccggcctgggggaaggcgggacgttacactgcctttgccgccgccgaccggtgtttccgcctgcacggctggtcttttatgccgccgttggtgggcatcttcgctttcaccgtcgaccgcctcgttcgccgctgactggtgtcctcgtctgcacggcttatgaagccgttgttgggcgcctacgtcttcaccgccggccgcctcgtctaccgctgactggtgtcctcgcttgcacggctggcctattatgccgccgttgttgggcgtctacgtcttcaccgtcggcctgcctttgccgccgccgaccggtgtttccgcctgcacggctggcctattacgccgccgttggtgggcatcttcgctttcaccgtcgacaacctcgttcgccgctgactggtgtcctcgcctgcacagctagcctattatgccgccgttgttgggcgtctacgtcttcacctccggcctgcctccgtctgctgccgactggtgtcctcgcctgcacggctggcctattatgccgccgttgttgggcgtctacgtcatcacggccggcctgcctttgccgccgccgaccggtgtttccgcctgcaccgctggcctattatgccgctgttgttaggtgtctacgtctttcaccgccggcctgcctttgccgccgtcgaccggtgtttccccctgcacggctggcctattatgccaccgttggtgggcatcttcgctttcaccgtcgaccgcctcattcgccgctgactggtgtcctcgcctgcacggctggcctattatgaagccgttgttgggcgcctacgtcttcaccgaccggctgcctcgtccaccgccgactggtgtctccgcctgcacggctggcctattatgccaccgttgttgggtgtctacatcttcaccgccggctgccttcgtctccgccgactggtgtcaccgcctgcatggctagcctattatgccgctgttgttgggcgtctacgtcttcaccgaccggccgcctcgtccgccgccgactggtgtctccgcttgcacggctggcctattatgccgctgttgttgggcgtctacgacttcaccgctggcttgccttcgccaccgctgactggtgcttccgcctgcacggccagcctattatgccgccattgttgggcgtctacgacttcaccgccggcttgccttcgtccgccgccgactggtgtctccgcctgcacggctggcctattatgccgccgtcgttagacatctacatcttcaccgaccgaccacctcgtatgacgccaactggtgctatcgtcttcacggctggccacgtcgccgccaccgctaataggcgtcgttatcttcaacacaagttgtctgcgtctgctgccgactggtttcttcacttccatggctgcatgattatgatactattgattggccttatagtcttcaccgccagtcgtcttgtctactgattgactggtgtcctcgcctctacggctggtttataccgctaccactactgatggacgtcatcgtcttcattgctggctgccttgtctgacgccgactggtttgttcgcctccacagctacatgtcttcgtcaacattgactggtgtcatcgtcatcaccagtttgcctttgccgccgcccatggcgtcttcactttcatggctggcctattttgccgcggttaaagaacgtctttgttttcatcatcactctacttcttcgagcaacttcatctttattatcttcggcaccggcaaactctattgcctttacttcgcaagctttgctacttcgccgaccacgacgtctacaagagcctcaacatctcggcatgcgtcaacaagtataatgccgtgttattttactataacaagtggtgttccaatattcaagatttttactcggacatcttctatgcgtatcttcactcaagcaatgactactcgacgacaagaagctacaattctcgactctatgttcagttgtttctcaactaaccaaagagtcgggggctacacaaatacaagactctcaaaattcgacaagctttatgtcaagatgaagcaatcaatcaatcagccaacgagttctatggaatctacttcgggagtcatcagtttggtcttcacttcagagcagacgttctacttcagcaactcttattattacaccggcaattttggcttcttcacgccgccacaatctgctccaaatttttccaagtatcaaagtttgagattctatctacatgtccgggagtttagagttatcaaccaatcagctcagttttgatgagttggataacagtatttacttttcttcaagtgaagcatctgcaacagctacaactccaagttctactaccatctttacaaatcaaggggtgttgcatcaatcttcgttatgcacacatcaagaaaattacttgagctttgatatcttcttaacagtttgatggattattgtcactgacttcatcaccagcacctctacttcatcggccctgacatctctgtcgttgctaatggatgactacgtcttagcctccggttgcttccgtcattgctggcttgttatttcgccttcacggttgacctactatgcaaacgctgatgagcgtcttagtcattatcattggttgctacactgctattgactggattaccgacatcgtcatcttcatcaatatcctgtcaagcctcttcaacatagcctattctactgctgtttgatgggcaacttcgtcatcatagtcgatcatctttgttgctgctaatcattattactgtcggttgcgtttgtcgtcgccgactattttcttcatcttcatgattggtggatttcgtcatcgcctttgatgcgtgtctacatcttcaccctcggcttgctttcgtcaccaccgaccgatatcctcgccttcacggatgacttattatgtcaccgctaatgggcatcttcatcttcttcaccagctgcctcgtctgtcaccgactgattattttgctgccatggctatgcaactttatcgctgggcgccttcatattcattgctggctgacctgactgctatcgactagtttattcgcctccacggctgtgcaacttcatcacttttgattggtatcattatcttcactaccaccaatattttctatgctcaaagactggactatttattattccccgtaagggttatcaaccgaatacttacgccagtcgggattcaattattatatctatttgggagtatcccataagggataatcactcagatcataagctattcatatgagctacacttggtctatatcacccgaaagatttattactcgggagcatgttacatgcgtcatcctttaaaggatgtcgaaggcatattttttggcctaggcctaatatgtctgcagcccatattttcaggtgtgacctgtcacgttcttttagggacttaggcactttttgcttaggccaaagtgcgcgtgatcaagtgcccaataccttaaaatctttttataccatagttactcaactttttaggagttggtacaatgcattttaaaaggtgcccaacagtgaagttttttatagctaccccgctgacttttttatatagtcaaggcgctatttgggtttatcaagcaattgattggatacaatatcattgctttttgccacgtaagtgtgcatttttattgaccaatattatggcttaggctgattatatattgtggtcattttccaggcggttggtaaatccttatgagtttatttactcggatgttacaccacatatgccgtatatttccaggtgtggtgaaaccatgtgtcttttaaggacttaagcacatctgttaaagcagtgtgcgcatggtgtatgcccaatactttggaaatttctttattcactgcattcaagcttttttatagctgttttgctaagtgaattttcaatgatgtagtcaactttagattgctcgcatcaatttttacaaagcagtcggtatatcacttggatcatgttatttggggattcataccgcatatgctatatattgatatcaagtcacttggttaactataatgatcaaaaaccactcagttggttggattatttattccctgactgtatgcttggtttattcaattaaccacatagtcggggctacacctattaggtgcatctagtcgatgcacctgactttgtttttcagccctccacggtcttctgattcggtaaaagtactcgggagatcatagcgaagatgattgaagcactcggctttggaataatctagttcgtgagaagattatcttttcgactgcgaaggtcttaggggctactgtggagattatgggtaccccatacccacacggcatggttatccgactagttataggagataactcatatctatgaaatatgtaacatatcatgacttgggtattacgtttccttgtatattacggaacggtctaaagtcctggtttgataagattgtaaagtagatttagtaaaccgataccgtattggttaaggtttctatcttataatcctgccctccatcctatataaggtgggcaggaggccctctagggggcatgagcacatatgatcgtcagatctatactacacccggcggattcaaattcccaaacaggagtagggtattacctctcattgagagggcctcaacttgtctaaatccttgtctccgtatccatccacttttaggtctcgtgcactaccccttttattattgccgaattcatgtttcgacagttccagacttacattatatagctgacaatgttatgtgacgcatgagttgcacaatatatatatatctttaggctaaattgtactatgaatgttgttgagagttgtttcatgattgacttcgttagcggaacgccttggcattgcaatttactttaccttctcttagcgatcaagaaggcgcatgatagataggttaacactagtttccagaaccgaaaatcggacgatcatttaatcatgtcttttgctttagtaatggtttactaactcactgaaattttattagtaaactcttactaacactaacactaatgtgtcatgtgtgagtacatccctggaatcctgaatgaagaagcgtcggcttgcatcaaccagtgatctatctatcatcttcgttttgttgtcatcaagtttttagccatactgcttgtgtgatttaactacggtttattgactcggcataaatggattcctcatgaaagcattgttccctgaaaatttgccttcttttttatactggtcaggaaggcacgtttatctgctgagcgatattattttccaaaacctgataaacctaaaaaaactggcgacacatttagcaaatccgttgcaaaatactataaatcattaatcaggattcaaaatcttttacaaggaataaaaaaatctattgctaattactctgaataataatgtctttaactaataataaataaacaaggaaaaggctatacgtattaacattttcttactaaaactgacgtgtcacgctatgagtgtacgttgattttttataactttcatataactaaattaaatggttgagatgattgttaatactccctccttccataaatgtttgacaccgttgacttttttaaacatatttgaccattcgtcttgttcaaaaaattttgtgaaatatgtaaaactatatatatacataaaagtatatttaataatgaatcaaatgataggaaaataattaataattacttaaatttttttaataagacgaacggtcaaacatgtttaaaaaaatcaacggcgtcaagcattttgggatggagtaagaaaattattttgggatggagagagtaagaaaatttagtctgtgtagcagtgctaaattaaactagcctcgtagtcacgctttgcgtgacttttaatctgtttaagaacttttctatatggtctattagtttaggtaagctttgaagaaggctttgatataataagttaattttattttacaaagtattgatttccaagttgtactatatggttataataagagaaatcactagaaacctcatctttcttctctctttatccccactcatttttatcatgtgtctagaggaggtaacagaaacctccggaaatttccatatgtttagcccatttatgttttttttaatacatgtatccgtttgatccaatggctatagtttacccaaaccctttatctgatggctattatatttgtgatgatgtggcgcattctcgtgtaatatagcttgctgcttttactatatatactatataataagatggttgagatgattgttaataagaaaatttagtctgtgtagcagtgctcaataaatgaatgtatactgtgaaagccgtggaaggggacgttctccggcgacggctccggcggcttgtcctagtccttgatgagctccgccgtgcgctgagcatgttctccacgcccatcaagctggcctccagcctgagtatgtccgtctcctcctcgtcgctggactcgccgtctaatacttcctcttccttaccttgagcttcgccggcggcgtgcttggcgcagtactcgaccatctcagcgaggggtttggcggcggcgcagccgtcctcgatcagttgccgcaacaggctcgccgccctctccgccattgatgatatctccccgtcggagctcatcatcttgttgatatcttcttccgccattgatgacgacaactgtccagcgagctagcgaccggtttgcacggagaaatcaattaattgcatgaaaccgatctaatccgagtctaatttcaatgcgaactgttgcgatgaatccgtttctgaaacatgcacacgcgtgcagttgagtggatttgatctttcttttttttttgcggggagtggatttgatctgatcgagaggggtttatgtaaatcttatacgtttggggcatttgcaaacttgtccattgtttttcttaatctaacttaagactctggtttttatgatattttgcaagaatgctattcgaatgtagttttgcaataacaatttaaaactgtggtaaatttgtaattgccccaatatgtttatcaacccattaccggaacactaggcttctttctgcttcctgaaactccaaaattacagatcaaagttaccaatgtgattccgattcagaagtacatagaaaatatcccagtacaagaaaatctatttgtcctgcaagaaaatttggagcagcaccaaatcacaagacaaagtgcacaagcattacattagtgttccaaaccattgctgtgaagaagaacaaaagttccaaacccttacagaacgaaacattacctaccatcaccagtggaaaagcaacaactagttaactacacttgcatccagtgcagtcacaccctactatcagatggtaatgcagctaataactgaactacaaaacgactgcaagtgttaaactagacataaagaccaccatgaggatctcctagatttctaggccaagttgcacaagtctctgctctacatcacaagggggcaatttcagaagaagctaataagagcagagcactcgtgcgtgtgccaatcactggccgtctccgtctgaatagaacatgcttggatacacccagaaggcctgcagctgactgtaccagtttcttttgaacacaaggttatcatcagtggtaggatcccacacagcatctgcatcatcacccaacccatgaaggctccatggctgggagtagtgagcatagtacaagcagttgctcctccctccccagcgctccgggttcttgaaagcaaacggcgggcttctcgcatcacccccgataaagagtgcccagttctccagcttctttacctccacccattttgcaggcttggctgacatgtccaggcggtacggtctgtagttgactggtgctccaaatgacaaagttatgtagtggtcaacaatgagaagcatgccatcgcaaaccactagccatggtctcaaatatggacattcactcatgtcatcccaccacagggttttcatcttcttcaggcgaagcttgggggccaactgcaaagtgtacagcttgtattcaatcacggcgatgagctgaccattgaattccacaatctgatcgacccgattaacaggaagcttgagctcagaccaggagtcacttccaaccggccaatcgaacagagatgaccggttgctgataaggagatgtgagttgggtgacgtgataggagccgtcagagtgccacaaaagtagatctcctcatggtccttgctgaatggaagacgtggtggtgaaacctcagcaccggtgaacacatcaacaacgagacagtaaccactgcggcagcatatgagttgaccatgagaagagcctgcaaaaagcatcttctgcagagtttctcgaggaatctggcagcggagcggggtgtttcggttggctagatcaatgacctgacatgagcgtagtagcttgtgaggaccattgctggtagaagggatacaaggggatttgacgcggacattgggtcggacgaggagtggtgggagtaaggtgcgaaaggcagattttgatgggtatgatgagaaggcagcacgccaagaatggcaggtgccagcaaaggcgagaatgtcgacgaaggagcccaacagaggaacaatggagtgaagcagttcttcttggaacctttgcgcacagacgtggcagggggcattgagccagaggcatcagagatcttgctggggctttgcatgatggcagattgccgaactccctgcaacacataacgaatttgatcacaagttagaaggatgaaactgactaatctggaagcctgctagaatttcagctaccaaatacatgcagaagacatctaaggctctgttcgaaagagcaggttgggaacgtttggctctggcacgaaaaacggaacgatccattagcgcgtgattaattaagtattagctaatttttttttcaaaaatgaaacaatatgatttttttaaacaactttcgtataaaaactttttacaaaaaacgcatcaaaatagtagtttgaaaaacgtgcgcgcggaaatcgagaaggagaggttgagaaccatcacaaacgaactgagcctaaatcgtcattatacaatgggaaagaagatttcaattcaaccaggtgcatttttatgttcagggagatacaaatatacaatatcatagaggaaaagggctagtttttttctctaatcgaaatgttttcctgcatagtacagttttgagcttttctatggagcacttcagtactgtgtaatcaaataacgcgcataaaaatgatctgagtgtatttttgcgtactgattcctctctccatttgtacatcaatcaactcatgcttggcttccaaatttctattaaaaaaatcaacaccgctcatccaaagagtactatttttctattaaaaaaatcaaccccaaaagtagaagaggcacgttgatttacatgacacgattgataaacccacctaatcaaccatatcaatctagggttgttactttgttagcaagcacatctaacaacaaaaatccagtggaaattccaaccctagcgaacgcgcccgtttcttggttagggttggatgacacaagagatcgagaaatttatcaagaaaaaaaaaagaggaacagggtttaggcgcgagaaggcgggagggtagagagagcgcagaccttgtggaggaggtccgatctccggcgacggggaggacgacgatgccgccggcgacctctccggcgatgtcggtttgccctctctctccccttctcctgctcgtcttatggccttcaacgtgggccagtttggtctctccatgtgggccgaaaattatgggcccaactcaatatttgggccggactgcgaagttctacgggcctgcggattatttgggcctcccatgggccatggatcatggcctcgccgacgcatccatatccgccgcttcttcgcttcgcctcgcctcggaggctcggacgcgccgccgccggttgcccggtctcctcgccggccggcggatccggtgaagctacggattagtgagtggtaggagcagcagcggccatggacgggagccgccaggagatgccgccgccaacggagctgagcgctctcggccacaggtaatttggtttccgttcttgcttcaattttgcttagttttgtagatttctagttgattataggtatatagttccaagaagtttatggtacctgacattcttgtatggtagcatttgacactgaatcactgatggctgaagctgcgttggctgccaaaggaaccaaccagatctattaataaattattaatcaaatgcactatcttttttccagataaatagggtgtattgccgcatattcatactgtcaaaataaacattttcattaattttgggagggtggaatacgaagtaccattttgtcttattttgaagggaagggaggaaaaaaacaaaaataggtttggcacaatataaacagattattacaattgtggtattgttcaagatatcaaagctgtaggtggttctggcgtatattgttttggttggcatctaggacgttgatgcacatcttattctgggaatcgttagttcgttacagacttacagttcaatgaaatggtcagttttatttgcctcaatgtgtcataactcataagggtcactgtaatgactcaagaagctgtaggtgaagttactgctttatattgcttcactgaaacaacacagttggatcaatatcactccactctatctctcaatctttactagtaggaagtagtaattttatcttcgaatgttttctctgctccagtaatctctgaatttttctttgtttgacagggaagttgctgctgcagaaaggccctttaagaaaacctgccactcatcagtgcctacatcttctaccttgtgtgaaccccatgtttggccaggtctcctggaaagcctccttcaccaaatcattgctttgcttagctcattccaggacttgcttgcttttagtgccacctgccactcttggcgagctgcgctatcttcctttccatccgtatatactttcaacttcccacctctctgcctcaaactaaatacacctaatatccgtccccttcgcgtccttttgaaggacaatcttttatcttactgcaaatggcagcttgatgatccatccaagagaaacatatcccttcgttgttcagctccgccagatgctccaaatcgcatgcgctatttgggctgctcatatggatatctcatcttctcctatcatgagaagaactgcctctttgttgatgcttacactagcactaagctgaagtctcccaaactcaacttcatgggcgacagggatatctactacggcatccttacggctccacttaattcacccaactcacatctgatactttgttcgaggtcttccatattctattggcaggttggaacaaactcttggacaaagcacggttatggcggtgagcacattcttcagattgtgctcttcaaaggtgagatttttgcgatggatgttcttggcaggcttcacaccatgcaatttgcacctgagctcagcatacaggaagtagcggttctgcgacgagaagaaatggttacaggcccacgttctgggccatggctggtggcctgtggtgaaatgcttctcatggttgatttgtcaacagaccgcgaccaattgcctcgcacctttcaagtctttcgtcttgagttttctgctgaaacagttgagtgtgtgaagatggaaaggttggaaaatcaggctctctttgtcaaccttgatgggagggaccctacattctcttgcacgagccctgaaagatggggcggaaagagtaactggatttatgttgcgaaaccatctggagattctggtgaaccttggactgcggtcgagctcggtcagccagttcctagtagaatagaccgcgtcccagactttcaagtagacaacatgtgggtggtacccagtttgatttatgatgtcaaccaatgatgttctcatcaagttttagccagcgttgcacaagccatatccgtacttgctagtgtgatttaatggtttcttgacctgtggcatatgtatggattcttgtaagagtacactgaagttgtatctgtagtatgagaaatgcaggttcttgcatgtactgtgcagggttggtctatgttctgtgaccatgtgaatgctgccttaatattatattatcgttggttaatggttatgttgtgtgacgccggagggatgtcgctgagagttgtttcatgaatgattatgccctttttcttttacatactgatcaaggatcatgtccataaaatttctcctgatgttgctacaccagcctgctgagtgcagtgtactgaaacatatgttccctgcattactgaagcatcatatatatgcaaccaagacgattaattaaggtgaattagattgtttatgattgttctctggggaataatggccatgtctcagatatcttggcgccaaaacatgcacatgttaaattgaacaatattgcaaaaatgtaactaatcaaatcgattaggactcgagaacatttcaattacaaaagatactaccaataattaagcaaaagcataaacaaaaaaaatctattattactaattattattactacgcctaacaaattattatgatttactgtaaggcccacgcgttctccttgatgatctcctcctcctccggcgtgaagtcgttggcgatcttgaaggtgtccctgatctcctccggcgacttgcccctgatcagctccgccgttcgctggacggccagctccaggacaccctccacgcccatcaagttccccgccatcagcaggtggtacagcgtgtccgtgtccacgtcgatcaactcctcgtcgaacctcttcagctccgccgccgccgtgctgcggccttcgacggcggcgtgcttggtgcagtactcgatgatcttggagagggatgccggcgccgccgtcggcgcagccgtcctcgatcatgtggaggagagtatccgcgacatgctcgccgccgcctccgtcatctcgaaggtctccccgtcggagctcatcaccttgatcatcttcttcttcttcttctcttctgccgccgccatagatgacattaactgtcaagcaagctagcaaccgatttgcacggagaaattgttcgaaagtcctactgagctattgatcgctagcggcgatcgttttttttttcttttcctcttttattaagtttatacacctaaattttacacatctaaagtttgtatagcgaatatttataagtcaaaagtttatatatccaattaaaatttgaatttgaattcaatatttttatatataatatttctatacataaatttttctaactttatttttttaaaaaaatttatggtgtagtagaaagagaagaaggggaggcgagctcgccgccccaaccgccgagcgctgccgccgccgcagctgactcgacgccactccgccccaaccgccgagcgccaccaccccgccgagtgccggcggcgccactgtgcgcccccgccgccccaactcgacggccccactgcacgatctgtggcgctgtggctacacaaacatcactgtgttagtagctttgcatgcatcgctagatgctaccatgccgatgaatcttgtcactcactcaccatgctgctgctaaagctaaaaagcttagctagctatggaacatggaaaacatggcatgttcttgtgaaggattactacgtttccatgccatgtgctgcctaatagctggggcggctggaggtgctgccgcacagtgccggcgggggtggtggggcggcgctcggtggtggcgcagggcagcgggtcggtggtgacgcgacgccgaagaagcgcgtggcggcggcggtggcgctacgcctggagggagcgaatcgatccagacccagagtatctttctttgatctgacaggtgggcccaggggtaaaaatgtccacaaatcttgaaaatatatacaaataaaattaagaaaagaaaattacagtaaagatagataaaaagatagataaaagtggtaccaaataaactaattagcagtcctaatgacatattataaagggcatacggattgggtggtaaaaaaattgaggcacgcgaatttgatggtaaatagtctaaattctcgaggggatcgatcgcccattagccgtccccgaaattgttattgaagaagctgatcgatcgatcgatctcagacctggattaattgccaatgatcagtaggtgatctgtgcttatctatttatttgcatgaattgaatcgaatcgaatccgagtctaatatctcaactgctattccgaaacgattgctttgcttgttaaatcgaaacggaatccaaatgtacgttaagatgaattcgtttccttgtgtaaattcgaagagaagaatgggtgtttcttcataaatctggatcgcttatcaccttgttaatttgttaccgactcaactgcgaccgtcagatgagaggcgtgcggttcggattggagcgcaaagaactgaagaaaaaaatctaccctcttctcggccgccttattatttatccaaaaatgctaatctctgatacattcggttggtgaagagggccagattatttaatttctttatctaaaatgcttaatatctgatcaaacttccacacgcgccagggaagatcttcttggggtttataatgttggaaatatctttcagtaaattaccattcaatttaatccaataataaataatgtataaaccatgatgattataacatagaccattggcaaattgctcttgatactaatagagataaacaaaatagacatacaacagttgtaaaccatagaaacaagcatgtccagctcatttcccccataaaaatagaatcatcagacaagaacagaataaaatagcacatagtgatacagctttagttgcggaacagaagcacagttgccagaagcaaaaaaacatttgcatttttgtcagcgtagtgaaagaaaggcagcgacttatatggatatttattactgaagcataataatgccttataatggaaccaagacgatttattagaactgaattccctctagtagttcctacagagacaattaagtgtattagattttttttccttatactccctccgtttcgaaatgtttgacgccgttgactttttaagcacatgttttatcgttcgtcttattaaaaaatttaagtaattattaattcttttcctatcatttgatttattgctaaatatatttttatgtaggcatataattttacatatttcacaaaagtttttgaataagacgaacggtcaaatatgtgttaaaaagtcaacaatgtcaaatatttcaaaacggagggagtatatgtgattgttctatgggggatatataatggccatatattgatatcttggcgccaaaaacatcaagagctacatttcccatcggatacgggtagtggtgttcccacgttcgattacccggggtcacatgactccgaataatttattcaatcctaactaaaataatttattcgatcggcaccgtaaaatatcgatacgaaggcgaagaagctgtccgatctctataacctatgttaatttggtgattgattgccgatcagatgctacgtgcgcatccttttttttccatgaattcaatcgaatatcgagtctaagtacattgcaaatacaaattaggacaaggtaattaagcaatggcaatgcatgcgagtgataaattgcacaaaatcaattactaattacttctgaataataactactaactccatcccaaaatacttgtccctttaagtttttttttaacttttgatgattcgtcttattcaaaaaattatagaattattatctattttatttgtgattttctttattatcaaaagcactttaagtatggcttattttttttatatatttgcaccaatttttcaaataagacaaatggtcaaatgtcgcaagaaaaaagtcaaagcgaccattattttgggacggaggtattaactctactatagtttgtgaattgtatgatgtactgccttcatcctaaaatataataatgttggctataaatttgaacaaatacatgtctaaattcataattataaatatttatattttaggatgaagagtgtagtaatacgtagttagtaagtactactaaaaggcagggttcaatcttttgttttcggcgtttctagcaaagggtgtctatataccgaaatttccaaaagttcgaacaaaatttggtcaaatttgaataaaatattaccaaatctctactattataaaaattgaaaatgtttttgccaatattttagtacgtcatccgtgtttgagtcggttttcaaattcgttcacttttgaaaatacatatttgtgtttgagtcggattttaaacttgtttgcttttgaaaatataaaaggagtcgtataagaaatattttttaaaaaaatttacatactaacttgagattaatgtcagactcctaatgattaatgtcagactcctaattacagctcatgattttctaaaaaaaatatccaagcgaatttccacagtgaatttcacgctagccaaaccataacaataataagattaaaatatcattcacctgttgtaacgcacggacatcttttttagtacataaagagaaagaaaaaaaattaaaatttcggccgaaataatatcatatcggaggggtcccctccgataaaactggaatttcgttccacaattttaaaccctgatagcctagaaggcccattcatactccttgcggatctgctcctcctcctccggcgtgtggtcgttcttgatcccgaacatctccctgatctgctccggcgacttgcccttgatcagctccgccgtgcgctgcgccgccaggctgagaaggccctccacgcccatgaagttggccgccatgatcaggtcgtacagcatgtcgatgcccacctccatgaactccacgtcgaacttcttcagctcctccttcgccttgcggctgctgctgctaccttcggcggcggcgatggcgtgcttggtgcagtactcgatgaccttggcgagggcgctgccggcgacgttggggagagtgatcccggcgccgccgtcgccggtgcagccgtcctcgatcatgtggaggagtatccgcgacatgctcgccgccgcctccgtcatctcgaaggcctccccgtcggagctgatcaccttgatcatcttcttgttcttctcttctgccgccgccgccattgatgatgtcacgcgagctgatagatgtctaaattgatcgacggcgaattctgaagctgatcgatctctgagacgacccacgtttggtgattgattgccgatcaggtgccatgagctcatatatttattgcatgatgaattgaattgaatccggatctaatttgaactgttattccgaaccgattgcttccttgttaattcgaaacggaatccaactgttaagttgaattcgtttcttaaactttgcgtgcagttcagtggaggtttccttatgtaaattcgaacgggaacaggggtgtttatgcataaatccactatcaaaccgggagttggtctatttttttaaaagtccctacaattatctcctattgtattgtttagtcgcgcaaggggaacccccgccttcttggatctccggcgacgagcagcctccgtcgctgccttctccggccatgtctgcatatgcatcctgcatccacgatgacgtaagccggccacctgatcgagcagtatgacgaatgcagatgtgcagtggaaaaatatatttctgacgagcatatgacattcaggtgtgtgttcatcagtgggtattcctttttttaatttcgacagatttgaaattcaggcactcaggtacctacctatctcgtgagatacagttatcgaatttaatttccacgggccatgatattgtttatgcatgcagtttgggttagggattattttgttgatatttttagtctcgatttcactattagttatctccaactctacatgctccttctgaattatcatatggcctaaataaaattcatgacttatgcatctctgatcaaattttcagacgcattagggaagaatatatacgctaggagatcttctctgggggtttatgctatctatgggtcatcagttcacatatctgaaacccatttccagtgaaaattcttgcaatggtatgtcacactgatcatgtatataaatgcagaatgtataggtgctctgctgctccttgtacttatctgagcttcagttgttttacaatttagattacaagagaaaagattgtctagtaaaagatttcttattgaaatttacaagacaaatcgttggcagcagagtagaccactggtgcagcctagccagtttctggttattccatctgggctatttggctacatgggctgggcctaaagctcatatgtgttggttatgttgggctgggccaaaagatctatgtttgtagcatctgtagttatcaggcttcaagtagcagacaattctcctgtcctgtgtccatcctctcactttcagcttcttttttaaaataaaaaaaatcacaaacaaatcactgagcacttgtgctagtcttctaaattaacccactatgatggctgtcctgtcctttttattggcagtaatcaatagtacatgcatatccactctacaatagacaagttcgtctcttttactaactatttttaatctcaccatccagacagcttcataaagctaatcatttgatgttcaccacctgttcttgcaagcccaactaaaatttgctacagtattacctgtaaccaacatgacctcaaaatgatggttcactatcaatgtttacagttcatgtggacaaaaaaatctcactgagagaaaaaaaggtattcttgcagccaaacatgtgtggtttctcagaccaaccacatgcctagttcatcagcaagatttttttcgaaggcatgcttttaaaaaagatcactccaattatacatccaaagtaaaatgtactccgtaagaatctacaactcttatcttcttttacatgtagatgtgatcactttgatcccttttttgggtcaaaaatggcttgatgctcacctagttgccaatatggaaaaccaaacggcacacctagccggccagttgctgtttaacaatgactggaataaagctcatcagcatcatcttttgtcctctcttttttttttaccttttaatttctctccagcatgccccatcatttggagccctgtgaggcctcaacatcttgatgatgttgcaacatttgcatcaagtgagaaaaaaaaaagagaaatgacaaacagggcaagtgttcatatggaacaagactagacttgagactttgaagataaccttgtggccttctttggctttggtgtgccaagaaatcaacactggcccagcggttgtacttccagacccagccagctgaatgtgaccatcagatgcagcttctatgtcgtcatgagttggacaagttttgatttttttcatggaaaagattgagagtattgaccaaattgtatgtagatatgtacgccgggtccaaattcaagtctagcctgcacccggatttttcatcgtatttgactaccactagatggaaatggagggtgccgcttttatgttttggggtcaaccggttctagaactgaattaaatattatgtgacaaggtttggagataccatgtacgaaaagagtatgggtaactaaatggtttgtcgtcttgcaggagctatttttttcgattacatggaagacgcatcatgcaagggcctttttatggttcttgtgagtgtgcactcagatggtaagtaagatcagtgaatcccaaaaaccctggctaccttcaaattgataacatggaaaaagtacagatcataatgaacaaaatatataggtgaaatccagtaagaaaaacacacacacatattcctaaatgacaagttgacaacacgacagggagatcgctgttgtgtcaaaaagagagagttgaacggtggtgaaaaaaaaagagagaaagaaaatgatatatttgcagtgagaatcgtggtctctgagtctccacacatgcacacacaagagtagactttgcatcgctcacaggaaaaccgaaaatgatgtgaggaggagcagatgagacggattggagtttggaagatgcgaaaggatcacataatttcatacctagacgtttaaaagacttttatgtgcacttgtcacctcaactttaattttctttctttttctcttttcttatctagattgcagagagatggctggctgctgcttacataatctattttggctgaaataaatggatttgttgccatgtccttttttttcttcatgatacctgcacttctagatggaagatgtcatgtgtaagttctcttactgttcacactgaaagctactgcatgagaaagttttttttgtaacctccaatcaccttcaaaataataatcatgtcgcacataggaaaagtttataaactattgtcctacaacaactatagtttggacagaaaaaaagtacgtttttttttaatttttgcaaaacccatcaaaggattgctaggcattaatttgagctaatacaagttagtagaacagtaaaataaatgaagatatgttaatcatttctacagtacctctgaattcttaggacatactcatgttgctgtttactgctcctacaccaactttggcactaaaaggaagaaggattagggattaggaattcgtggcctggtgtgatgtcaaccaatatgtctaacattatccagccattgttggctgtcatgggtacacaaatcttatgcatcaagtgacaacagatttcagttagtgctcaggataggtgtcctatgtgacttcaaatctaggctttttgggcactttgcattcacatgacttgttcttgactccacacctgaaagttgaaaccaccacaatctaattcaacagttaatctgatttttttttacaaaaacaatataatagtttgtatggacaaatctgaatatcatcctggtcttcagagatttgcagggtcgccccaatttcagcgacaggtaaacgctggaggattgaggaatgagttcatcttcctccttcaccttttgtgctggtttttgtttcttttttccgccgttcaaaaagagttggcgcgctcgctttgactgttctgtcctttaatttgctttcttgtttcttattttcttttgttcgtgttggtgatgactttgcagtactagtatcagtttagtttggattgattaatcaaaaggacatcataaagcaatctgagcatggctggccttttgaatcagagcagctctagaacttttgctctcaaggtcaggtgtgagcttacttgttaaaactgtccttaaccaattgtattattattatcacttactttttttttcttaccctctgaaatctgaccatgatctgaaactatcttttttagataataatatcatgatctgaaactgttggccagagcattgacaaacaggagaatttggcctcagctgatgctgctgctgatcaactgaaacttgttcttaaactacaattctgaactgaacctgatgcaggaaggaatcttgccggctcaagtttcgtcattcttcctgaaagaaacaacaaagcaagcagggcttaatgcagataagagaacacgcaggctttggttgggttagaggcatcttgattagttataatctgatgtatgaatgactccaaaacatcagtttgttgtctagtgcagaaattgcgctggtcaactccttaatttcatatctttaccttccaaccggcgatcagagaacggctattatcaacttgcattagttaacactgactagtaataacctatggtgattaagcttgtaaacaagaatgcaatggagtaaagtaatgaggatggcaggtgaagaagagaagaggccagagggatggattaagcaagaaaagacgaggtgattgaatgattaaaacaagaagaagacaggcaattgccggcatgtagttcagtgttgttgcctgcaacggtagcttttcccgccttttaagcgacgtttactgctactacagctcactctacagtattagtatctatacgtgagtgacctgtggtaaattcagcgtaacggctataacaagcaatagcagataaaacggtaaaaggacaattgcttgttatagaaagccggatacgaagtgtctgatcggttgagcacttaagcagttaagctaggctggtatgtcatagaaaaacaaacaaagatattaaaaataatttatagataaagcttttatatttatattcgtggtttaaaagtcaatgctaaaaaaataaactacggtgaaatacaataaatcaaaattaagtttaaaaattctttggtcactttgattttagaaggcaatgccattaaattcaaatacattttagaaattgacatcatcaaaagatctttatttctgaaggcgttgttccaaagtatagcatataatcccgatattctcttcatgattgtaatagagcaaaatatcgctagacaacatgacatgttcatgttacctactacggtttttcatctttctttcacttttatttttactgcatgtgtgcatccttgatgagttgatgtaaaggtgtaggatgtttttattgactaatgaaacaatccattatctataagaaaatgatttatgtacatctcaatttaagtcatggttataaatacttaatcccaccatattaatataagtgcaaccttgtatattactgctctgttaaaaaaaaaaacctaatcctatagtccgttgtatattaatattggaatgtgggggagtagtacgtttttaggcatcgacgtgaagtacggattatgtacttcggagtgttagacgggcggtttgatggagtgatgtagaaacaggagaaaaacgtttgggacgggatagcaaagcgtagggcaagtgccagcgtggaggtcaaagtcaaagagactttgcttgaatagccgtgctggcaacggtatgaaagaagagctccccttgtctgtttcttctcaacttgcaagaaaattcttacagtaaagactgcacaagtgaagaggatggcacaagtgaagtgcaggagatgacactggggccctgcacctgcactgcacatgtgcaatcatcatactacatgctctccttctccctctttctctttctgaatttcttctaatttctctgtttcatagtaacaattctcaaaatttaacttatcattgttttagttcgactactcttgttttataaataaatctacaagtaatattagtaaagtatgttacacggtaaatttaaatatattagtcccatccaacttgatcgaacggtttaaaagatatcagtggtcaattaaaccatttgtttgttagttagttagttaatattgccaagcactattatgaaatggagtcagtagaaaaaaacactactccattggaaaataactcatggccattttattctttttttcaaagaaaataataaagaacttagggtgatattttaaaaacaagaatactccattcttgaggtgatgagaggaaaacaagcaatggtgtgcaacccacagaaatcatgggttacctactactggccactggcagggccagggcaggcacattaggaaacaggggctcatcatcatgcccaacccatgctgcttgcctccctgtctccctgcctctaaatatgtcatgccaacaccacataaatatctactccttgagtaggttaaccaaccttaccatcataaactagtataattattctcaactcaacaagtggtccatcaacacatggctaaccatgtttcttctgtaaagctaatgcttgactactttgttttaagttgaagtgacaattaatatgagttttagtccaaggctttgtttggaacttagaaattttcaagcatgatttcagcttcgaataatacaaattctttgtatatatctttactttacttgtagttagtacatatgtagccgggtgtatatatgtaaaaagattaaattcaaattctattttcaaaaaaaaaacaaatcctgataataggggggaagatcaacttgcctccctggcttatagtttagtctttgccatcaataattgttttattgggtaggaaaaagtcacagttatggacccccaaaatcacaattaatcttctctaatacgcccccataaactttgctcttcacgcatccaaagtctaccactaaataaaattataaaaatgcatggatgatttcatggccactcaagcatctagagcttgcacaatagtccactttattgatggcttttggactatggaattggcacaaattgtcaaatagagtattttcataagcaacttttggactatatatgaactcccataaatcatagtgtacttttttttctaaattctccaaatgatctgtccaaatagtaattaattaaccgagttgaccatcacacccttcatgcgcaatgagaataatgaagtcattagtagtagtactggtagtatattaatgcagccgacgagactaattactcatgacccgatgtgtacgtcgagacggcttgatatggacggctccgtaaacctcattgtacgtatgcttcttgacctaatcaccattatttaaatttttctctttttttgttgttgtttttattgttaattctgccgtagatggactgcaacttgagctaaattgcagtcccatttggttgttgatttggataagtcgtctcctggtttgtgatgtgtttctgctgttgatgtcttgatgaggtgagagattctttgagcaggtacattttctttaattgcaagaggtagaagaacacaacacaaaaacaaactcttttatgattttagagaaaaaataatacaaactatttaatgtacaaagctgatttcatcccaacaaactctgaaagagaaattaaggcttcattttgccatgaggttgttctcttaaacccttcattaacctgtcatgcaaaggggatgtgtcaggtgatcatcattcgtaatgcacatagaaaaaattatccagagcttttaagtaagaactagtaactgcttgtgttcaactatttgtgctgatgtttacactaaacaaatggttggaagtacaatgttttgtgcaatgatcagctgataaagtcagaaggattacatcacatttgtctggaaataagcccggatgcatccttcgacaaaggtatggagggtatcctcaagggttcgacagtttacaacggctactgcaaaccttatcatttggcagaaaagtcattaggatggcatcacaaatgatgccaaaatccatgtgtctctaacagttgataatatctatattttcatccgaacaacaaaatagctaaaatttatggataatccgactcctgtgatagctatttgaggatatgaagtaatgaattagctagttgcaaagttggaaagttgctttagaaaaatattctaaaaaaattatatagaaaattttacacaaaacatgacgtttaagagcttgggaaacgtgcaaataaaaattcagaatagagatttactgaaaaagaaaaaaatacataggatgatataattactgaaaaagaaaaaatacataggatgatataacatgacctatccagcatacctagcataagtttttttttttatgttttatttgatatagagaaattatatagggattttatgttttcttgtaaattcttgctcttgcgttctaaaagagcccttatccaggtttcaagaacacgaaatcagtttaagcctcagtgctctttcagtttaaccctaaaccctaaccctaaagaacctgctgggcaaagttgaaaattcaaaggtaacttcaaatagagtacagggaaaaaaaataatagaatttgacccggaataacaatgttgcctggtacaccggtcagtttccagctcccggacttatttttaataattcttgttttgacaggaaatagtgacaatagtatcttgcatttcaccctccagaaatcaggtgacaagattgcgcaaatttgtttgcacaatgcaatagaaatattatataagggttttatttcactttgacaatcacattttcaacagaaaagcaaccacgaagcatgactgccagagagaatttcggtggcgatgaacaaagaaccatatcatcagttacaattgtcttccaagcaaagaataacacattaacaactagcacacttcctctaccactatgtcatcatcatcatgcatccaaggggggcaaagcaccgaattaacagtgtcactgaaacatgaacaagaaagaaacaagaaagaagaacaaatccctctcacaaacacaacctccacagcaattttccaatctttccttcccacaagcccatttaatcatcatcataccctcccccttccctcgccggaatcggcaaccgcactcatgccttcccctttctccatgcccagcctcttctcgtcttccattcccttcagatgcccagcagccttcagcgccccgatgttgctcacattaccaaagatcagaacaatgatgccgaggaagctgcctaggaacgcagcagcaaacgatcctccagcacgcccaggcccagcggatgcagcagcgaagccaatcatagcaccaatgcagcgtacaaatgcataccacaccgcaaaagcaccctccttccctggtggcgaggcatcgagcagcagaatgcgaccaaatgagtacagcacaccattggctgtgctctggacaagagcgatcacaatgatgtgagcggctctccacctgtggctcttgaagtagaaaccagcaccagacacaaataggcagatgatgaacccaagcagctgcatgcgaacagcatcagcacggatgatgatctggattgggtgcagcagcggaagtgagatcaacgggaacaggaagtagagtatccagagcacgagcacaaggactggcttgatgcaaacaccaccaatagcatacaatgtgccactggtgaagatgcacattgtggcgaaagatgaaaggaacactgcaaccaagcttccgatggcctgtgggtatcgcacaagggtcatgctgtagctgagcttggtgaagaagttaggctcaaatgctgtggtgggcgatgagctgctgggtcggtttgtgaagagaccatggcagataccaatgaaccagataaggccactgaagatggagacgacccaaaggcctgtgagctggtcagtgcgccgaagcatgtggtacatgaaagcagccatgagcgcagccccaatgccaccaatggcagtgcaatacagggtgagctgactggcagcagcacgacggcgaaggacaaggtgcttgccagagtcatgtgctgcaaggccacggatcatgagtccaagattgcgtgtatgcacagcctcagcaacaatgatggatgcaccaatgaacaggatgtagaagaggaacacccagactgtcttgaagaagccagtgaggaggcagaagaatgagccaaacgatgtcgcggcaatgaggatgagcgactgatactggccacggtcaaggtggtgtgcagcctgggtgaggatcggagccgcaatgaggattccaatcgcccatgataggccactccagcccaacggggacagccgggatccatcaatggcaatcgaatgcttggtcagcctctggtacctgccaacatttcacaaacttggtgtgaccatgatggtttggttgcatcacatgaacatgtacaggtaaacattgcatgctatgaaatttatgcagtaaaagcttccagggtgtacaaacaatgcgtgaacataaactgcaagaagcacatgcattgcctgctgaaagtcaccgtgctagaattccaggggttcataccagattaacccgttaaaagatggtaacttttgtgtgttgaggtgtcaacgttgacacatttaagtagcatcaacaatctcccttgcaatcaagggcagttagttggcctgatgcaatttaagcatgccatactgtggtgcacctaccagttggctggtcatgcggctagccctcaacagcatttggggttaaaggcaaaattgcaacggtttaggggcctcttttcctgttcaaaagagaaaaaaataaaagggagggaggagggcaggccaaagagaataggcaaaagcatggccctgcttttgcgcactctttttcttggttctatcaaaagtgagacaaaagcaatgtaaccctcagctacacaaactagatctatcagccaaggaaatgagctactaccatctccaggggtatatggcactgcatggatcacaaaagaaattttgcagtactactagtagttgaaatgaaatatggctagttatctgaagcatggaagcaagtttcacaggccatatttaatgagacacacaggcctcggcttggggtacctcataaatttcatacttatggcttccactgtccattcagtactacattttcgatctcaccacctaatgtttctcaacgttcggaagatttttaaaacaaatttacaaaggcacccctagggatttcttgtttgaccttatcctcctcccaagaaatcttgtctctcacagtcacaagagcacagctagtagtagtacaacaaaaagaaactgacaaaaaaagatgcagttcattacgtgtctaggtagagaaaatctcaggaaaaacgaaaatatattaataaaagagaaatgtgggatgtgggaaatagcctcactgaacaatatctaggaccaaacagtagcatcttttggagctttgcacaagaatctcttatctgctaataatggagagcaaagaaacatggaatctcaggaatcacgggctatttctttttaggattttgcatatacgccacatataaagtgcagcccggaaaaatccaatctttgaagtactatacaccagtttattttcacatttggggtaccttgaagatgtgtgggtaaaagaggttaaaaaaaggtggagtagagaactacgagtacagatcacaagatgaaggacgatgtaaagttaaaacgagctcaaaactttcaaaccaagaacaagagcagagaagagactagcaagaaaactacagagaaaaaagagtaagtttttttttcctaagtgcactatgcctgttcgtttgatgtacaaaacaagaagcatattttaggaagacatcaggtggaaacttcaaaaagcggagacat

SEQ ID NO: 4510 - DNA, 1007 bp, Oryza sativa
atagatagaaaagaaggggaatgcttgcgtgtttcccatattcaggaagcttgttagtataactcgaactgctttactttaatctttgtcctaagctaggacaaacaagaacaatgcgaaaccaaagcgagcatatcaagacgaatacacatcacttctctctcttttttttcttccagagtacgtgatatactttataatcatgtttatttacttgtcccagaggaacaagtagcctagcctggctgttttcggttccagctaaagaatccctgaacttttagtgttcatcggaaactttggtgatcgtcgccaagcagttgtccacaggccggggatgaggcagatatctcaccctgcactttggatttgccctcttcagcctgcacacagcagacaactttcagttttgaactttgaacaaagcaattttatcctttttggagttggtattctgaaaggcataactttcagttttgatcctggaagctacaagtaaactgataatgaaatgaaaagagtagaagaaataaagactgaaaagaagaagagaggtgcagcagttagtcttttatctgttcacaattaatcatgttcagttaacagtagttttttttgtcataaatatgttgagaggaggtttacttgtaacccaggagaaaatgatggaggaagacagagatctccagctttgcaagatcatttccagggcacagtcttgctcccagtccaaatggaaggaatgttccggctttcggagggggtccctgaaagaacaaaaaaaattacatcgaccattgaaacacactgaaaaaggcagagaatcgatggagcttaatctagtttgatgaagaaacaaaaactgcagaagaatggattgaatttaatttacctcccatcttgaagggttgaacattttggggtcaggataaacttggtcatccatgtgcacacttctgtaccacagctgaaccttccaccccttggggataagataacctgctggg

SEQ ID NO: 4511 - DNA, 1637 bp, Oryza sativa
atgcatggttggtcgcatgcccaggatggcaattgagatcaaaaaatcgttcattaacgagtgatgggatttggcagtgctgcggttcctgacctccttgtaatttatatatttagattaattactaacgcatattaatcttctcatgattttttattgcatgtatggccgtcggtgcaatgcttcctactgtaaccatgttgccgagaggggtacgccaggacatagtgcgtggctcgactactgatgttgatgatgcagcgttcgctcatgccacacacaacacctctaaggccggttggctgcaccaagcccatcatgtcaacaaaatcagagagacgaatctacatgcaaatcagcctcgcttacacgattggcctattatgtcgccgttgttgggcgtctacgtcttcaccgccggcctgcctccgtctgccgccgactggtgtcctcgcctgcacggcaggcctattatgccgtcgttgttgggcgtctacgtcttcaccgccggcctgcctttgccgccgccgaccggtgtttccgcctgcaccgctggcctattatgccgccgttgttaggtgtctacgtctttcaccgccggcctgcctttgccgccgtcgaccggtgtttccccctgcacggctggcctattatgccaccgttggtgggcatcttcgctttcaccgtcgaccgcctcattcgccgctgactggtgtcctcgcctgcacggctggcctattatgaagccgttgttgggcgcctacgtcttcaccgaccggctgcctcgtccaccgccgactggtgtctccgcctgcacggctggcctattatgccaccgttgttgggtgtctacatcttcaccgccggctgccttcgtctccgccgactggtgtcaccgcctgcatggctagcctattatgccgctgttgttgggcgtctacgtcttcaccgaccggccgcctcgtccgccgccgactggtgtctccgcttgcacggctggcctattatgccgctgttgttgggcgtctacgacttcaccgctggcttgccttcgccaccgccgaccggtgcttccgcctgcacggccggcctattatgccaccgttgttgggtgtctacatcttcaccgccggcttgccttcgtctccgccgactggtgtcaccgcctgcacggctggcctattatgccgctgttgttgggcgtctacgtcttcaccgaccggccgcctcgtccgtcgccgactggtgtctccgcctgcacggctggcctattatgccgctgttgttgggcgtctacgacttcaccgccggcttgccttcaccactgccgaccggtgcttccgcctgcacggccggcctattatgccaccgttgttgggtgtctacatcttcaccaccggcttgccttcgtctccgccgactggtgtcaccgcctgcacggctggcctattatgccgctgttgttgggcgtctacgtcttcaccgaccggccgcctcgtccgtcgccgactggtgtctccgcctgcacggctggcctattattccgttgttgttgggcgtctacgacttcaccgccggcttgccttcgccaccgccgactggtgcttccgcctgcacggccggcctattatgccacc

SEQ ID NO: 4512 - DNA, 21564 bp, Oryza sativa
  unsure (1)..(21564): unsure at all n locations
tatctatttagttttttttataaaactttggtaaatatataagaaatcctgtcaaaacttggtaatattgtcaaattgtaaaaattttgacaatgccaaaatttggtaatgtttgttttagttataatctgaacagccccttaatatggatccatactccatttgatttcaataagattgtggatggatggacggatcatggatgggttgctttttaatttatgtaaacatcaaaagatgctccccttttgaatggtactactgctagtatgatatagcgttgttgcaatgcatgatccatctatcagaccctagcatcaaggcatggtacttctttttctttttcttttcttttctttttgcactaggatgctcttcttctaccttttcatcatcatacctgatatgctgccctgccctggcctgttgtcaaaacccataccgatgtgtttttctcgcagcaataaaaatatattatgccttttattttatttatttttcacctttatgaacttgcatgcatatcttcatatccttcaaaacggtcctgttaaatattcatgttgatatgtctgaatcattgaccaaacacactcctgaaaagaaatcactagctaataagtatagctattactcctagaaaaccccatcctgttgtaaaaacagcaaaccatgggatatttgatggctttatgccatgtactattctgctgagtgatgtctaagcatttttggctcagattaggaattgtcggcacagctttatttgtacaagaattgacagcaattgatgctaatgtggtaggctcacgagaattcacagccagataaacgtacgagctagttttagccagtcattaggttgctgacaccgaaatgaaaattttgtggcacccactgtccatcatcagatttccaccactccagatatgcaacaacatattccaattttgccgaacaaagtttcaggacaaaaatctctttcggtgctttgctaaatagttaatacactgcttgctgatctcttgttgcatatatttactgttaagacaaattcggtgggcataactaggcatgcattagcttttgtttaatctgctatatatgccatgggaatcaatatcatatagctaggtgaaaacaaagcacccagtgctttccaaattagtatatgtgcgcttcaccctgattgtcgtttagtcaaacgtaatctcccacactcggattgatttggtgtccttttattgcttgtcttatgcactgattatcttaatcgctgttaaaaagatggttacacgtgttgttcatagattaatgccttctgttctgaaagatgcaacaatgtgttgcctttttgtcaagaaagataacacaaatgaggcacaagtagaaagattgttgcaagatcagttcttcagatttgcataggaaaaatgtttgtcatgtctgtaccattgtctgcatcacagcaaaatgacttttgtctcttcattcacttatctcagtatatttcttctgcatatatactagagtactagtttcagtaacaaagaactcatctgttaaaaaaaatcacttctttttgtgtgtgtgtgttcaagttgctctaatttatggcaactgaaacaagagactgatatcactggaacatcagcagcttaattcagaagttataacaaataaagttgtaatagtacattcatagcgaatgaagtgatggaatgaaacagaaatgctattaatcacaatcaaatcggaactaaaaatatgcaaacttatggtgatttggaagcatgggaatgcaaagaatggcaggtttgctctaatttctgacaactgaaacaagagttgacactgaaaacaagatcactgatcgttgtgatcacaaagtagtactccctccgtttcaaaatatttgacactgttgactttttagcatatgtttgaccgttcgtcttattcaaaaacttttgtgagatatgtaaaattatatgtccacataaaaatatatttaacaatgaatcaaatgataggaaaagaattaataattacttaaattttttaaataagacgaacggtcaaacatgtgtaaaaagtcaacgacgtcaaatatttcgaaacggagggagtagcaaatattgtagcacattgatagtaatcaaaagagaaacaaaaagaagaatgggaatttgatggtaagcatggaagaatggcacaggtttgggcggacaggggtgtacaggacgttcatgttcagcagcccgacgatcctggcggtgacgccggaggcgtgcaagcaggtgctcatggacgacgagggcttcgtcaccggctgtgccaagggcaccgtcaccctcatcgggcccaaatccttcgtcaacatgtcctacgacgaccaccgccgcatccgcaagctcaccgccggccccatcaacggcttcgacgccctcaccacctacctctccttcatcgaccagaccgtcgtcgcctccctccgccgctggtcctcgccggagtccggccaggtcgagttcctcaccgagctcaggcgcatgaccttcaagatcatcgtccagatcttcatgagcggcgccgacgacgccaccatggaggccctggagcggagctacaccgacctcaactacggcatgcgcgccatggccatcaacctccccggcttcgcctactaccgcgcgctcagggctcgccggaagctcgtgtccgtgctgcagggtgtgctcgacggccggagggccgccgccgccaagggcttcaaacgctccggggccatggacatgatggaccgcctcatcgaggccgaggacgaacgcggccgccgcctcgccgacgacgagatcgtcgacgtcctcatcatgtacctcaacgccggccacgagtcctccggccacatcaccatgtgggccaccgtcttcctccaggagaaccccgacatcttcgcaagagcaaaggtcactcctcactctgcttctttttttttcctggcactccaaatttggtttcaatcatctgaacttttgcattatttgaaattttgcatgatttgattttgagttcaggctgagcaagaggagatcatgagaagcattccagcaacgcagaacggattaaccctcagggacttcaagaagatgcacttcctctcacaggtataatataataatatatatagggaaactctattcatttcttaaagcgatatctccttgtttttttatgaaatttaaaaagtcattaacttttttaaaaaaattagtatgatatatcaacatatgatatgttacttcataaacatacatattcaaattcaacttatacaagtagaaacaaaaataacaaatttgatggatagaacgcgtaattcattgtcaaatttgttatttttgtttcgaattgtatatgtcgaattttaacttgcatgtttgtaaaaagatatatcatatattcatctaccttgacaaagttttttaaattttttgataacttttttgaacgccatgcacaaaacgagaggatgtccactcgagggacaaaaatccacttccatatatgcaaatgatttttaacacagtggaatatactactgctccagccgaattaccacagtaattactgcataactaatttgcacgctaatgatgatgaaatctgaaggttgtcgacgagacacttcgctgcgtcaacatctccttcgtgtccttccgtcaggccacaagagacatctttgtgaacggtgcgttttcacatagctgaaaatccatcccttaaagacatatcagaatcatcatcatctgaattctgattgatgttgttgtttctctagtgaaccacatcgactgattactactagtgcttgaaatgaaatgaaaatgaatgaatgaatgttatactaaccaagaagaacccagcaggttatcttatccccaaggggtggaaggttcagctgtggtacagaagtgtgcacatggatgaccaagtttatcctgaccccaaaatgttcaacccttcaagatgggaggtaaattaaattcaatccattcttctgcagtttttgtttcttcatcaaactagattaagctccatcgattctctgcctttttcagtgtgtttcaatggtcgatgtaattttttttgttctttcagggaccccctccgaaagccggaacattccttccatttggactgggagcaagactgtgccctggaaatgatcttgcaaagctggagatctctgtcttcctccatcattttctcctgggttacaagtaaacctcctctcaacatatttatgacaaaaaaaactactgttaactgaacatgattaattgtgaacagataaaagactaactgctgcacctctcttcttcttttcagtctttatttcttctactcttttcatttcattatcagtttacttgtagcttccaggatcaaaactgaaagttatgcctttcagaataccaactccaaaaaggataaaattgctttgttcaaagttcaaaactgaaagttgtctgctgtgtgcaggctgaagagggcaaatccaaagtgcagggtgagatatctgcctcatccccggcctgtggacaactgcttggcgacgatcaccaaagtttccgatgaacactaaaagttcagggattctttagctggaaccgaaaacagccaggctaggctacttgttcctctgggacaagtaaataaacatgattataaagtatatcacgtactctggaagaaaaaaaagagagagaagtgatgtgtattcgtcttgatatgctcgctttggtttcgcattgttcttgtttgtcctagcttaggacaaagattaaagtaaagcagttcgagttatactaacaagcttcctgaatatgggaaacacgcaagcattccccttcttttctatctatccacctcactgaatttggattgttctttatcagttaataaagatggcacgaaaagttgcagtttaagctggtttttgtcttctttttattcttttttcaaaaatattgcttctttttctgtgagggcaatttagtccccaagctacatacctatctgcagaagtttagtcatatttttttttatcccgaataatttcaaccacagctatttattgttcaaccctactaataatacttgccccaaatgatccggcaatgcagctggatgaacacaagcgtcgatgataaatatggttcatatggatttagccgtccttcagttaaacctgatgttgagggttttaaagaagccactgagcaacttgcaacagagaagatttttcgaggttctgatcgagggcagaattggtggactgcatttttcaagattgaatcaacgatacataataaatctttgtatgtctctcataaaattgaccaaagatagttttgctacaaatataaaactaatgtatttaaggttctcaatatcttttttatacaaatacttaaattaggttgttgagtcaaaaggaaaaaaaagtctaatataaggttgttgctatgaaggtttacttgaaatatttgttctaaatcattcaacgtataataacattttgggtgccgagaggggggtgggaagtgaccgcaataacaaatatagtgcttacccaaggtttagcccctcacaaaaagtgaaagttttgttttttcgaaacatacatagaggcacaagtaaccgataattaatgagttcacgtgcatcaacaatgctctacgcaaacatgtgttaagacttaacaggtggaagtaaccgacaataatgaattcaacatgtctcgacagtgcgttacgcggaacgtgtgttaagggtgtgtgtagtatatgcacgtgatgtacgtacgtcttctacatgatcgcaacaaaaaaaagaaggaaaaatagattctcctattccttctatacaaggaaatactttaggaaagcccccattttccgacaaacggttatgatgggtcaaactcagccttatcatatagcaaatttctcacaaaaaaaattgtacattcaataccctactactatttatctgctgttctagacacaaaacaaaagcttatttcaaatggcacaaatcaatatatttttttgttcaagatcacagcctaccagtaggtaaattcagtttcacaagaaaagggtaagagaaattggagaatgaccaaaatacccccttcccctccatctatttctgtgtttgtgctcctctactgtctccatctcccttctcttctgcttccgatctgcagcgccttccgcctcgccggcgagcaagccggcgccgtcgacggcctcctctccctcccggacccgccctctgccctcctcccctgcgcgacctcctcgctcgctcgcccgcccgcccgacctccgtctccggttcgcgtccaattttgaggtatccactcaattcttctccccttggattgagcccgcgtggcatggattggggatccattccggactagggtttggtttctttgcctagagctgacccatccagcgtcttcctgatctctttcgggcgtcgtgctgtgcttgtagcagttcatagcagctttgttaggtctgcccccttaccgtaggcgctttaggtactagtttatcgatgaaattgggttgataacagtgatgatgcaatcctgctgttgttgttgatgagagcaggagtgaaatggatggggttgtcgccgcttcggctgatgccaccagggacgagattaagattatgaatgtgtacatatgggacatggatgaaaccctcattctgctcaagtcgctgctggatggctcgtatgctggtgcctttgatggcctcaaggaccatgataagagtgttgatatagggaagaggtgggagaatctcattctggaactctgtgacgagcatttcttctatgaggaggtcagctccactccactactatctgctggctacttgccatgttactatatatttgtaggcacattcttgggtagatgtgattgatttcctttttagtaatagaaacaagttgaaattcccgcgcaaagttgcgcgggtctacttgaaatagaatcgtatctgttaaatgtttgtagccattaatctaggccgttataatttggtcccaccatgatggatggtggagatctttctcttttccgccggccaacgtggtgctttatatgcctttagagcaaacgtggtagctccttttagtgagctctcaataatataacggatagatagatacgacaactgtaccagaaatagatagaacgtatgataaagtgtttctacaaattggactgtccatgccagtatcttctttttgtcactgtacttgtcgtgtagttatctttttggaatccatttgtacgtgaaatcttgcttcatataattcatctagctgggctctgcacttaagtgtctgatgtttcatttaatgcatgggtaaaccactcttttttatgtcatatttgttaactgatcatttttgttctcacacaaaatgcagattgagaattacaatgaaccctttctcagtgctgtcaaagaatatgatgatgggaaagacttgacaacatatgattttgaagctgactgctttagttcgccttatgatgatctgaataaaaggaagcttgcttacaggcaccgtgctattggagagaagtatacaaaggtatcacaggaattaccttctcttacatccaccccatattgctttctctaggccttttttcaggggctaggatggtgagggatcctggccatccacctgattagaataactttcattcacttccatattggcccatccaaacaggccctaaggttcatgccctctgtcaggcatattttgaatgtaccttttaagaatgaaccttctaaatatggatgtggtgcagtgctcaggtcacttctctagcgaaactgtgatgcttcattccatttagtaagaatattgttactgttcaagatttgataccatggagtgtctgtgtctggtatggatcagcacacttttctggtgtttgatcaatcattgttagttgctataatgcttggactttatattaagaaatagaatagattctttatgacgtctaggaataaatcgtagcagggtgctaactgaagtatgttgcttttatcttcttcttttttttgcgggatgttccattgtgagctttacgctgagcactggtctgtacttgtaatagagttgccacacacagcaagaaagaggtttgttcttgggaagtatgtaggttaatttgtatcaaggcgacaggggtggggagttatgtggggattatagtggatattcagttctttgaaatgacttgtcctcctcagtgattctctgggacttcatgttttggttcaggctattttgttcagaggttttgatcttagcgaaactttatttaggaacaataataagaaatagggccttagaagtcataagtgctgtgctgggactttatatagagcatcatcattagatattcacttttcagctatctattttgtagagctcttctgttttcatttcgttgttattatttagaactttttcatgccagtactaatttctaatattttgtcaatttcatgtttgtaatgagtaattgaacttctttggtgtttcttctcagggtttggaaaaaattctggaccaccacatgatcaaagtctggaatgatctgtatagcgcgaccgacaaatacaccgatggttggctttcttcaggtattctaactcgtacttattttcctttaatatttagaaaaaaaggactagttatctgatttttgttggcagaaaaaaatactttggccttcagttctgttgatgaactaagtatgacaacaaagttgtaagggttttacaaccacaaagaatcttctagagccttatgttgcataattgatggtactccaaattgtcaatgccgaaagaacatgcttctgatatttctactttcaaccagtgggattaaatttgggctggcatttttgtttatggactatataattgttatcaccaaagctataagagtttacaactaagaggacctgcaacaacttaacaatgcatgtaccaaaataatgtcccttctgcttgatacaatgtttcaaaaagcgatatgtggttttgtgtggttttgtagcacttatgtggcataatcagatgcttatgtggtataatcgggtgcttatgcggcttaagctgtacaaggttggggcatccgttccttgtatgcggccttgtacgtggccttgtagacctttttttcaaaacactggcttgatgtatgcttttaatcactgtaggttgccacctcagaatacatgttcactgaaagaaaagtcaggagtttttaagtttttctctgtgtactatgcgttagaacttttgagaacaagattatattgtcttaactgttctttctttagccaaattcaacaatcagttttgttgcttcagtgctcaattgccttttctcttgttatgcagctcataagttgttggaagaagcaatgggtaaatcaacagctgagtccactgccaaacattcaagcatcaattgcatagttacatcagggtccctgattccaagtcttgccaaatgtttgctctatcgtctggatgatgtggttgcattcgagaatggtatgtctaaaagttcctttgagcattttgtttctgttgcgtgtttatggaaaatatgcaatgggataattggccgtgctgatagttcttgaatgattgatggcctttgtataccatgtccagaaaatcccgtagcagttggctactgttgtcatactaggaagtagatgaattctacacataaacaaatgtagattaatttacttaaaatctgcttctgctttgcagtttacagctcctgggaagtcgggaaactgcagtgcttcaaatggatcaaggagcgctatgatggcccaaacgtccgtttctgtgcaatcggagacggacacgaagaatgcaccgctgcgcagataatgaagtggccatttgtcaagatcgagttccaccctgatgcccctcataggttccctggcctgaaccttccaaccattcatcgcatcatggataccgtttatgattcatcgagcaacgatggttaaccaacatcctgttggtcctcctgtttacctcagtcctccgatgccggcatttgccaattgccgtggagaccttgttaaaggaaattgtaagcagagagatgcgatgggaaggcatattgctgaccctctgcctggagaattaggaggctggtgtgtgataaataaagcgtccgactagttccggcatgtgtttctagaaagattctgtgctgttcgtgttgccattttactctgaccaggcaaatcgttcgtctgttggttgttgtatgtatcccggccattgtggtcgccggcggtgtgcattggcatttcaggtgattttgtacatatgcttcttcttccttagagttggttgatgatgattctcgtctgaacaatgaataggaagtgtagcaagatccttgcgatgcatggggggtgctagcttatgattcttgttgggtacatttcatatgtagaaaatttcacaaattcaataggaacattgtgatatactagtgaagagccttttcactggttgagtaaatttttaacctactgatatatgtatatgaaacatactactagtttttatttatttatttttgtctgaatagtgttcagtcggtttcctttcaatttcttatcttacgcacacatgccgaactcgggttgctatctggcccgtcccaagacgagttctgatcggatccggcccagctcagccaatgccaagctgcagatgatgaacaagaagcatatggccttatcttatcttttcgtttatatttatacttatcagacaaaatttaaaattttaacactagatttaaaactaattttcaggtttttctcattaaaatttgtttttcaatctttgcttttaggtcgttaagaacacgtatataaaaattttattcacaaattacttctcatttacgaatatgccgtttggccaaacaataggcatctgaaggtgcaggtgacgggagcgaacaagttccagggcctccttccattctgctcaagcagcagcagggggaggaagaagtagttaccagcagtttattaattaggccaagtggacaagatcgatggcgcagaaaacgtacccttccacaactgtataatctagattaaattttacaaaaactacatgtattttacattatttataacaaaactataaatttaaaagcttgtttttttcgctgggatggtgaagaatgccgcccgatgtatattaaggaaaagggaaaaactgtacaaacctcctcgggaggaggcacaaatgtagtgcatcaaaagcaccgcctttacaacattaagcaagtttcaaaggctataatctctctaaagctggtgctgcggcaacactcaatgagctaactagccctgctaattttcaagtttcccattcatcacacatgatcgcacacagttgtgtgaccgacgagcttgttttataaaattacaaattcagcgtctccgtttatcacgaaactagacatacttcgtgcaatatatccatcaacacagataatctctatatcggtaatcactaattagtgagcagatcatccatcaacatagataagatctacaattaattcgttacgaatgaccggtttcgtagtggtggtggagagggaggccgccgaccaaaccaaggtcctgcggccgggaaaacgatgtggcttttagtagcaggagtcggcagaaagcatgttggtcggagaagaacatatgccgtacgttttgtacaggtggtgcatccagaagaatctcgatcgcaactagcggggacgtgtgtccagtcctggtgttccgatcgatcgacgtggtgtacatgcatcgcgtccacgtaacagccattcatgcatgatgatcgtctttgtccatcgaccaaagtcgtccaagtgcagcatatatataatcggatgcaactcgagcaaccttacttcccatcatacgcactgcaagcttagcttggtgaggatcgatcgatcggagaagatcatcagattgataattaaagtaagaaaggtcgaggatgcaggcggtgaaggagaaggtgaaggacaaggtgagcgcggtgaaggcgaaggggaaggtgagcaaggccaaggccgacgagaagaaggaggtggcgacggcgaggtcccacgccgagagggagctggcgcacgagcgcgctaaggccagggtcgccgccgccaagatggagctgcaccaggacaaggccctccaccgcgaggaggccatccagcacaggctccataagcatggcgccggaaccaccgccggcgttcgtccgaccgccgcggcgccggcgccgcacctcccacctgctagctactactagtagctagtatgcacgcatgtctctctgtgctgctaattatcgtaacagtttccactaatcaatctacttacaataaataataagccagccagtgtgcatgtaatctgtactgtgtgccagacaagatatcagtgatatatctatcgaggttgttaattagtcggattgtgatctctttagagtactggaggaagttttataatggatattgttgttacgtctaattttagagtaaattttataaaactaccgatactttcatcaaattatcgatcacagcgattcaacgctaagtttcttaaatttctgactaaacgtattatatacgttactggtggaaaaatcatctttggtcggtcggccaaattacacaatagtccattttctaataaaaaccgggactaaaaagcatctttagtcccggttaaaaagttgagaggtattttttgatctttagtcctaaaaagcatctttagtcccggttaaaaagttgagaggtattttttgatctttagtcctggttggtaatatcaattggtcgggcgggactaaaaagcatctttagtcccggttaaaaagttgagaggtattttttgatctttagtcctggttggtaatatcaattggtcgggcggggtcgggcgggcgcggcggaggccggaaggacggggccgggaggccggtggcgccctaccctctacaatcttatgctggattttttttgaatttataattcattggatttgatctgtgatgtatgtgatattggatctgatctatgatgtatttgagttgtgatgtatttcttttaggatttgtgatgtattttttgtttgagattttgtgatgtgatgtattcgttatctgtgatgcatttcttagcaatttgtgatgctactttgatttgtggatgatttggggatatgattgggaatatttaggaagcagatcaatttgagaaaaaaaaagatcaaccgggactgctcccaccatctttagttccggttagtaacaccaaccgggactaaagatgaatttttagtcccggttatttcacccgggaataaagatgagactataagaggtttccaaccgggagtaaagcctctttctccaccagtgtgtgcaagttttatgattaaattatcactaaactttagttttttgagttctataactaaattgtcactaaatttatatttttgtgaaaactttgctattaaatctgtaatgccaccctaaatataaagttttgggatatagatttaatgttaaaactatagttttataatactacttcacattaaatatataaaatatatagttttgtgataataccatagttttagcctcctgaagcttaaggattgcactgcgagtgtatcgacgcaacgacggccagggcagatcagattgtagcctgggtactatgggaatgggaggctggctagagccataggagttttttataactaccaacactatatgtgtcattattcattgaatagagtggaaaagaattacaaggctaacacactgaaaagcagtagtcaggaaagaaaaaaaatcgatcaccacgcacggacaaacacctaaataaaacccaagagaaggctagtaccggaccggacgcatgtaagcgtgatcggccgcctctagactaacaaagatccgaactgcccaaaaacaaaccttatcagccgagcactatactcaattatatccagtattggagggggagagggtgagagaaaaatggaacaccccacacatgccccccccctaacatggccagcttgcattagctagggcgttgtcacgagaggacagacatataaaaagagcacacacaagctatttggaagaattttggcaaggtggcctcctagacgacgtttgtagggagaaaatcgatgatgagcatcgatgccgccgtccatcaaggtcctgaagacagggtttcacttggcaaccctactagagaaagaaggatggctcgacatagcctccaagaagaaaaatgatacccgaaacgtcgttacttgtcgcctgctccttgtcgatccatagctaaatgctccattgctccactaccagccaacctccgtcagtgcatgaacaccattttaccaacgccccatgccagccagcctccacgtggaacatggcacacatgccgtcaccagcctcccctacatgttgacagaaaacacgaggcctgggagatctgcttaactccagtgcaggtccaaaactcgccttcgggtatgctagcgtgccggttgatttgatcctacaatcaacaagaaataactacgtccactgtgttggcttccctgtcattactacgtcggcctcacacgccgtcactcgggccagcctccatgccattgcccgtactgacctctcgctccatcacccactcgtagcaccagcctcccatggtcccatctccaccaaccacgccggtctccgcaaacgccagctacgcctcctcgtgtcgcgctagcctaccgccgccagccgcaggcctccacgctaagccagccttccgccaggagcatgagaggacgccttctgctcccagccgacaccgccagcttccttctatccccgccgccacctccaccacctttctctcgacgtcggcgaccggacatagcccgcttacccggttggcttcgcaatcacctctctgcatggtcgtgcccacaatcgaagccacgccgtcttcacatagctgcaccccgctgcctcattgtcgctgtcagctcgggtgcgcgcaggggatgagtcggtcgcccgcgccgaaaaggctagatcctaacaaaaggaggctggatctcgcagtggacaccggattcaacgacaccaccttgtcatcgtcgcctcggtcgatgctgcctcatcagaccttgccgccagcagccagcccctcgaggcaccggctccggcctagcactgtcacggctatcggtgccttgatcattgtcatcccatatctagtactccgaccccgtgacctcagggaaaaagaaagccctgccgtcattgtccttgtggccacacggttttcgacgacccgctcggacggcggtgaggccaatgatttctattggattgatctaagtaatatatatgtcttacaataacttgtgtgcaaggtaggtgaattgggattcgtacgtacataccacgtacatccccgtttggtacacgtctttacagtagcgatcgaagtccaaaagggagaccgactatccgtccatgtccgcaaagatgttgtgtgtctatatacaagtgctctgccgcgtgcctgccgtataatattcgtggcgatcgacgaggtacgtacgacgatggcgaggaggaaaggcaaggacctaatcagccagctgcccgacgacatcctgctgcacatcctgtcgatggtccgctacaaggaagccgtgcgaaccgccgcggtgtcgcggcggtggaagcacctccacaccaagctccccgccttgtcgttcatcatgtcggtgctcggggcccaggggtcgtccttgtccacgcagagcaggcagcgcgtcgacagcatggcgcgcacgcttcgccggcgctgcgcggggccagaccgcgacaccgtgaagcggctctgtctggcctaccgcaaggacgtgcccatggagtgccggtacgccgacgagttcatcgcgctcgccgccgcctcctcgctggggctgttcctcaactgcccaaagaacctacgcaacgacgacgccgggccgtggtccctgcatctgccggctgccaccgcctgcttgtccatggaatcgtgctggtactcggtgaggccgccccacgaccatggccccggcgccagcgcgctcaagtcgctcaccttcaaggacagcttcatggtgctccacccaggctatctccagaacaccgccttcccgtcgctggagnagctgcacatctcaggctgcaccctctccggcagcatcgagatcacgtccgccaccatgccgcgcctcaagcacctccgcatccacgacgtcagcgtcgtgtcgctcggcacgccgcccgccatcgccgtccctcagccgacgagctgaccacgctgcgcgtgtcctgccacgacgccggcaagcccgacccgccgtccagccacgagatgctctgcgtgaagacgctcttccgcgccagcttcaccgagtactcgtacttccgcctgcgcgcgcccaagctgcgggtcttcgactggcgctgctgctacgccaagaaggtgcgcgtcgacgccgtcggccgccacctctccgacgtcgtcatcgagctgttcgccggcaggctgcctcgctgctacaacgaggccaagaggttcctgcaaatggaggattgcgacaagttgatgaacgacatcctgcaagggatcatgcctggccgctggaagtacgtccaaaggtacatatatactgatcgataattaatctcatattcatatatataatccttcttgcttgtgttttttttatatatcatatcttgcatgccacacgcacatattcacggaatctcttaatattaaattcttaataaatgcctcatagagaaagttcaaccataaatacgtgaattcaaaattatattatagtgtgtatatatcaatcgattttgctatatatttgtcgataaattttctcctaaaatttgacatatgtaattacagtacaattgtagtgtaattacactgtaactatagtgtaacttgtatgtaactttcaaaaatctcttcgtaatatgttatttcggtacaatagaggttgtggaaacaaatccttacacatgtatgtgctgtgattttatttttcttcctcaccaaaacaaatcttgtaatagatctaaagattcaaaattacatcaaacttatatacaagttacactgtagttacatgcaaacttatatacaagttacactgtagttacatgcaagttacagtgtaattacatataagttacagtgtaattacactacgattgtactataactacatctgtcaaatttttagtacaaaatttgtcgacaaatgtataggtggtccccatatcaataggctatctagcgataaccaatcacgcagtacgtggataggctacgtcggtacggggtggtggattggtggtatttttgtttttttcctggctataacctcctagggttttactcccttcatattttaatgtatgacaccgttgacttttcaatcaccgtttgaccattcgttttattcaaaatttctgtgcaaatataaaaatatttatgtcatgcttaaagaacatttgatgacgaataaacttataataaagtaaatgataattacataaattttttttgaataagacgaatggtcaaacgttagataaaaagtcaacaacgtcatacattaaaatatagaggtagtatatcttttttaatctttccatgctatatattcaattaaactttgcactttccaagggccgattcgtaaaataaaagctatctagcaaacttttcgcatgcaaattcctttttgacaatgtgtcttttttaaaaaaagtctatacatgtctaaagcttatataataaaagtttatatatgtcacttcggatttaaatatttttatacagaaagacatatgtaaatgagctaggctaaactcatctgcatgcgcagaccgctcacctattagagcatctccaaatatctatttagccagtttgccaactaaacggtgtcaattttgttttcctgtcggtctctaaatacttcttcttcctccctccaatcttctcctctccaccgttggttgtccacgagtaatacaacgttattctctccgcgtccccgctttctgtgcccaaactacaggtgcagccgactgttccaccgtggcccaagccgtcgtcgccgcccaaatcgccacaaccgccgcagcctaccatataggagggcgagaaacaaggtgagatggggggagcaggatgacagggaggaggaggaggtggggcaatggcaccctaggatggatatgctgacgacgatggcagcgtcagcagggccaggtggcgactgcactgctgcatcggatggggtggtgatggcggcgactgctcgaggtgatgggattcacggaggcattgctattcacttgtgggcatgatggcagcaacgatattgccgccatgcgctatgttattcgacaacgctggaggactccttcactggcaatgataacaggggatgcaagggaggtcggtggcggtgatggcaatgacatctccactcaattccggcaatggggatgggggatgatgctggagatggtggtggtgaagctgggatgaggtggcgcaggagtgcaggaggagactctagcttgccatcctcccacctcattgtcctgtgttcgagtcgacaaccagggtgatgatgggaccttcttcctcgagctggggaagacggtggcaactccgataggcttggatccggagtgatggaggaccttggcatcggtgcggcgaggtggtggcggtaaggtagctcttgtcgttggccctactcagggcagtgttacttgatgttggtgtttggccatccctcctgcatatttggccagtgagaggcttagccattcaaatggcggagagtctattgcagtctattttcttgtcatgtttgctattttttttatagagtgggatgaccaacctgttagagttgctgttagacctccgtgtattatatccgttcatacataaattttccactcattgattaaacgtttttgttggcctttttgcaggaatttcatagaacgtgatgaattgcgcctgcgctgcgagataaccgaagatgacatgtgatcagacgatcagtgatcttaatcagcgctctcttatatgcttgtagaatcgaggttaaatcagttgcatgcatgtaattagcaccatcttaattacaagagaaaatgacaccgttgtcccctaccgtacctccatgcaaaaagaaagtataaaaaaaagagtaatccatccttgtgccgtacggcatgaccaacaccgttaagcaagcgttaacttgggacatatttgaccctaagcacgaagcctgcgcaaatcaagatgggccggggattcaggacgggccggagcgacgtctcggttagaggaaaaagtacatcaatggtccctcaacttgtcatcgagttacaaaatcatcccctaaccgcaaaaccagatatataatatcctcaacttacaataccgtttactttagatctttggtggttttgacccggttttatctgatgtggcagctgagtcaacgtgagacccacgtgagacccatatgtcaggatgccacgtcatcactccccctatctccctttctctccctctcacatttctggtctgggcaggccagccgacagggcgaggcgggagaggatgaggcctggcggccagcgacgtgggagacggggcaacgaggcggtgacgggttgggcgcgacggcgacgggcggagcgatactccattgtcaccgccggcggtagcacgtcggcgcggctccgtcggccagacgctgcaagaactagcgggagtgcgcacgaggatgagccagacgatgaaggtggcggcgccggcgccgaggaggaggaaggggctggttccttttcatataaattcaaacaaaattaaaccaacactttagataattatataaatttatacgctttaaaaaaaagcctcaatgaatatgtacaggatataaactagatgaactggcgcgcctatttgctagttttgatatacgacgggctaattaaatttcagcgaggactattgccttgcttcgttacacacgaaagtacgaaaccgattgtggctttgttctctaccgttgattagacatacacatcacatgcaattgttttaaagccgtactatagacttaaaaaagttcacagtatctgtagaaaaaaaaagatttgcaccttcaagccagtgctgaaatgcaagtttctaagcagtttctgagctagtcatccttggacaacccctttccaacctaaatttgtgtggaattcaggttaattggtccaaaataaatgggaccaagagctagatattgaccaagatgcaataaacaatttaggtgtgaaaccatgaaatgctcaccttggtttctcgtgttcttgctctcgcccatttggacagtgcggattcttgcttctcgaagccaaagaaggacacggagctcctcctcagcagtacaaatctaggagctttcatctgcatatttcatattccagcacaaggcttatcaatggccgcggtgaggttttttggttgttttgggagagatgaccgtgacggtgacgaactcaccagctctgctcgaagaggactgtgcaagggtttagggtctaaattcttgtaatgcatggtaacagtaggtgcaaacatgccactttatctggcacccctggaaccatcactcgccgccaagacaagagggaaaggtggtggtgtcgttggagctcgtcgtcgacggcgaactgctacccaactcccgcgcgatgtcacgagttttttaccccattgacgaagagtgcggcgtgccagcatgtgggaggagagggcctctccggcagctgagagggatagaggagaacaccagttagttggatctgtaccacggcgagttggaagcggatggtggtggataaaaggcccgcagtcgagcccgtcctcgcacgccgcccggcgagccgttgtcgtcgtctcgaccggcgctatgctgagcagttgctgccgccagagaggaaaggaggagctccagccggggaaggagaggaaggtgtaagagagagggcgagcagcggtgccggagacggcgcgagccacatccgctgcccctgctcctcgccgccgaccttgctcggcaaatccggcaccccaccgagcggggtgagagggcgggagagagaaagcggaggcattggggagatgaagagtat

SEQ ID NO: 4513 - DNA, 6161 bp, Oryza sativa
  unsure (1)..(6161): unsure at all n locations
acgaccgtttcagactttcagttgctagagcggtttcgctttgcacccgtatcctatcctatcattctcacaaatatctaaccccctcgccattatcaggaaagaaaattcttgaccactgctacgcgtactaacattacagacaatgatctgatgttaatcgtttgatttaattagatgtaagttaaaagaaaatctgaatatactaagccttttcagaaaatctcaactgtaccgtattctttcccctttttttcttttatttgttcttttgtttttctccaattcgatggaggcacatctggattgcacgaaggaaatgggaaatgtttcaagctggaaaggaagcagagagaactgaaagccctctgaaacttgatggattctatgctgctttgctccttcatcagtgtgtcatcaactcatcattgtcagtatgtgtatgtgtgctgtgtgggtcaagtgaatcttcagcagtgagcactccatggcgtatctgcaaaagccaaatatatttttgcgctttgtactccattgctttctttttccttgcttgcaaaaatgacacttttaggacatggttatatccattttaaatagcaaatggcagatagcaaaagttttagtggtaaaagttttagcatttcaaaagtactaattggtgtttagatcatcctaaacttttatcattctagcattttttggtggagagagagtggtcgcaaagtttgccattttggaggattggccttacgctcaactttttgttttgcattcctctgtcctggcagagaggtactgtttgatagataatgtgatttatgataactgttcgaggatagatacaaaagaattatgacaactacaaggttcaaaagttgctttaaaaaattatataagaatttatactaaacacaaagcttgggaagaacttcagcgaaaaaacaaaatccaagataagaaaagaaaagaaaagaaaataacatggccaaatggagattcaatgtgacagtagaaattaaaagcagggggtagtaatagtaacagtcatgtgcagacagtaaaacggcaacagcaacagtactgcagaacaaaaaggacactgcctaaatttttctcattacctttccctctctctctctctccagtgacaataatgtcagaggattcaaggtagtgtgtcctttttgcagcttgcatttgaagtcgatctgtgtgaaaatctaaagttttactgcgagtgaaatgaaggtcctcctcttggctcttgctctgaatatactggccattctgttggccaagcaataatgcaggtaagcaagcgtcttatggatggaaagactataacgatagagacatgtggttgctgaaattttgtatggaattgcgcccaagttgacgatgtagaagtagaacgccatcatttgtgcagtgagcactgagcaacgaggaaaatgccgtcctaagcatggcatttgcaagaggagacagtagtgcgacagctttgtattgccaagctaccaaggggatcgttttgtcctgtctccacctgcagctttaacaaatgaaacttggttagttttcaatacttcttttttgttaggttagagggcaaacacattgctaatcacacaagggaacatgaagaatggagtgaaccatgtgtgctgcatattcaaggactaaggagtgcattggtatgtaacaataattaatatatgtacagttagaataattaaggacttgctatttattttctttatgagtatttttttattattatatatgaaagacagctacgtgcacacactacacttatgcattggtgagtactccctaaaaaaaaccaacttttggcaatgcgtctagttcattgctagaagttggttttttatgggaataagggagtacatgagtgtggatggaagtgctcttgccatatcaatttaagatgaaaaacattgatcttgatcggtggcgtttaagaaaaaaaaagtaatttgtagtattaaattaaactgcaattttcaatataaaagtaagttgatagagtatttgcagcaaactaaagttgaaacaaaagcatcacattgtttggtttgaagaatgcaaggacattttagtatcatgtactccctctaaccacaaatgtaaacatttcaagcgtttaaatttttatccaccaatataagtattcatagagtactacttgatccatcaatcattttttatttcaataatttgtttttcatctcacccctaaccattattcattatataaacacaaaaatcttgggaagcttctagcagttacagcttttacagcttgtcctataatcaaaagttcctccaaacagtttaactttttttatattatgagaagctatagttgtaagataaagaaaatgaattagaagacataaactaaggaaccaagcttttctaaattatcagaagttgactaccaactagctgcttctataatattaagttatcccaaacatatcatatccttaggtttagtttggcactacacttccgaattgctaaatgatgtgtgttctggaaaaaaaatctatatgaaagctgtttaaaaaatatattagtcaatcaaattttaagtattttagctaatacttaattaatcacgtgctaataacttgttccatttcgtgtagagattcccaactagatatgccgaacatgaccaatatagaaaaggtcatatttgtgaatagagagaagtaataatatgaatagcaaatacggagtacgtatatagcatcatataacacatggaagtctctttcagttagttaatctatcacatgcgggatttgcggttaaaagctctgttccccaaaacgataaactaatctaaaatcctcgcaaaaaaatttaaaaaatctgtaatcttaaattcgaggaaactcatgtgaagaatgaggtggtggtgacgtcaccaacaaacagatgcgaaatggagaagatgccctggcctgcaactgggccgagccgccgttggtccggtccacgttctgattgccagtttgccaccaactccaactccatatggcacgtggggcccaccacgcccgtggagacccaggcccacaagtcaggcagcaattttgacccgcctaccgccgctgcggcggctatctctgcgaggcggtccggtcccacccgtcagagagacgtcctgatcgcggcaggtgtgaaaggcaagggggatatttggtgggctatttaagcagccggtgcggtaggtggtcgactcgctgcacgcctttccgcgatttcgtcagttacccagatctcatcttacgcaggtgagctccgatctcccctctcccgcgctgcgattttgatttgatccgtcgcgccgcatcgcgtcgtcgcttggtaggatcatccatccgtcccccgcgcagcgcgagctgtctagtttctgctcgattttttagttcctgtttatgggggagggagggagagagggagggattgggtggaggcgaaccaggaatcgtcctggcggtgtgatgtctggatgaattggattggcagcgtcttttagtggctgagagattgtttccttgttactgttccgtggggtttacaactttagaatttgtttcttcgacagcatgcagcaacttggtagaatttagctgcatgttctaggtggtttgttgctgctgatcctgctcgtttggatcaacgatttttggggggctgagattaattggttggtacagtcttggttagttacatccatgggaacatgcagttggttattggtttgcacatggagtactactgctaatggggtagatatagacagtgtgtgcgccaaagctttgctaccactagtttctttaagtatagtgcctcccaattaccaatattacctattttcagtgtaaagtgttaaatagaaagattgcttctgattgctatctcctttacctgaattggtagttaggtgcacatcttccattgtaacgtatgtgttaccatggctcatgtactagttatgctagatatgttgtgctgctaaacatatatactagaaagaatgctaccactcgttccttctgttgttaattgtggaatgttttgcaatctctagtttgtagctcacaactgaccatatgattccccatccaagtgtcgacctcatgtgtgatttcataaataaaaaagagcatattttcaggatcctgttatgatcctcatttcatacatttatataccttttccataatacatgaatgatgcctcactcaatgctataaatgttcacattatatattacctcctcctacaagtatgaaatatgaattgccataggccatacaaaagagcccactccctatattggactcgataaatatttttagtacatagctcttaacttgcatgtcatagtctgatgtactgtcctttttgaattggaaactctgttactttataaaaaggattgacatttgtattccattgttaaaagaaaagcaacatctgcacaaactagtttgttctgcgcatgatgtattgatacatttggtgcatctatctgcaggcagagatggctgtcactagaattggtcttgctggccttgcggggatggggcagaaccttgccctcaacattgcagagaaagggttccctatctctgtctacaacaggacgacttctaaggttgatgagaccgttcagcgcgccaaggtagaaggaaaccttcctgtgtacgggttccatgaccctgcatcctttgtgaactccattcagaagccacgtgttgtcatcatgcttgtcaaggctggtgcaccagtggaccagaccattgcaactcttgcagcacacttggagcagggtgactgtattattgatggaggaaatgagtggtacgagaacactgagaggagggagaaggcaatggaggagcgtggcctcctctatcttgggatgggtgtttccggaggagaggagggtgcccgcaatggcccgtccttgatgcctggtggctcattcgaggcgtacaagtacattgaagatattcttctcaaggtggctgcccaggttcctgatagtggcccgtgcgtcacatacattggcaaaggtggatctggaannnnnnnnnnnnnnnnnnnnnnnnnnnnnnnnnnnnnnnnnnnnnnnnnnnnnnnnnnnnnnnnnnnnnnnnnnnngatgttctcaagtcagttggtaagctcacaaacagtgagctgcagcaggtgttttctgagtggaacaagggtgagctcctcagtttcctgattgagatcacagccgacatatttagcatcaaggatgaccagggttcaggccacctggtcgacaaggtcctggacaagactgggatgaagggaactgggaagtggactgtgcagcaggccgcagagctttctgtggctgctcctacaattgaggcatccttggattccaggttcctcagtgggttgaaggatgagcgtgttgaggctgccaaggtcttccaaggtgacttctccagcaacttgccagtggacaaggcacagctgattgaagacgtgaggcaggctctttacgcctcgaagatctgcagctacgctcagggcatgaacatcatcaaggccaagagcatggagaaagggtggagcctcaacctcggtgagctagcgaggatctggaagggagggtgcatcatccgtgccatcttcctggaccgcatcaagaaggcctacgacaggaactccgacctcgccaacctgctcgtggaccctgagttcgctcaggagatcatggacaggcaagcggcatggcgcagggtggtctgccttgccatcaacaatggcgtcagcaccccaggcatgtcggcgagtctcgcgtacttcgactcctaccggagggacaggnnnnnnnnnnnnnnnnnnnnnnnnnnnnnnnnnnnnnncggggctcacacctacgagagggtcgacatgcccggctccttccacaccgagtggttcaagatcgcgcgtgctgctaagatgtgaaatgcttcaaattttcggtaatatttggttgctgcttgctgctgagtcgcttgtagggtgggaggaactgttgttaaattttatggtcaatgtgctacgcttaatttggataaggaggt

SEQ ID NO: 4514 - DNA, 5154 bp, Oryza sativa
gaaagtactcgtggtctttcattatcagctgctgctctctgctaccaaattggatagaatcggttaatctgcagttccttggcaaccaccattatatcttttgctagcatatcaatgtcatctacaaatcgattttctttgttttctatctagtgtatccattcaagttctgctgcagccacgagcctcttctcggcagttatcatccacctctgctctgctcattctctatccattgctttgcatgttgcgttgctttgaatttattttgggatatgcatcaatgtttgattattcatcaccttcatcttgtgccaccactattctccatcatcttcagactgttgtcctgagtcttgctttgtccaatgcacatgtggcttgttggtgattgattggttgtgccaccaggcacatcaattgttgctactgctgtggtatatcaatatccatgtgtcttttgctactaaattagtatcatttacaaatcaatttcctatgttatccattgaatccagcaaattccattgcatatccttcattttgtcaaagttgtgccagtccatctcttcattgtcatttcatcatgactagctccacagagttggccttcatcatatcaccagctccccatcggagttgatatcaacatcaatcaatgaaggaccgaagaacaatttgtgaaggtccttcatcatcaccatcgtcatcgtcatcaaatatgtggagatccgaagaacagtttgtgaagggccctccatcatcatccacgtctctgaatcaatgaagagccgaagaacggtttgtaaaggctttaaggtactgagaactgaagaacagtttttgaaggctccgaggtccacttcattgaggaagagatacatcttttcttcttcatcatccaagaattgacacacttcgacgacatcatcaagactttggagatagaccaatatttagcttgtgttctcatatttattttacactccaaatgcaatgtgtatacacattgcatttgagtgggggtgttaagatattaggggtagtttagtattttcgcatcacttgtatacatttatatttgccctttagggttagatcaatgttactgttgaatccccaaattcttctcctaaagtcacaatggccagcaccaccgttgccggcaccgtcgtcgcgagcaccgcggtcaccgcgtacctcgccacgcccagccacggcaacttggtgcgcttgccgtcgccacccatggtctgcactgtacactgtcaagcacacgcatcgcctatacttgtcgctagctttatatatgtgcaacacgttgatgcaatcgccaaatcgccattgtcaccgctatgtcatctctccaatgttcgatctctgcaggaggaagaacttgttctgctcacatgtcgtttctgtgactgtgatcgaattgacagtccacccactaatgcaatctgctaatcacgagctgtttctgcatgcaagaacttattctgctcacatacattgatttctcagcttaggatcagagtattggtcattactccacctcatggtcctaatcgaaattatacgcactgctaatatacagtaatggctttattcgttgtcgctttcatcgggagaggtccaaattttaaaagaaactccactactctttgagtcccactccgatatgctctctactggtagtagaaaataatctgaaccattaatttcatttgatcgaatggttcatatttatttctactaccacctcacttaatggtagttgaatcatagaagggtattattgtccagggaaaattatttacagaggggtataatcatcttttagactcactaacccaagctgccctctctcctcgcactcgccaccttagccgccctcgatgactcgtccgccctcgccgccttcgtctcactcgcctcttccgacgcctgcactgccgcctccaccaccgtccccgtcgagcattttgtttgcatcgtttctgacatacgaagctgcttgcatgccattgaaattgaacaggctaagggagagcttgctgaagaaaattgacagcagcaaaacctgacaacccattcattgcttagccctaactttctatctaaaatatagtatggtttgtactgtatcactgtcagtgcatttagcaaccatcgagcaagtctacagtaaaacgatctattatattattaaagaaatagaaaaaggagcctccacgttcgctctcatggcctagaaattctcacattaatcagagaaaaagaaaaagcagagtccatatagaaatacaatttacaaatagctgaaattcggaattaaaaaataaggaatattagaagaggggactagagtccatatagaaatacaatttacaaatagctgaaattcggaattaaaaaataaggaatattagaagaggagactagagtccatatagaaatacaattagaaaatacctgaaattcggaattaaaaataagaaatattagaagtagagtatagactccatatagaaatacaattaggaaataactgaaattcggaattaaaaataaggaatattagaagtagactatatagtccatatagaaatacaattaggaaagaaaaaggagcctccacgttcgctctcatggcctagaaattctcacattaatcagagaaaaagaaaaagcagagtccatatagaaatacaatttacaaatagctgaaattcggaattaaaaaataaggaatattagaagaggggactagagtccatatagaaatacaatttacaaatagctgaaattcggaattaaaaaataaggaatattagaagaggagactagagtccatatagaaatacaattagaaaatacctgaaattcggaattaaaaataagaaatattagaagtagagtatagactccatatagaaatacaattaggaaataactgaaattcggaattaaaaataaggaatattagaagtagactatatagtccatatagaaatacaattaggaaaaaatagaaattcagaattaaatatataatttaaggaatagaaaaaggagcctccacgttcgctctcatggcctagaaattctcacattaatcggagaaaaagaaaatacagagtccatatagaaatacaatttaaaaatagctgaaattcggaattaaaaataagaaatattagaagaggagactagagtccatatagaaatacaatttagaaagaaatttggaattaaatatataattaaaggaatagaaaaaagaacctccaagttcgctctcatggtctagaaattctcacattaatcggagaaaaagaaaagacagagtccatatagaaatacaatttaaaaatagctgaaattcggaattaaaaaataaggaatattagaagaggagactagagtccatatagaaatacaatttagaaatagttgaaattcagaattaaaaaaaggaatattagaagaggagactagagtctgtctatatagaaatacaattaggaaataactgaaattcggaatgaaaaaaaggaatattagaagaggagactagagtccatatagaaatacaattaggaaataactgaaattcagaattaaaaaaaagaaatattagaagtagagtatagagttcatatagaaatacaattaggaaataactgaaattcggaattaaaaataaggaatattagaagtagagtatagagtacatatagaaatacaattaggaaataatataaattcggaattaaaaataaggaatattagaagtaaagtatagagtatatatagaaatacaatttagaaaaaaaatagaaattcggaattaaaaaaataaggaatattagaagtagagtatagagtccatataggaatttaaaactaactaaaatttggaataaacataataaaattaaaagtagagtttagagtctgtataaaaatacaatttacaaataactaaaattcaaaattaagaaaaacattggaagaagaatttaaggtcaatataggaatacaaatattggaatataatttagaagcaactgaaattcgaaattaaaaattaaagaatattgaaagatgagtttagagtccacatagaaatacaattagaaataataaaaattcataaataaaaataaataatattggaagaagagcatagactctatataaaaatacaatttacagaaaattcggaattaaaaaaagaaatattaaaagacgagtctagagtccatataggaatatatataatttacaaataactaaaatttgatattaaaaataattaataactaacacgtatataaaatataatataaatattacacattagtagttttgtaaagttattgcaaaatttaaaattatgttgtcattttaatatatttgaataatataatgagaaaacatatatactattatatgagagaaaatataatgatgctagccgcgcaatctgcgcgggccactatgcttgttttgctatataagagtatacaagggtgggatttcacttaaatatataagagtggcagcttagcagattgggatttcacttaaatatataagagtggcagcttagcagattgggatttcacttaaatatataagagtggcagcttgagggcaaaatatttacttcatgcaagcgatccaccagttactagcactgcaagttactagcatagtggtttgtaaaacgctctcgcatcgccctcccctaggggcagcacgggaggcatcgaaccccggccgccccctccccccatcttcctcctccgcctcgccgccgcctgagcggccgccggcaaagccgcgcggccacaaggacggcggcggcggggctcctcgttcctcgtcgagctcgcctcgtttcgggcggcaaggggagcagcccaggacggcggcgacggtgaccgctaaatccgcgccgcctcggccggatctggcggtgtggcagctggcggctggcggcggagacggagacggagacggcggcggggatggcgacggcgacggtagaggagcggctgggtcgacggcggcggggatggcagaggctgggtcgacgccggcggggatggcgacggtggcgacgtcggcagaggcgccggatcc

SEQ ID NO: 4515 - DNA, 4978 bp, Oryza sativa
atcccaccgcaaagctcatcactgctagatccatcgccaccatccgctccaccgtatcaaacccgctgccgccgggctcccaccccccctcccgcgctctcgctcctgcccgccgccgagctccccaccactctcgctccctctctcgtccaccgccagagaaagtggtcgtcggccgctcccgagctcgccactcccgctcctgcctgccaccggcagaagtggttgccggtcgctcctgctctcgcctgttgtcggccgctcctgatcccgtccgccaccgaaggagagaggaggaggaggaggagcggaagtggaggaggtggaggaagtgatgggtggagagcggagaggatgagtataagagagagagaggacttgatattttaagggtaagcttgatctgatgagctggtggcaggcggggctttgaacatgccgtcttacgaaaatagatttattttcacacgtgatttttgaactgtgtttgagggaacgatttttccataggaaagcagctatggaccacctgcaacctaaagggattttataaaaaaaaaatcgattctgtggtagcgtgcacgtcgatcgtcactgctgatcccattgagacttgagagtcacccactagctaacgcaatctgctactcactagctagtagctgtttctgcagctgcaagaacctattctgctccgacccggcgaaaaaaaaagaacctattctgctcacatgtcgcagctgagatacaaatattgttcattaagctatctcatgcatgcatgcatggtcctaatagtttagttatacgaacagctaataataagtttattcgaatataattcctactgacattagcgttcctgcttccgatctgaattcagaaataatgcaaattaactgcctaataactttattcgatcgaatccattcaactgatggaggctgatgagctgctggtccagtggcgtcttttaattctagttgcatgcaacgtcgcttgcacatttggtagctagcaagaattgagctcagctcatgcacgtagctgtgtcaagatgggcgccatggccaagatccatggtcatccgaggcggtgtctcctcggtgctctcgtcggagccatcgccgccaccgccctcgtcatcgccgcctcgttcatcctccgcccgccgccgctcgccttctccgtcgccgacgcgaggagcggcgccactgacgagaacaaggcggcgttcctcaacctgaccctggtagccggcaaccctagcgggcgcgccgccgtggagtacgaggcgctggacgtcatgctctggtacggcaccaccgactacatcgagaccaacaccagcctcctcctcgtcggcctcgccgccgccgacgaggcggcgctgctcctgcagccgccgcgcaacgcgacggccgtggaggtgacggcgcggacgctggacgacaggtttgtgcaggagatcgtcgccggcgaagggaggagaaccgggctgtcgaaacatgaattcggcaataataaaagggggtagcgcacgagacctaaaagtggatggatgcggagacaaaggatttagacagattcaggccctctcaatgagagataataccctactcctgtttggggatttgaatccgccgagtgtgtattgatctgacgatcaggttgtgtcatgccccctagagggcctcctgcccaccttatatagggtggggggcaggattacaagatagaaaccttaaccaatacggtatcggtttcctaaatctactttacaatattatcaaaccaggactttaggctgttccgtaatatataaggaaacgtaatacccgagtcatgacctattacatattccatagatataagttattccctatgactagtcggataaccatgccgtatgggtatggggtacccataatatccacagtagcccctgagaccttcgcagtcgaaaagataatcttctctcgaaccagattactccaaagccgagtgcttcaatcatctttgtcatggtctcccgagtacttttaccaaatctgaagactgtggagggctggaaaataaagtcaggtgcaccgactagatgcacctaataggtgcagcccccgacaatgtggttaattgaacaaaccaagcatatagtcaaggaataaataatccaaccaaccgagtggttttgataatcgtaatcaatcaagtgacttgatatcaatatatagcatatgcggtgtgaatcctccaaataacatgatccgagtgatataccaactgctttgtaaaatatgatgagtgatatagcaaaatagctataaagaagcttgtatattgtgaataaagaaatttccaaagtattgggcatacgccatgcgcacactgctttaacagatgtgcttaagtccctagaagacacatggtttcaccacacctggaaatatatggcatatgtggtgtaaaatccgagtaaataaactcataaaggatttaccaaccacctagaaaatgaccacaatatataatcagcctaagccataatattggtcaataaaaatgcacacttacgtggcgaaaagcaatgatattgtatctaatcaattgcttaaaaacccaaacagcaccttgacttatatataaaaaagtcagcgggacagctatataaagctttactgtttgacaccttttaagatgcattgtaccaactcctaaaaaattaagtaactgcggtataaaaggattttaaggtattgggcacttgatcacgcgcactttggcctaagcaaaaagtgcctaagtccctaaaagaacgtgacaggccacacctgaaaatatgggctgcagacatattaggcttaggccaaaaaatatgccttcgacaccctttaaaggatgacgcatgtgacatgctcccgagtaacaaatcttctgggtaatatagaccaagtgtagctcatatgaatagcttctgatctgaatgattatcccttatgggatactccaaaataaatataataattgaatcccgactggcgcaagtattcggttgatagcccttacggggaaaaataattggtccagtctttgagcatagaaaatagactcatgactatgaatccatgtggaatgtatccgaaacaagtccaaattggagatataatcctcacgcttgagttgatgagcccctgagcatatagcttgtccttctgtcatagtcaaaattgtctattggcaatagctgacgcagtcggcatggagatgaaatgaccaacatgaagacgaaattgctcatcagaagtaacggaagatgtcagtggtagtaaaaacaatgacaccaatcaaaggtaatgaagttgcataaccatggaggcgaagaaaccagtcggctacagccaggtcagctagcagtgaagatgtaggcgcccaacaacaacgaaagaacagtcggtggtgacaaaagcaaaccgacgatgaagacgtagacgcgcatcaacggtgatggcgaaatccaccaatcatgaagatgaagaaaatacttgacgacgacaaacgcaaccgacatgatgaagatgacgatgtcggtgatccagccaatagcagtgtagcaaccaatgataatgacaaagacgctcatcagcatttgcatagtaggtcaaccgtgaaggtgaaataataagtcggcgaaaacataatcatccattagcaacagcagagatgtcagggccgatgaagcagaggtgctggtgatgatgtcagtgacaataatccatcaaattaatgttatggctgttgtagatgcttcacttggaggagagttgatgtcaaattaattttgagccttgtatttgtgtagcccccgactctttggttagttgggaaacaactgaacatagagtcgagaattatagcttcttgtcgtcgagtagttattgcttgattgaagatatgtgttgaagatgtccaagtagaaatcatgaatgttggagagccacttgttgtagtaaaataacacggcatcgcatgccgagatgtcgagattcacaacaacgtcgtggttggtgaagtagtaaaacttgcgaagtagcaataatagagtttgccggtgccgaagataataaagatgaagtcgctccaccatgatgacaaagttgtattgccgtaatgaagtgaacataagtcggcggcaacagaagcaaaccggtagtgaagacgcgcagttgtgaagataaaagcaccagtcggcggcggcataacacgagtcggcggcggaagacgatgatgtccatcagtagtggtagctgtataaaccagatgtagaggcgagggcactagtcagcagcagacgagacgaccagggatgaagatggtaaggccaatcaacactggcagaatcatgcagccatggaagtgcagaaaccagtcggcagccatggcaaacgtaggcagcttgtgttgaagatactgatgcctattagtagtgacagcgatgtagccagccgtgaagaagatagcatcagttggcgttataacaggccagccgtacaggcggtgacaccagtcagcagcggatgcggcggccggtcggtgaagacatagacgcccaacaacggcagcataataggccagccgtgcaggcgaaaacaccagtcggcggcggtcgaggcggccggtcggtgaagacgtagacgcccaacaacggcggcataataagtcagccgtgcaggcggaagcaccagtcggcggcggacgaggcggccggtcggtgaagacgtagacgcccaacaacggcggcataaaggccagccgtgcaggcggaaacaccagttggcagcggcgaaggcaagccggtcggtgaagacgtggacgcccaacaacggcggcataaaggccagccgtgcaggcggaaacaccaatcggcggcggctaaggcaagccggtcggtgaagacgtagacgcccaacaacggcggcat

SEQ ID NO: 4516 - DNA, 8952 bp, Oryza sativa
aaaaaccttttttttgtggtccgttgtcgttgtttgggtatctcgtccatgcccacttgatacaaaaaaagaaaaataaaatcaacacgaaaggatgttggatgcatatttgattcagagtcaaaaccgaatgaaattaaccccataaatacaacaaggattccacgagactgctacaacaagtaattgaataagacaaagcaattggtgagatctgacctaatttcatggagggcaactttgacttgcggtcaagagctccaagcagcagtgcatggcttcggtgaacggtcgaagctcgacgcatctccccaccgatgtggcaggtcgtaggtggtggccggttcatgaggaggcggagggggctcagtaggcctctagcgagaaggcagcaagagggctctgatggggccaaggcctcctagatgcggcggccctcaacggagaggctcttgggcttcagggtgtcgacgaagccaggcagacggagtggcttcatgtatgagctatcctcgctggtgtcgtggatgaggatatgccgtcgaagccttaccgaagagcgcccgtgccatcggacttgtcgcccgcgcctgtcggatttgcgtcctaggtcaccgccgctatcgtatccatccccaacgccccgagccgacgccggatccatcgtccgcgacccaagccgccgctggatccgccgcccgctacccgagctacactgccgccaactgtggaaggaactctgcccacgactccccttgccgccgccacccctcccgtcgaatcgagagagggacgagaagtcgaggttgaggtggagaggaaaactagatcgagaacgaggggagagctgagctaggagacaaaagaagaaagagagcgataaaacgagagatctctgcgcctcaccgatagctcatgttggtcacttggtcagagcgaccgctcacctttttttccttttttaatttattgatgacaaaaaataattgatttctatgtttattatttccttagatgaaaatcataaattgtgaaaaaaataaattataaaagtttcataaaaataaatacatataattaataacttttagggccttttggtttggtaggaatttcaacattacatgcaaggttttaagaacgccgcttgaaaaaataggtttttgagcccttatattttttttataagcggggttttttagttcaccaataaaaataaaacacaactgtcatgaaagaaaatgtttttatagtgttgtggcctctggcatggaagggttggatggccaggacatcaaaggggaaaattaaaaaattattataggaaaagaaaaaactaataaattagaaaaaaaaatggactatggcaatatatgcagagtgagatgaacatgatacaaaaatatagcaatataaatatttcatatatggtaatatttatcgatagctgggataaatatccatctcttccatatccatatatatacacacacatatactctccgtagtttttaatatactattcccggttttcaatatatggcatcattataagtaaatttataacaaaaatgataattacataatttttaaataagataaataatcaaccatatataaaaagtaaaagtatcgtacattaaaacaagaggagttatctacttaaagaaatcattttttttttcaatcggcacatatacacgcatcttggtcatctgcgtgtcttttgttttgttatcattagctttctctttgtatgtcgttcgattcacacgtcgagtctgggtattgcctctctaagcttttactgaccattaatttcacttttcacgctactgacttgctcggcttttactgatcacacactctcttttatcactcatgtcccctaatatgacgcacaaacatatttttcaagtaatctttaatactccctccgtcctttaatatataacgttgactttttacgtcatgtttggccattcaacttattcaaaaatttaagtaaatgtcttttttttgtttgatgtatcactaaatgaaatttaagtattatttatatttttaagatttacaaaaattttttaataaaacgaatgatcaaaggttgtaacaaaagtcaatgatgtcttcgtgtaattaccaagtaacatagtatatttgcgtgcgctagcgctgctagcaggcaacacagctcagagataatatgcacagacaagtttcgatcaatccaaacggatttattcttcgcgtcatttgctttctttcaccaaagaaaatgattgaaagcaacaggagtataggacatcaggaaataaagctagcacaccgctcgtcaattatggaagaataatcaatatgtataacacaagcatgcgcacgattcttaagagaattgatgcagggcacacatgcatggcatcaattttgtggttttagtgctttgcaaacacacttctacaaagcaaaaagaacaaaatatatgatacgatctttgtcagtcagctggtatatatctaatatattatgcattatactagttgatgtcccacacttttactgcagaatgcatgaataaatatgtattaaatatcatacaaattatgtatgtatgtatgtatgtatgtatgtatgtatgtatgtatgtatgtatgtatgtatgtatattgaaatattgtgtaatggtgtatgtatgtatatgattatttgacacatatttttatgtcgagctgtataacatattagagttctataatatactccatccgtttcatattataagttgttttgacttttttctagtcaaatctttttaagtttgaccaaatttataaagagatataacaatgtttataacacaaaacaaacatattatgaaaatatattcaatgttacagtcaataaagctaatttggttttatcaatgttgctaattttttctgtaaatttagtcaaacctaaagaaatttgataaaaaaaagttaaaacaacttataatataaaacggagggagtaataaattacagatgatgcgtcatgtatgcttcgataagttttaagatgttttgaaacagtacttacttgtaggtatatgtatattgtgggttctaactatatatagataccaaaagatcgattaaacgtccttcggaagtcagaacgctactaagatgtcacatgacgctccaataaattaaaaaagtttaaaatgttagaaaaagataaaatatctgaccgcaagttttcacttaaacaagtggtcctattatttttaacctttagatttagaactatttgtaagctaaagggaaaaatgtcccttccacctccccctccaatacgtatgtgtgcactccggcccatgccgtctcggactctcgggctctttcatatttcttcttcccaactttcttaatcacaggggtgggcctacaacaattcaagggtattcaaatgaatacccaataattttatcaaaaaatagatatatatactatgtattttatatgtgtatttaaaaaattaaagaaaaggcatcaaacaactcatcaagcagagaaatcatcctttttgggccgcctcctcccccttatctgttggcctattagaacaattgattcctcattttacccaaccaaatattttggccgtgatgacgaccacactgccccgctcactagaccttgatgacgtcctcctcctagtctcctctatctcctgcctcccactgtaccgcaacccgcatcagcttgactactttgagggattgaggttagaaataattagcttactctagaccaacaaattgatgatttaaagttcaattttaccgattcaatttaaattttaatacttatgttgactcgacttcacctttaaaaagtactatagataccacattttacagggaagcggagtataggacatgtatatctccttcgtctctatgtaacaaattgcgtcaatatgaaccaattaaagcagggctagcttgatcgtataaataaaacatatatagtagaaataatagttttttgagatatttttaagaaaagagaacatctacacattcaagtaaaaagggaaaaacacattacttttgatttaaacttaatccatgggacataatttctaaacaaattaaatctactttcattttagatgatgacgtagattataaaaaattgcttatagggatgaagtacatattatatactataaagataacaaatagcttagaaagagttatctcaaaaatgtccatgaagaagaaagttttccaatgcatgcccacacatttttatgggctatcttcctagttctataaaaatcagaattaataatgactgagttgtagagtttaagttacatactttttatgattattgatttataaattcataattaatatatatgaattaatttgaaggtgtcataagcccaaaactcgtaagtagatggacttacatgagtttttaatgtggcttacaaatgtttgtgttgacttctaaatatttgacgccgttgactttttttaaatatgtttgaacgttcgtcttattcaaaaacttctgtgaaatatgtaaaactatatgtatacataaaagtatatttaacaataaatcaaatgatagaaaaagaattaataattacttaaattttttgaataagacgaacagtcaaacatatttaaaaaagtcaacggcgtcaaatatttagaaacggaaggagtatatggttacaaccgtatgatctatctgattgacggccaactctttctggttaacaagggagttcattgggaaatgcccaattaatagagaagtatacattggactttatgaattggattttagtaataagaccgtaaggtatatgccctcagctcgcttgttatgttggtgctaataatcgtaaattttcaggaaatatgcaagattgattgttttgttccgctgtttcatacacatgtaaagtcaaaattgatcgatatatacagatcggacaaataaaagtaagaaatatatatattactccctcagtttcacaatgtaagtcattctaacatttcttacattcattaacatcaatataaatgtagaaaataatagaatgacttacattgtgaaacggaggaagtagcctcttacatatatttgtagcgtgacatgcatatgggacacaattatccgcgtttatacttttttttaatatagaacgtgtttattattgtccctcattacaaagtatattctcgtcttcctctcgtaagcttgagatcatgggtccattggcgcaaatatatagctagctagcgaccaatttactcataggtaggcaggtggcaagatcgatcgagcgatgacgtccgtgacctcagatttgctgcagtcgtgttcggaaaccatgatttcattcgtccacaacatgacggcttcctacgccgacaagagcaacgagtcctccgtggtgtccacctccgtcgtcatgttcatcctcgccgccgtcttcttcaacctcaacctcttcagcggcgtctccgacgtcagcgccgtgctcaaccccaccgtccgcatcttcctctccagcgcgctcaacctcttcctccccgtcatgtcctacctcttctccgaggccaagcaagcgccgctcggagtcggcgactccactaccaccaccagagacgcccactccgatgacctctcgctgctggcgcgtgtcatcctcacatggatgctcctcgtcgagctcctccgcaagaaggtggaggccatcctcatcaccaccggcatgcacgtctactccagcctcatcagtcacgccaccagcgtcgcctggctgggcaacctcgtcttcttcaacctccaggccgccggcaagaaggcgctgttcggcgtcctctgggtgctctgcgcggccaagctggtgcagcgcgtcgccatcaccgagatcgggaagcgctccttcgcccatggcaagaacgcccgcctcatctcctcctacatggcgcagctgccaaagctgctcgaggtggatgagcatgtcgccgccgacggcagcaggatggagcggtgcaacttcgccgtgatgggggaagagaacatggtgctcaaggccggaccacacggctacgagctcgacctcggcctcgccgccgccgtcgtcaccgtcgggaaaatctggcagaccaaacaacacccaaggctcaagaggctctgcctctccttcgctctcttcaagcttctgcgccgccggttcgagaacctgccgccggcgaccatgaaggagaccgacgagtgccgggacctcatcttggacggcatgtgcaaggatgctcaggccaccggcgacgtcccggcggaggtggcgctgttccaggtgctcaacgacgaggtgaacttcctggccgagtactaccactccgtcctccccgtggtgctcgcgagcccctacttcttcgtcgtcaactacctctgcttccccgtcgtcgtgttcggcctctgcgtcatgaccatcgtcctctgcggcaatggcaacgtcttgtacgccttcaagagcctaaccaacgacaactatgccgtctcatccggcatactctcgctgacgaaatgcctctggaaaaacgtcgtcaggtctccgctggtgttcttctccatcgtcgacgtctccatctgctacctcctcttcatcgtcgtcgtctacgaggaggtgtgggagttcgtcgtcttcctcctctccaactggttcatcgtctctctgctctgcaccttctccgccaagccccgccgccgcgagagccccaccttccgtggctccgtccgctgcatcctctggctccgccgaaacctcagccactaccctagcctcatcaccatcaagcagttcaccgtcctgagcacatgctgcctgtcgccgaggttgcccaccgccacgctgcccaggcatgcgaagctcgccatcctagaacgcttccgcggcggcgatcctctcagcaacggcggcgccgtgctgacgtcgatgggcggtaggcaccggcggttctcgcggctctcgtgggcgtgccagagcggagccgtcgcggaggtgatcctcacctggcacatcgccaccagcctcctggagacgaagcagcagcagcagcttccgacaagtgccagccggagccggaggacggcggcgaggctgtccagatactgcgcctacctcgtcgccttccggccggagctgctgccggacgaccgggaaggcacggagcgcatctacaaggacctgaagaagggcatcaaggcggcgctcggcggcgcacggggatactacctctcgtcggagcggagccggcacgagacgatccgtgcgctccgggtggacgcctccgccgccgccgacatgacggtgctcgagaggggcgccgtgctggggaagcagctggtggaggacgacgaagccggcgacggcgcggtgtgggagatgctggccgacgtgtgggttgagctcgtcgtgtacgtgtcgccgtcgcgcgcggaggagcacgccagggggcacgaggcggcgctggcgcagggcagcgaactcgtgacgctgctctgggtgctcgccacgcacaccggcatcgcccgcccggaccacgacggcgaaatcgaccagccggcggcgccggcatagcggagctcgcttgcattgcgcgcattggcgcgaacaccaagtaattaatgcggtgtactcggatgcttacgtctacgtgtgccctgtggtttggacgacattgctttcccggccatgtcttgttcggtttaatttccatctcatgtggaatctctctttgttatttgtgctctattatatttccttttgcaattgatgtcaaacatgttaattaatttgtatattttggcactcctatatgttactgatttgctaccagttctatataaatgatttttctgtacgagaacccttataggttacaagcaaaccgtaactgatcgagcttataaaaattgacctccattttcacgtacggctcacatctgggcctctaaggggggcattttcacatgctgagaccttaagtgttgttcatgcgaaaataccccctcttcacaaattctcacctcctctctcttttccctttacatacttcaaattttctcaattcatcaatcttatctcctctacctctctccctcacctattctcatcatattatattgacctactctgttgctgtcctttactatgagttgctctgctccgagcacgagcgagcggcggacggctcggggacactcgccatactgtaaatgaatgagcatatgaaaaacattctttcttaaccagaatgaacattgaagcacagtgtattttttctctcgctcccccatgaccatgtcagcaggtagaggttgtagaagtcttttgttctactagtatatatcaacttgcaaagtttttgcatgttcgaaaaaaggagaatgaacatggtgacacgcattaaaagcgacaaagaaacatggcctttttcttacaggaattatttttttaatagagccagcacgagattgtgttttttcattaaatatagtaggagaaaaatacagcctctaaaggtaaagaaaaggcatgttatacatatgctccagcctgaaccgtggtgcgcgtcaccatgttcattctggttctggaaaaagatttttgcactgcttacttttatataaaacatgcacgggatatacacatgattcaagtatagaattgaaacttgaaagttaaaaatgagagcatatgttcttcagagatcggctagaaatgcgtaaaccaagttcgaaggcgtattttacgatgaatcatataagtagcgaagatggagcatcagccttaatttggaaagaaaattaagattggaaacatatcatcatatcaattatcactaaaggaaaggaaagattggaggag

SEQ ID NO: 4517 - DNA, 44539 bp, Oryza sativa
atttgggaatgaaattttgggagagtggcatttgggcactggcatttggcaaatagtaaattctcccacacataactaaccgctgacatgtggggcccacacagccggccgagacataaacgacccactgacatgtgggccccacggagccgtcccgtccccgcactttcccctacacacaccagatcccctcttctaatcccaacctccaaaactcataaaactactctaaaccctactccactcccgctccgctgtcactgacaaccatggcccaccacgtcgctcccctcctcctcctcctcacgctcgccgccgtcgccgccgccgcgtcggaggaggcggcggcggcggatacggaggcggctgcggccgtggaggccggcctgctggtgcggcgcgaggcgcagctcgcgcggctcgaggagctcaccgagtcgctcgccaagtccgtccaggcgctggagtccgcgctcgccagatccgtggagcccgatccgccgccgccggcagccgccgcggcggcgcccggcgaccggagggcgccgcagggggtggccgtgacgaagcggaggccctactggtccgagcggttccacttcgccgcggccgcgcggctcggggacggggcctacgccgccgcggcgaccgcgctgccctacgaggacgcggatgggctcaccaagtacttcgccgtcggcgactcccgcggccgcgtcttcgtgttctccgccgccggggacgcgctgctcgagctggagcccggggtgtccggcgagccgccggtcaccgccctgctcgcgtacctctcgccgcgccgcacggattgtttcctcttcgccggccacgccgacggctccatcgccgcccaccgcctcatcgagtcgtccccgcacggcgatgactggctcaccctcgccgccgcgtcgtcccgcctcctcgtccgcggcctcgacgccgcccccgtgctccacctcgaggcccaccacgccggccgcgcgcgctacgtgctgtcctgcgactccggcggccgcatccgcgtcttcaccgagaacggcacgctctacggcaccgccatcgcctcgtcgacgcctctcgcctttgtgaagcagcgactcctcttcctcaccgaggccggcgccgcgtcgctcgacctccgatcaatgtctgtccgcgagacaccatgcgagggcctcgctgaagctctcaatggctccctcccaaaggcctactccttcgatccttccgagcgcttcaaggcctatggtttcactgatgccggcgatctcgtgcacgtcctgctgctcggtgacattgccagcctgaaatgcagggtccgggcaatcaagaaggctgagatcgacaaccccgtggcgatacagacgatcaaaggctacctcttggtagccagccaagataagatccttgtgtacaacacatcaactcagtactatgggagggttggggctccccgcctgctattcgccacatcaatcaaggatatcaagtctgtgtttgcgggttctggtggcgtgatgcctgcttcaccagctgggaagccgcttgttgccgcggacagggagaagctcgtgatcttgggactcggagatggttacattgctatatacaggtccaacttcccggtgtacaaaccggagagcaatgctgtggtgtggagtggtccagcgctgctcttcctcctgttcttgattggcatttggcaagtctatgtaaagaagaaggattcgttgggctggactccggaggagacatttaacacctcagtcacagctcctacagggagcattttgaatcattcgaccagtgaccgtgccttcgctgatagctcaacaagaactggtgagcgaggctatgttgatggcacaacaagagccagtgatagaagctatgtggatgccaccacaagagcgacagaccgagcctatgctgaggctaccaggggtgtggacctacggggtggggcgttgagaggtgctccaagaaggtatgtgtcccctactagatatacaggggccgcaggaattccatatcgacctgtttcaacagagcctgtgcttcgaaccacaccggagctgaagtatcgaggcccaggtatggagccccctggttttcccaagaaaagagacacattgttctcaagcaaccagacagtagtagatgatcatgttgattgactgtttaattagcggtgtagacaacacgctaaattttgaaggggttttgaaaatcctgcaccaatgtgggcagcgatccacatgtgtgttgttgtaagatgtaactcaaaaatgttgtatttgcatgagtacattacagccattgatatgatgctgcagatggtgaaataactttgaaatttatgggttacattatagctatgaaagaagggattgttgagctgttttcgtatgacttccatcttcaacgatgtaggaaaattggacaagtttacaataatttttaacaatgataggctggtaggatgtactatggaattgctttaattatacagtggcgtgttgagcatcagaaaaattcagcaagttgcatttgcaataattttagccatagacactacaatatcagtgagatctttttttttttcagaattcactaaagttattaatgacacagtttgcaaactttaaagctcaacacatcacgtgtaacattttaacttgattttctatcactatctgatctctctattacctttttgcttccaagataaggaggatctgctgactgccattgcagatattttttagtggttgcaactgctacatcatcttaagttggtgacaatgacatggggcttagaatggtagcctgtgttgtctaatttttgtgttcttttagcatgacaagtgattccttcaatctgattcccatctatagatgataaccaatttagttatctgggagatatcataccagaatttattctgacagttttacatgaattagaatttaatctgacagacatgaactctgctcggtctgcagactgcaactacaggattcaccggttcagccattttctgcaggacagcaaaaggccttgcattcctttgttcactgaagtactgtttagcaaaagaccagcgctgtcagcagccggatcaacatctgtcacaaccggaatatgacaaccctagagtttcagaagttgaaagcgggtggagcattcaactctttttaggtaggtaggttcagactttcagtagcaaatcgtttcgtaggcgagcaggatcagctgcctgggccttgcatcctggaagtaacttcatgcttctaattgtagagcaatgctcctgtcgttatgctaaaacaagttcagattcgttttggttaacattaacttccacttcctcccttgtagtgggtattattccgttctatttcagtgggcagtaattcattgctaggcccttgcattatcaaacaagatttcaccaaaaaaatgtagacctgatatatcatcgaaaataaaccggatagcagcagaactgaaactctgggatgacaacataatttgagcacaaatgacccactatcattgcctctaaaatgcagaaaccggaggcagtgaaacagcacaaatttgaacttgagcaacaacttactgaaacaaaaagatatgaatataggaaaacaatgtaattctttactgcccagtggaaatttttcaccgaggaacagaattcatcaaatgtgagtataatgtaagctccaatgtttgctcacaggtgaagtgaaaaatgcaaaacgtatcctgactgtgcatcttattacaatctcaaggcctagaaaacaaacttcatattcatggtaaaatcacgacactgaaccagtttctctcgtctaagtggacttaacgatgaagttttggcggctgatggggttcatgatgactggtggtccagcggtgcgaggccagacctggaacttggtgtcagtggcttgccaccactccttgtcagagacagtctttggaatggaacctgcgtccaatgaatgaagcaaattaaggtccaatcttccgggaggttaagcacatgcctgtaagattaaactcacctccaaatgccttcttgtcagaaacaaatgtgtcacacaggtaagcaatggcaaaagaaggatccaaccaaggacccagcaatgtatccggccgtcatttttgctgcacaatcatgaaatggcatacagattatcaagtctgatagaaaatgaatgttacagattattcatatgaagagaagcatgagtgaacatcacagtctagaaaaacaagtcccctgctaactgtagttgttctcaaactataaataagcagctttcttgttcattggtataaacacaacagacagacaaaaggaaataagctccagcgtacatatagtcaagcgcaattgtgtagaaatgcagatagtcaaatatgattccaagatatacaacttaatctccagctagtttaacaagttagattagtgcaagatcaaatggcggtcctcttgaaacaagtgatatgataaataatactggacttattgtggaagagtaaatgtgcagtacgactcaaaccacagcctacatataccttaacagaatcagttatagataatagagtagacacatcatttattctactgataatactccactatctcacagccaaaatgcaggagcaaactagacccaagggggcttattgctaactgtcgaagttgtcaaaactataaatcagctgctttcttgttctttggtacgatggaataagttccagtcttccagcacatacatagtcatccacagttagaaaatataactatcacgcctcaagcgcaaatgtgtagaactgtagataaggaatatgcgattccaaaatatacaactgaatctccagctagttcaacagattagattcgtgcaagatcaaacagttgtcctcaaacaagcaatatgtgattcactggacttattgtggtagaataaatgtaattaaaaccacaaccatcatatatactttaataaaaatcagctgaagatatagacaccttgtttatttattctcctgacaaatgccctactctctcacagtctcacatagcaacatctagacccaaggggattattggttgaagcaacgggttaaaatgaaagggttggcttgggtgggagtggatggttcatccaatcgaaaccagtggtagtatcgatggggccattcttcaactataatggtgtcaaagtatatgttcacaacagcaattttctattcgtaatgtgtattaatagtgggattagcaaaaagtcatttgcctccgcccctgctccaattaatcatagtatttggttaagaggatcacagagtagactccgcgatcgatcgatcgatcatccctgaggaatcggtagcttgtaatcgatcaaacacgaccacttcaaatctcgacgattcatgcacaaattcatcagagaagatgaaactgggacccccaaaacgcaggcgagctcgctgcgcaaacacggcaggacccacgaacgaacgagttaggaagcccagcttatacgtagagaagtccgacggagaggcgcagcaccatggaggagatgaacggagagagcagatccgcgagagatctgggagccctaggtctaggggggcgggggtcggcgagcacgtaccttggttcggatcggattccgccgccgccgccgccggagagagaagagaagagaggagaggagacgcgttcctggaaaggaggagacggtggcttcttggcttctctctcgtgcgggttaatgatcgattcctatatgggcctcgtgggctttttttgaaggcccatagcatgtttatgcaaaatggcccctggattaaaaaaattgcaaatatccaaaaggaggaaggggcagaagtcagaactcacaagcaaaattctgtgtataataaacctgcagctagctgcagactgttgattaattgaaccaaactgaacatatatatatgttcacagcaaattaagcagaatgatatatatatatataatatgagatgataaataatacggtgacactgccaatgttgcaagatcgatcgatcgatattacgtacattacatatggctggcacataaaacaaacttgctatacattcgatcagcgtaggactgaaacggcaacatcaacgaactacgtaccgatccatcgatcgatcaacattgcatagtactctctcgtccgtttctaaatatttgacgcctttgatttttttaaatatgtttaactgatcgtcttatttaaaaaaattaaataattattaattattttttatacatttgatttattgttaaatataattttatgtatatatatattattttataaaagtttttaaataagacaaacggttaaatatgtttaaaaaaatcgaacgcgtcgaatatttagaaccagaggaactataaattattcatggtgcagtgcatgtagatgtagctaacctatatatatattccctccgttccaaaatatttgacgccgttgactttttttaaacatatttgaccattcgtcttattaaaaaaaattaagtaattattaatttttttctattatttgatttattgttaaatatactttaatgtatacatatagttttacatatttcacaaatttttttaaataagacgaacggtcaaacatgtttaaaatggttaacggcgttaaatatttaggggatgagggagtatatagctagcctattctagatgatactgattaataagcgcgacaaagccggcgaggtagaagacgatgagcggtatgtcgagaacgacgtagtgggcgaccagcatgtgcttgtagccggacgcggcgcagaccccgccggcggcggcgaccacgacggggaccagctcggagaggacggcggcggtgtacgcgccggcgaagtgcgccaccagggcaaagaaccccgacaggaaccgcgccccgttcgcagccgcccgcgccgccgtcgccgccaccgcctgcgccgtcgccgacagcagcaccagcgccgccccggcgcgcatgaacgtggcgccgccgctgccgccgccgtaggcggcgcagggcccctgcgacgacgacgcgtcggcggtggtgatggcgaggacgaagagggcgaacgccaccgccgcccagcccatcaccgcgtgcgcccacgccatgccgctcaccgacatcgtcatcctcaacactagcgaagctgggcagctagctagctagtgagtatatagtggttagtgaagtggagatcgcgatgcagcatgcatgagaacaaattaagtgcaagggctacatatatagtgcaaagggctaaagcacaagtcaattcacttgttggtggcataggaaatatgatgtgaacgaaacattacaggggcgtagctagctaggtggcacctatttaattatagtatatgttctagttaatataataaaaattgtatagtggaccacctatttaattgacatattacatacaaatggaccacctttactcaaaattatagctacaccactaaaacagattctagctacaccactaaaatataagggtattccaaaatcaagaaaagaccatgtcgcaacttctcaccaaaatacatgacaaaatcaagctatgaagcatgtggggggcaaaaaaaaaaaaacattgccaaaatacatgacaaaatcaagctatagagcatgtgtggggcaaaaaacattgcgagaatatccgcttagattttaatttagtgtgtgtttctttttatgttttcttcctgtttcttttattttcctctctctttcacgtcccttgatagtatttagtcccttggtaatattgtaaatactttctattctcttaatataacttcagtttagcgtggctacgatttcaaaaaaacatatatataatgctgaggtgagcttgcattggcatgcatgctcgatgatcagaaagatgagatatggatcagcagcaactaataacttaccacagctgatcataatctctgcaaagttaattaaacacatgatcgatcgattcatcggtcttcgagattggtatagtaggaaagattacttgatgaggctggccggctggcttttgagatgagcagagctagcacacatgtgaagtcgatcgtacttttttccccatttgcattgcattgcctgctacgaatcctaatcccgtttctcttaattacgtacgcgtccaatctctcttattaatttggctctgctcgatcgatctgctcttcgtcttttgcttaatttgttaatttgctcttgaggccatcgcacacatcatgagtgactacttgcttctatctttgtatacatctttcttctttgtctatctaggaggagtaggatttcctcatcacctcccacaccattaattgattgccaagaacgtatggctactttcttcgccggtaagcttaatgtccttgtcataatcatgcatatttcggcttgtttgcacctaatttcctcttctccattgattactactcttacttaggcctcgtttagttcgcgaaaattttttttgagtgtcacatcggatgtttgatcggatatcggaagaggttttctgacacgaatgaaaaaactaatttcaaaattcacctggaaaccgtgagacgaatcttttgagtctaattaatccgccattagcacatgtgggttaccgtagtactttatggctaattatggactaattaggctcaaaagattcgtctcgcgatttcccctctaactgtgcaattaatttttatttttatctatatttaatgctccattcatatgtccaaagattcgacgtgacgtttttttaaaaaaaattgagtaactaaaccggacctttttttttagataatggaaatgtgttacatctccggcctctgcccgtaggcacacagccaaaaaattcagacgtgaacagaaaagttaaaaaagacaagatgggacaaacccccaacttctgccgatgatatgatctactaaaataatattttttttcaaaatcacgtagattctatcacaaaattctgtaggtactacgccatccaaaatggaataaaagttccttggctactaattccaagcgtgtagcaccattgcgcatagtatcctgttgttcctgtgaaatcatcatacaccaagagtggagccaattggaacacatgaagataacctgcatgatgttagatatttttttatggttaaaaactatatcattacggcaacgccaaattgaccaacataaagcactagctccaaacaaaccggaccttaattagtctatttccatcgtcacaatatatgcatgtacaggatatatcatgtactccctccatctaaaaaaaagttaaccaaagaggggtcatacctcctctaggttgcctttttctgggacggaaggagcatgtaacttgggctccatgtgattcaattcctcgggcttggttcttgtttgatttcgatcgattaattaatttagtttcttggttattgcctctgctctgctccgttgcaacacagcttgtggtgttactacagtacattctgatagctccatccatcgacttgaaatttccagaggaaactcgcttgctaggtatcaccaacaagcacaacgatgtgattggatcctatacagataaataatttagagtaaatcacgtggccaatatctagatttgttcgtgtgtgtcatttagatcctgaactcttaaaatttatttttagttttttaaacttattaaagtgtgtcattctggtttcaaataggcacaactcctccaagatcaattggcgtggcatgtcacacggatattttagtcgtaaaatttatttttccttctcctttcttttcctcttcttttcttttttgccatacttacatgaaggaataagaaaagagagaggagatgaaaaagaaaaataaaaagagtcaatatttacgtggcatgccacataagtgtcacgtagaatcttagaaggatcatggcaacctcggaccggaatgacacattttatcatgttcgtagatctgaaaatgtattttaagagttcggaaatcgaaataatatatacggatgagtttacgaaccaacgaaccaaacactttgcgcaataatttaagaaaaaccatttagattttaccaatggagtggttacatgcatggctgatgggaaagaagggagcaacagatgaacagtacgtagaagttgggagtgtaccgggcaggacgtccaatctttttatttcaactacccacacaagatggtgcggaatttcatattgatataacagaaaaaaaaatcacaacactacaatcctataactaggaagaagaagaaaaaaagatcaccccaccacaagctagaggctccaacacataccttgagaagcactagcaccgaattggctgccgatgtgcgcgactgatcgccgctacccctacacggggaaaccaatttttcggttcaaaacattttcaatatctggtaaacattttaatgtactcgtcactgtaaaaaaacacttagaatttaggcttatttagattatctcaattacatatgattattgtagaaaaaaacacaatgaacgttattacttattggaaccaagatcatgcgaatgggcactggaaaatgaaacatatataaaaccttgtggtcgttgtctgatggagtatttttcttgtacttttttgaggaagccgatgcttcaacaacgctgagcccaagaaagtgtaaagtgtagaacaaatgtatggactgcatttcggaattcaccagtagaatcaagaatggattaattttgcaggatgatattgaccgcaatcaatctcaggagcattttctggcctaaataaaccatatcaagttcgttccatatttggagctagtgtttataattagctagcatatcattatggtttcttgatcagaactccacttagagcaacttcaacagactctttatttagctctccaaggtaaaatttagttaacacagagaaaaaacgagctccaatagcctctctatccggatggcttccggatggccaaattgctcctccggctagctaaatgtagccaacctcctccactggctaaaggtgggtcccaccaccactcccatccccatccaacatctctccctgccggcgacgaactgagggcatatgccggccatgagcgccccccgccaatgtcgtcgtctaggccaccgtccgccgtggcagtcgtcgtcgtcgccgtcgcgcctcacgcacgagccgtcgcagccatcgccgctgctgcgcagggagccaccgccgcctccgcctcgcgcgctggagccgtcgccactgccgctggatcgatgggtcgatgctgccacgcgggagaaaagaaatgggaagagaaagagaaagagaaagaggaggaagaggaagggaatggagatgggaggatgacatgtgggtttctttgtgattttggagatgtaaatagagagactgttggagcatacatctagtttgactacccaaatcagttggagagttggctaaatagatatttgaagagtctaatttaaagatgctgttggagatgctcttaattcagaaggaaaaaacaggtgaactaccagaaaagctttgccagcaaagtcatgacgtatacaactataagccatcttcagcgtactctaacagaactccatttatgccaattgaagaaatcgttgcaagttaaccgcagtttgagctaactattatgttataatcttttgagttgcggttgataagctgtggaaaataaacgaagcaaccaaaagtaatataacagataaatagcaattgaaaatttatatccatgttattagtgattgaaaagctagtcgatcgctagaaaataaactgacaaaaaaaactcaacataaaataaagttttaaaatctaaaatttggtcgcgattgatcagctaacgagagcagaagatggaaaatttgttgtccgaagaaaaaagaacaaacacagacggaaattaggcctgtttagatcccacccaaaaactttaaaccttgtcacattaaatatagagtatcaaatatagacaaaataaactaattacatagattacgtgtaaattgtgagatgaattttttaaacctaattagtccataatttgacaatgttgtgctacagtaaacatttgctaaagtttggggtgtaaagttttggcgtgtcacatcgagtatgccagcacatatttgaagtattaaacgtagactaataacaaaacaaattatagattccacctctaaactgtgagacgaatttattaagtctaattaattcgtcattagcaaatatttacaatagtaccgcattccgcgataacaacgcgaaaccgagcggtctggcggaatgaaacagcggtctcgctcaagcaatagcaatactagtgtcatgccgatttaattagcaattaattatcttgattagtgattaattaattcctaatccagatacttaatcactaattattattatttaattgttaattaagtaattaattactaatcaaacggagcccattggacagtgtcgttgattgcttgggcgaggtcgctcttccatccattatgcgagactgcgtggtctcgcgctttcaccgcactcgataccgctcgcgatgtcattttcgcgtaacggttttgcgagaccgacaatatgttttttgcaaaaaattttacgtctcgaatattcccgagaaaaaattgaatgaaatgtatattttcaaatttaattatgctttggtatgtcgaggacgacgtagtgagcgatcgacgagcatggacgcggcgaagacgaccccgccggcggccggcggcgaccacggcggggaccagctcggagaggccggcgacggtgtacactccggcgcagtgcgccaccgccgacagcaccagcagcgccgccgaggcgcgcatgtacgtcaggagcattttctagcgcctaactgtcactgcacattgaagaaaaaaatggcatgaaaaagtttgttcgatacttggaactagtgttaattacagtaccattttaatatggctcgtagataattcagaacgaaaaagtaggtaatttaattatcagtaaagctttgccagcagagtcaccaagtatacaactttctttcagccatcttcagtgtgtactttctcacaagactccgctttataccagttgaagaaatcgttgaaagataacggcagcttgagctgacgattctattctaatcgtttgatctatggcctatggctgaaaagccgtagaaaattaaagaaaaaacatccaaaaataaatatacaagtaaaaatttcatatgttattagcaatcgaaaagtaaatactagtagaaaataaactcggaaggaaaacaaacccctcaaagtcaacataaaatcaagtttgaaataatttcaaattttggtcgtggctgataagaccaacgagcaaaacgacgaaaaaaattgttatctggaacgaaaaaaaaaacacggtagagattaatactgtactaaattttcaacggttgggtcaccttcaattaccaaccgaagcaagcaactggtaaagcaaatcaaagcaaaagatgctagtagtagatacccaccaacgaaagaagccgacgctcctccctccttcctacaccgcgtccaccgcacaccgcccgagggcccaacacccggtccacggtggaccgcgtccacagatcgatccctcgcctcgagcaagcaaaaaaaaaatccgtactactctacgtggcgtggcagtcgtcctcctccctcccacgtgagcctcaccgacaggtgggcccggggagaccgtggtccccacctgcagtggcgcgcgtggtcccatctcccaaagcgagatgagtttgctgctgcagaataaaaggcacccagaaaaaaataaaaaggcagaaaaattcggcggaattcgctgttggagtgagtattcatcgaggcaaagctcgaatttttggtactatccgattggtggcgaagcagcggcggagcgagagaaaatcgctgtaggaatcgggggagaaggaggagtagatagagggaggtggattgagctgtgggaggttaggttggtgattggtagaggaggaggaggaggagatggagaggaaggtggtggtggtgtgcgcggtggtcggcttcctcggcgtcctctcggcggcgctcggcttcgcggcggagggcacacgcgtcaaggtgcgcagctacgtctctcgccgccgccgccgaggttcccggcggcggtttcttgaactgccttgttactactactactttctggatgaactcgctcgcgttacttttatagatctcggtgtgtctgctaagttgagcttttgtttggatctcgctgtttcccatcggggatttctgacctggtgggagtagatgcgtgtagcttatccgtggttgttcgctaggaaaatgcgctgtggcagaagtgaatctttgagcctttttatgcttttggttgattttcgctagagctagtgctgcgatcatgttaggtgtagagtggatgtttagttcaatctgattcgactagtgcgtgtaaaattatatggttgaatcagaatctgtccaagttatttccttttctggcaatgttcatcttgtttgtcaggatatagcactattagtctactatatatggtgaagctttacttattagaaatctttaaactcgttattctactgttcttttactcttgacaatgcggctagaacagcttaatcattgtgaaactcattacaaaccctagtgcctgtaagcacattgcagatattttcctctttgaggcttgaggatagactaattttgcactgaaatgcatgtaaaatcatgccgcgatgtaggaatataaggtggtacatgtttatagctttacataatgcaaatgcaaacctcaaaagtgtcaaggatcttatgctacgcagaaagttcttctgactgcaagtgaaactttactatagaataacttaaaaaacaaacagactggacatattaactgtggggctgtttggcagcgcttgctgcagctgcgctgcacggacggttagaagaaatatgagttcggttcctttagtagctggctgtggtgcagccgcagccagggcttctgaacaggccctgtagtattaactgtttcactatgtatgatcttagattttacatatagattcttgcaataacagtcataccatcgctaaagcaatatataattatcatgtcccttactctttttagagtgctagattgtaataattggctgtagctcttctgagcaaaggccgggatgttctattccattatctaaaaaaaataattatcatgtcccagttataatgcacattgcttaactcatgcaggtttcagatgtgcaaacttcttctccaggtcaatgcatatacccaagaagcccagccttagccctagggttaatatctgcggttgctcttatggtcgcccagtctattataaatacagtggctggttgcatctgttgtaagaggcatccagttccctcagacactaactggagcgtagctctgatctcattcatcgtgtcttggtaaaactctacccttgatgtttattgtgttattttacctttttcctctatcttgacgggtttcaacttatcttaccgatctaagagaattctgaatattattatgttatgttgaacctaacttagccttgacagtttgttaaacagtttttatggaaacaagggatcttggttgccaaatgcgttggagttcttgactctgtcattttggcactacaaaggttccttgcagttgatgccttatttcagtagtctttattaaaacatgtgtgtttttctgtgagatagcgtactagcattaggctgctgtttgttttattctttgcaaggaattcatatgagtggttcacatgatggctaaatagaataacttttgcatagatttcaagtgcaattagtaatgtgaagtgcaattctacctttttcttggaacatctttggggggttagctgtgctttattctaaggtagggttcagatcagaatgttgtggcttattttgcggaagtcctgattcctgaatgctatattttagcaaaatactctgctatttgttatttgccataacgtcgtcctggatattgttacattctgcagggccactttcataatcgcgttccttctcctactgaccggagctgcacttaacgatcaacggggtgaggagaacatgtactttggcagcttctgctacgttgtcaagccaggggtcttttctggaggggcagtgctctcacttgccagcgtggcactggcaatagtttactacgttgccctatcatcggcgaaaagtccaccaaattggggtccccagcagaaccaaggcatcgccatgggccaacctgtgatccctccacagagcagcgaaccggtgtttgtccacgaggacacctacaatcggcagcaattcccataaatcatgatctgtgcaagctgtttcgagggccattctgatacattatgtttggtttgtataggcctccaggttagaacagtagcagtaacaattgttgttaggtagagtcatgttttttgctttcttcttccccctctttcttgagcgctactgtcgcacgttctgcttcatcacagcggatattcgattttacatgaaccgggcaatgttgaagaaagcttgagtttcttgctatttgcaaattctgaaggttttacatgataattggatcatggatgtggaattacaatctgtcttacacctgtgggaacttgatgagcagtcattcagcacacagtggatgctagctgctccctgaaccgagcaatggtgtcgtggacgatggcgttggggcgcaccgtggcatcgaccacggtgatcccctccgcctcatcgatctgcagcaggtcgagctggctctggagcaagctcgccggcatgaagtgctccccttccattgatctcctcctgatcctgtcagcaatcacctctgctgatgcctccaggcacacaaacttcaccctgcagctggagtagctccctgaacctgacctgaagctgcagtctccttccctgaggatctccctgtacttctgctgcaatgccgagcagctgacggcgacgtcctcgccatgatccagccgctccctgacagcgtcgcggagggcctccagccacgggatgcggtcgccgtcggtgagagggatgcccttgctcatcttggctgttgtcagggacagggaagagcagagaagttcagaaacgaaaaagggaaatgtaggttggttggttgtgagatgatgaattcttcagagaagtatattgatcttgatcatgccagacctttgtttgcctgagaatggtagtcgtctgcttcgatgaagctgcagcctaaggtttcagcaagcagtgctgctactgtcctgcgaattcacaatgaaatgctaaattcataagaaaatgtgataaattttgctgaggacaaaaaaaaaagaagtaaattcaagatttaaagctgaacagtactattacaaaatctgaatgtaggtttgaaagtcacatcctaaaaccaactcttcagcaaatgcagaggttttctccgaggaaaagacacagcaacatccatttgacatcacaatgttgaattgttgacaaaatgcatatcagtgtactgataatgtctctttctgcttgcttctacttaatgtgcctaaaattgaccaacttgaccataatattaagcatgaactgagctgaggacttgaggttggtctaaaacaacacaatcagtttgaatacttgacagggtaatcagaaagaaagaagtaataatcttacgatttaccgcagccactgactcccatgatcacgattgccaaacctgcaaccccagatgttgaacaaagatgaattagcagacacccaagctctgctgattacgattagtacttgtaatgataatcccattccaagcaattccttgaattaagctttaacacttcaaaaagaaaacatcaattcagaaatcaacacagcacctattctgtcagaccaaaatcacaggtatggtcgcaatacatgtttgggatccatcacttcagttcgcaagaacaagaacatggtgaacatgcacatgaataacaggaaatctgaaccaattcggtgcagcgaaattgcgagaagaaactaaacagatcaaaagagttaaaaacgaaacaagcacgcactgatcctggtcactgacctggtcggtgcgtgagatcggaggcagccatagatgagcttggtggttcgtctcgatctgttcctacgacaaggagtacgacaagagcgtactaaacctgcgaataaacgaggaagaagacgacagcggcggcggcaacaactctacttggcttgattgctcttcctttattttatatctcgagattgaagaacaaaatctatcattttttgggagaaatttatttagtctagtctagaaattttgacttgcatgaacactgcaatttggcatttttgacgtagtgagtactatggccatcctcataaaaataaggagaatttttcccgaatccaaacatagaaagacaagattgttttaggattggacggcgaagaaagagacttgaagcgaattgtcgtctgatgactaaaactaccaaagatgagacgtagacgaaagcgtcttcagttcaaagcaagaccacctgacgtttcacctttcagttcaccgtcactttagactgggacctggtgtttccaaagactcttttacagttcattcatgtccatgctgtcgcattgttgttgctgctgactcagagcttatcacacatccttatccaagaggaacatttgtagtatcaacagaaatcatctttcaaaggatattgttgttatacaggatcctcccaagaaaatgacaactttctatagagaaaaacaagttaggacgagagttggtgatgatggaaataccaacttctctcaagtcttggttgattggattcaagttgatgctttcatgttcctctagctcagcaaagaccttggtggtttctactgaacttgtttctggtctctgaatctttcagcattgcttctggtttctgaagcaaggaagaaaaaagctgttgctaccggtgagaacaaagatgttaagatgaactcaaaagatgggggcaaaaacagaatccgagatatacataatcacatacagtaccaaattcatctgatctagtaatgtagtcacgtaagaacatgcaaacagctaggtaactatggctactttctgaaaaaccctgaatcctgaagtgttttgcaatattctaagatgacaggagatttcttcaccatgtcccagatcttcgctgagctcctcaaccagtcacgctcggtgagattcttcgagaatgacctcgatggccttgataagatctgcacccacagtaatatccacaactaagtgaattgtgtccagagtaaacgtagtactctgaaaagaatcgtttattctgcctttacatcagaatcaggacaagagtcatcattgtgttcagggtcagttctgcaccatattatttttatttttccatataccatgatatgcatctatcgattaataaggatatgcagaactattccttttcgttacttgggaaaaaaagaatgcgaagtgctaattctgttaaaatatgaaagagctcaacctgctgagcgccaacaaccagttaggtaaagctgcaagcatacctgatcacgaagcatccctaacatggatggacatgtccgatactcaaaatttgttgagttatcaggtgttcttaatggaagaagatatatgtcctgctgattggagctcagatcctcaatcttcatgcttgaaggaactgaggagtcagaaacttgaggtgttgctccagagcttccaatgctaaaggaggaggacttgaagtgtttttcaagaaccctcttcagaaccatgagctttgaaggagaaaagtcttgttcccgcaatctgttcagttagaaaaccacaccattctaagattatcaaattaattggtataaaagattggattgtagaattaagtgcaaaagtgttgtgttcatatcacaacaactaacttcactgccaaaataccggaaacaacaaaaggatctctttgttcatcaaaaaagaaatgagcatatgataacataagaaaatgcaaacaagcatgaaactgagcagtgttcacctagcatgcacaaaacagagatcagctatgtaatcttcaatgcctgattggttatcatttttgttttccttgtcttgggtagttgaggaggtcaataatgatggatcaggtatgttgtgcttcagtaaatcaacctgcaaaaattgtattaaatcaccctttcaactttctgccattggcagaaactaaattcatcaacacagcataaccacaaattttcataagtacaatatactaatacggagtttcaggtctgagctctctaatacgctggaggatataaatgtgttcttaactattcactgtaagaaaatgtgatcaagtggtatggatgataaaaacaaaggcataaacaaatatagacagacaacttaccgtaagaatgaggtcccacatggacaggtcattaatcccctccgatacaaccaacaaaatattgcaaacagatgccaagaaaacaccaagctacagcaattccttgcagaacaacataaaacactgatcaactattcggtactgtcaagctcagttagcagtgggtacaacccagtgcgagaattgaagtatagcatttacctggattcccattaactcatgagccaggtctgctgataatggatcaccactgaggataggaattgcggatgaaccatctggcttcatcatatcaattagtacggagggactgaatactggctgcaagacaaaaggtgattgttttttagaacgttaccagcaatatgtttaacagctctggcatttggaacattgcatagcagaaactgagttaaataactcttatcacctgagtgtctagaagtataacccgttcattagagatcctgatatcaatgccagcagtacagtgcttagccattgctttgatttcctcagtttgtgtagcaaaaggaggaagcattcctacaggcaatactcaactaaatgagcttcggtttgatctaggtgtccacatggaacaaattgctagccaaattacaactcttcactacgctttttcagcaagccaaaagacacaaaagaggttaggggaaaattgatgtatggaagaaaaacagaagcttaaggacttaatagagtgcatattatcaacagcagagtgcatctacaaaataattctgacaagcgcatgttttgtttgacacatgaaagtaacaacaatgaattgaactgaaactattggaagactgaatgctgaaactattggaagaatggatgattgtaccaggtgagcttccatcatatccataaagctcgttcatgatggttgacttgcccacaccagttggaccaattactccaatcaccatgaaatcattgttctcagtcaaatactgaaaaatataggccccaaaagaaacatgaagatctcgatcaatcaccggtttgacatttcaagaactctagaagttatgttatacaaaaatactttcatcaaaatgtcacaaaatatctgaatgttttgagggatatatctacagatacttttaaataatcttgtcatcattcaaatccagtttcatgcacaaactgtaacttttgacgtgctagacaaaggtcgcattggcatatatcatattactgcaagatttaagctttatcatcagggatagtattagaatgcatctcaagagaacctaggaaaccatgaactaaactgtataagagctacgagcctacaactaacaactgcattgaacaatggattattgcattaaccagacacaaaaaaaaaaattgtcaactgaatctagttataggatctcacacaattttatcacaatgcttgcatcgaaccagtaagtaaaccctgaacagcaaaaggaaatgaaagaaacaagaagcatatcctcgtagcaaagccacttgaggacgcacgcaccgggaggatcttgtcggtgtggacctcccacgcgtcggagacgaggctgagcgagccaggctgcgtggcctgccgcgagcggcccgcgcctcctccgccgccgccgtcgtcgtcggcgccggaggacgaggggggcggaagcgggggcttggcgagaaggatcttgggagggggaggcggaggcgggtgcgaggaggaggaggacgagccccggtctccgacgccggcgagcggcggcgctccggcggccatcgcgcgcggcgtgctgctgctgctgtgggcgtctctagttgaggaggaagccgtcgcttaattaatcggaataagttcacttgaggtcccttaacttgtcagcgaaatccggttttgtgtgggcccaactgtcagacgcggtgctaggaggcccggcccaggtaagcgtactctttgggccatcctactgggccggatttttttttctatactcttctgtttataccgtggtagaccaagaaataaacagagaaatttttactacggtcatgaatatcccgtccgttcctccggagcattttatgttttgcaagtacttaaaattaatttttattcttttttaaagttattttattagttaaattttgaattttgattacgtggattctcctcctcagcagcccattggctgaaaacgcttgatttccatgtatgagaatcggtctcataggaatgtttattttgggtataaaatttgaatacttaaaaatgcttagtatttaacatttcgataaagattcactcggtctttcaaattttggtcataataatttctaaaatgctcttgtagcacagtaataacactgttaacagtagtagtgcaggttcagccatgttgctccacgtaggagtatgttggtgtagtagggtgctgggaccgagacagctcatcgttcccctacctctctgctgcattctggaaccctctctctctcttcctgtgacccacaacactccaaccagacaggcagaaagcaagcaaaaggataggaaggagccaagaacaccaagaacttgttggagctgagacagcagcaccaagcaagaaaccggatccaatccatccatccatccataggtaatgatcgtcccttattaccttccctacttctttgaaatcttactgtcttcaattgctcttttgcccgtgaagttgtagcagttcgcagtttgtctgtttcttgggaagtgagtgtgtcgatccctaaaaagttcatctttttttgccccctttcccacgcaatttagatgaactggtcaaggagagcgcgatgatacagccactggttgtacaaatctgtcccgattcgttcttatgttcgtggtctgtgctgtactagcgctcgttttgttcaagcgattcagaaagtgacaaaactttggggcattctcttcggccaaatcttttgtttgcaccatgcggtagaatctatcctagcttgacgattctggagccctgaccacgaacttgtaagcgaacaacctagagggaaaaggaaataggtggttccgcattgttgaattttgagtgaaagagtgtacctgaggctccacaattcactgctgacagccgtgttcaatccccaacatgctaacaatttcttttttaaaaaaatgtttggagagacgtctctccctccaaatctcgttttttcttttaattcattgctgaaagataaactgaaatgctgctcacatggcccggcttctctgatgttcaaaatacaaaatgtgattctaagtgttctgaggtggatcccatattcagaaaagattaagatttgttaacgtgggttggtttgacatgcatattgcatttgcttcttactagggggttggattgtgtgagcttctcttgttttagccttttagcttaactcactacatgtggtgtcctcaagtaagcatcacagttggggttaacagtcagataactaaaccgttttgcagatgaattatttgctaaaccagtggttgtagagatgaacccgataaattcttttgtaactgaaaccggattgctactcatttgacaacagctttttgcaactgtaaagggcagccagaaacaataaacagagtgtgtgcagacttaaaaccatattccctccatttcacattataaaacgttttggtctctccatccctcgtctagattcactagcatccatatgaatttggacacatatatgaaacacatacatggattcatgcagaatctgtttaaaacccaaaaaacgtcttataatgtgaaacaaagcaagtggcttagatcaggtttgttgtcttgtgttcaattttttcaactgaataatagtacttggtagaaaatcttttaaaaaaacaatagtaccaggaaagatattatgaatgtaggcacggttttgctttgccttgtgcaaatgatagtctactaataattcttccacgtagaccatacctaacatggctattttttaccatgtaattccctttttgttgttacaagtaaagcattagagtgatgatatttcatcgttcgtgtccgtaatctatagaactcttcagtcttcccctgataactagtgtgtacttaattttgtagtttccaatggctggcaagtacatcgccgctggtcttgttggttcctttgccatctcatatgtttgtgatcattttatcgctgagaagaagatatttggaggtatggaatctgatcccaagtacccgtttgtaaattgacagcacgcttaacatacaccgttggcaaatctgtctgtataaagaatatgtgcaaaacaatcatcttacttcttgatcaggcaccacaccacataccgtgtccgacaaggaatggtggcaagcaactgacaagaagtttcaagcctggcctcgcactgctgggccaccggttgtcatgaaccccatcagtcgccagaacttcatcgtcaaggatctcgagtcctaaggtagcactaatcgcgcaatatgcgccgttgcacccctcaatcaaaacaagagcccatttgaagccacgtttcatctttcatttgaggtgctgatgctaaagctcctttgcttgttcagattgtagtgggagcatatatgctgaaggttgcgccgtgactaagatggcgatggctgtggctacaaactacctacctatgccgtactcccgaaccagtacgtgagtacttggtctcaataaaacagaactattttgcctagtgcagcctgaacagaacctgaagcatatctgctttagacattgtcatcttggtgattgttcttatgcagtaacaacctctactttgtgcttgtgctattgtgagtgaatggaactatctgtctgtcacactggaatatgtgccttgtctactgatgcaagagattttaggccacttgtgtcaactccagaatccaggtggcctctctaatctcagtgtaggtagcaacagacagcatctcgccgttttcgtgaggcttcttcagtgattctgaagcttatgtgttttcttgcacacaaaagtagatcagctagcagaaacgtgttgctagtttggtcaagatttatgtgcgaaacatttgacactgctgccagtatttgtcagatgaaaacgctgagatctcctctatcttgggagattttgcacgcctgatttaactctgggtcgttttcgttttcgcatcagcatttcatcaaatacccatctgggaattttcccgagctttgagctgctttagaacaaggttcagatgctgatcatcagcagttcaggatgtgatctgaagcacggacagaaattaagaaacgaagtcattggaaacgtgtcaaactgtgggcaatacacgtcactcaccctgcatcgtagtccgtacacgatgtttatgtacatactcccaggtagtcatacgtggtgcttgcaaaatcactgaaaaaaatcgtgactttccaggtggccgtctgaatcaacagatactagttgacgtacggaaaataataaaattgaaactggtacggaaacacgtccttgatataccactattatagccccatcatttggcctaaacagccaaataataagccaaaatttaaatttttaacttgattttgaacttgattttgaaatacttataacgtaatttttgttaaaattggcttttaagtcgctacggacaaatctacaaaaattttacttataaattaattttaattttttataagctaaataagccattttggctaaatggacaaccgatggaagctttatattctactagtacaaaattaagggtcactttcgtaggtggtacctttttcatttttgactgggagaaaagaggaacaaataaacaatactatgtgcctttcaaatataaacatttgagggcatgatagttacaaatgaacaaaaacacactaaataatactgctctatataagtatttatgtgatcaaaatttatagtacccatctcataatgtataatgttggttagttcaatgtcaacaagtagtagaggaagtactacacaataagaagttttaattttgagcaacggcgtcatacattaaaatatggaggtaatatattttatgaaaaactttatgtataaatgttggcttaaaatattagatgaatctattttttaagtttataataactaaaacttaattaatgacattatcattttacatgccatctccatcagattccatcgaccattgggaccaaaatattagaacgagtataatattctctctgtcctaaaaaaacttaacctatgatatgtcctctcctaggttaagtttttttggggcgaagggagtattatacttgttataatattttggtctcgatggtcgatggaatctggacaaatagtagttcagattccttatcttaggaggggtcataccccttcccaggttttttttttttgggggggtggggggacggaggagtatttgtcattagattctgtgattgtgataggatgatggcaagaagggggtggcaccatgcagcagcattccctagtcggtcggtccttctgccgcaccgaccattcgaccccccgtcgccactacaaatccaccacgctcccctcccgcgtgtcaccacgccattacttacttgatccttcttccccttcatcacagtctagtacttcttgcacctgcatcatctgcattggcagcagtaaactaagggtgcgttcgttctgagagattgggtgagaaatggatatcgtttttcacgctgcttcctaaactattaaacggtgtattttttataaaaatcttctatagaaaagttactttaaaaaatcatattaatttatttttaaagtttaaaatagttaatacttaattaatcatacgctaatgactcatcttattttacgtatcttcctaatcttttctatctccttctcctcgaacacaaccttggtagtaactagtactgatctgaggataagctccagccattctgaaactctctgctctgtctgtccgtgcatcttcttcctgcagctgacgacaccattgcaagctcggtaggagtagcagtagctctgttgttcggttgttctgctcaatggccgctcgagcactgtctgctgctgccgccgccgccggtcgccggatggccggacagactggcttccctcttcttgcctcctgcaggtaactggctataactgaaagaatgggagctctgtttcatgtatttctcctgttttttttttttttttgcttcttcattggattgtttctgctatggtttatcagtgtccagtacgtcagtttagtgtaggccgtgaatcgtgatgagctgatggcgacgccagtatcttgccttcgatcttctctttgtactatttttttttcctctttggtttgcaaccctcaatcgatgataaacatgccacctttttatgtggaactctgaatgaacgttcatttgggctgatgaactctgataaactctgatggagaaagaaatgagccaagcaagttcaagttcctttggagatgtttctctcttctgtttttttactgttcattttccagacagatcctgatccttctagctgttatttagttactgctccatctctaaatcatttgggctgtgtttatggtttagctgttgattgagctgtcatgttctttttagatggattgagagtgttgttgtcttgtagagtagatgccatattttgagagaaaaagaatgttcattttctgatgaaagtctgtgtgagcaggagaggagatcaagctcatcagaattactcgattagcgcacaggcccagccggaggaggagcagaaggccatccacgacggcggcggcgccgccggagcgcaggtggaggcggcgctgaaccgcaagaacgtggaggtgcacccggaggaggagacggtggaggacgcgtgggtgcccgaccacgagaccggcgtctttgtccccgccgacgaggccgccgtctccggcaccgaaaaccacgaccactgcggagcggcggcggcggcggccggcggctcgccgtcggtgcttgaccaggcggtgttcgtccgcgaggaggacatggaggacgtcgagaggccggccgtcgacatggccgctgccaatcacaagcccaaatgagcatcaactcagcagtagcagcaataaccaataaagccaaataatgccttctgaaatctcatgtacaactagtactagaaaatttccagtgaaaatcttgcgtcgttggttgtatgaatcttgttatctacagtgatcaatcggataatctgttctttgatgaatcttgttgtggttttatcggatggaatttgctgggattgctttgaattcgtgcacgacgccgtcgatctcgatgaggctgcagccggggaccttgtcgatctcgttcctcctcatctgccccctcaccttcaccgcctcaccgtgccggccattcgacgcgtacgtgttcgacatgagcacgtagtcgccggcgtccgcgtcggccacgcgccgtcgcatcacccgctcggcgcgctcgacgtcgccgtgcgcgcggcatgcggcgagcagcgagctccagatgagcgcgtcggagtgtactggcattgccgcgatgagctcctctgccttgtctagtctcccggcgcggccgagcatgtcgacgacgcagccgtagtgctcgatgcgaggttccggcatggcgttgagttgctggagcccctcctcgacaagtccggcgtgacagcacgccgtgaggacgccgaggagggtcacctcgttcggcgtcacgccggctcgttgcatgccggcgaatagagacagggcgtcctcgccgcggccgtgcattgcgagccccaggatcatggatgtgtaggtgtacacgtctcgccgcgccatgccgtcgaacacctccgtggcctggtcgaccgcgccgcacttggcgtacatgtcaagcagcgcgttgccgacgacgccgtcggcgctgtgccccatcctccccatgtatgcgtgcaaccacctgccggtgtccagcgcgccgagctgcgcgcacgcgccgagggcggcgacgaacgtcgcgtcgtccgggcgcaccgccgcggcctgcatctcctggaacagcgcgagcgcctcctcgagctcaccggcgcgcgcgaacgcggacatcatcgtgttccaggagacgacgttcttcttcacgggcatcctcctgaaccaccggtgcgccgccgccgcgtcgccgcacttggcgtacatgtcaaccagcgcgttccacgcgacgacatccatagcaaccttcctctccgcgacgcgccggtgcgcctcccgacccagcgcgaggtccccgatctgcgcgcacgccgagaacgccgcggcggcggcgacggcgtcgatggccacgcagcggtcatccgccatggcgaagaacagcaccacggcctcgtccaagaacccgtgcctcgcgtggccggtcaccatggccgtgcaagagacgacgtcccggccggcggggaacccgtcgacgagcgcccgcgcggaggcgagctcgccgcgagcgaggtagagctcgacgagcccgtcacggacggcgcggcggcggtcgaggccgagcttggccgcgtgggcgtgcacggccggcgcggcctcgccgtgctccgcggccaaggccttgatgagagcccggaggcctcgggcgtcgtgaggggcgccggaatccacggagacggtgccgttcttgtagccgccatgggagcgatgaggcggtggcctcctcggcttgctgctgctcgccggaggaagctgctgctgcggcggcgacggcggcggtaatggataaggcgccatggccggtgcccggtgatgaggtgagaatgagtttgggtgggtcaaaaagtcaaaacataagtactgacaggtggggacggatacaggttgggacttatgtgccgcataagaaactaaggcccataaaccaaccggcccaatacatatgggcctcacgtgagaagaaatccatgagctacgagccgactaacatgggtcggactcaggacttcatcaagattcagatgaacaacatcgcgtttgatttcatcttgattttcagataaacagcgtcatgctgaatttttaccttcatcatccatctgatcctggaaagcctcagggccatcgaaatcatcttcatgtatccaggaatacaaaagcatgtgcctctggacatgcatattttcagcaagctggaagagctgaaagcctgaaaatgctttttccctttggaagaaccaagctgtaaatgcatcgatcacatccaaaaaaacatcgttgcacacatctcatgcataataaacatgttggaaggaaaatcaaattgaacgcacaagtaatactgcatttaacacggaacaggatgcaataccatttttccccttcacaacaaggtaaatattatttcttgtagagagataaaacaaggttcagacattcagagtaacaggcacaacagtttgcctccagaaaactaacccaaataacaaaacaaccattactattatttctaacagacgataattaaaacgaacatggcagttcaccaaaaacataaacatcctgcaagccatcccttgcagcctgttcagaattcagatgccatcatagatatagtagcttgagttgcaaaagcccttctgctctgcagcacttgaggagagaatttcagcagaagataaacccaaacaaagcttccttgtagcagctaatgatcgcaagagagtagcatcctgggcttcacccagttgggcagcaaccctctgcgattgccttgatttggcgccaaggatgacacacagtatgaatcatagccgatccctccccatctctgtgggttcttgcaagacaatggtggccgtggcctgaaagcctccctcttctcatcgaagaagaaggcccattccttcaactcttcctcttccatcttcacccacattgcaggctgggatgacaggtcaaggcagaaggcctcgccgatggaggcggcgagcaggatgagcatgtcatcacacaccaccagcgatggctcgcagaggtcaggctccgacatctcgacgctccagacaacttgtacttcttccaggctgagctggggttccagcttgacggtgtaaagctgctgatactcgagggcatagagctggcctttgaagggcacaaactgctcaagagctttagaattgggcgggcaactgcactgcgaccaatggtcgcttccaactcgccatgcgaacagggagtgcttggcctcgacaaggaaatgcgagttgtgataatcaaggggagctgtgagggcacaagagttgacaaaagtaaagaatgggcagggtggaggtgaaacactagtgccggtgaacacgtcgacgatggcgaaggttgtgtccttcagcgagggggcattgccagagaagatggcatggccataagaacagcattcataatccatccccgccagaaaatctggcggagtcacgcggtgtatgcagatggttggcttggctggatcaaagagctcccatactactggatcatcgccagaggaagcgcagctgcggatggcaagaggacggaagagggtggtgcgtaaggtagattttgcagacctgaaggcagcatgccaattggggcaggtggcaatgaaggcagcaaggtcactgggtgaactcaacagagcaaggacacactgcagtaggtcatctgggaggtctgcccatccttggagcactggcatggagttgggggtgttggagatcctcttgcaggtgttttccatgatagcaggctctgcaagtcaataatgaagtcaatgggagcaatcagaacaaagaagttctggttaaaggacaagcaacatagtccactaattcactacgtcatgtgggcgcatgaaaaaatgagtattagaaatcctagccactaagtgacaaataagaagtggagtacagtggtgctacaatattttgcaatgttatgaatgcagtatgtagttacaagactcgacaattgaattcattcacatttcaaataccattgaagaaaacggatagttaatgctttatttcattctataatatgcatgaatttagtatcgacacattgcatgtgtgtcatgttggtagcaatacatccttgacttttttatatcgtttataacttaaaatattacacacaacatataagtaataaaaacctgtatcgttataaaataactcgtgttttagccatcaacatacatactaagaaagtatggggtacccccttctaccttgcttgatcctcaaccacaataactggtcctttctttgttccaatcataccaaatatcatggtaaaaaaaaaacatatttgataggatgttagtatttactatgagaacctaaaacattgacaatttgtgatacaaaatagcctaatccaaagatcacacttttggtggagacgtattaagtattaactgctgaaaaacataactctataagtatcttcagtatttctaaaaaaaatcttcaataccaagacatcagtggaagttctcttatttgggatttgattaatagaaaattaatgaacaaaaattgcgtacatattattttgttgataatcaaatattgtctcaccaccacccgagtcagtatagattttgaagacttatgatgtactcatagtccttaagaattcccctatcctccaagatttgaacgtacatcttagaggagttagcagactaataaatagaaacaacgagacaacacaaaatgggtggacaaagtacgtggaagaagaagtttaccgatgaatgaagataacaacgatagtgagggcaacaaagaagccccaaaatggttgccgtcgatgttaatgaggacgtatcgagggtctgcaatggttacgactagcgagtagggaagacgaagcggcggcggaactagctaatgattagggtttggggggaacgaggcaaggggattcaatgggttttatatggtatgacatgttaagagataagatgcatatgtccctcctcggaaccagttcacatacacacacacctcctggtaccagtacacacatagacccttttcattattaatttggtagtaaaccctaggctttgctattccggaaatttctttggtaccagttcacacatagacccttttcattattagtttagtagtataccctaggatttgctattccggaaatttccttggtaccagttcacacatagacctttatcattattagtttggcagtgaaccctaggatttgctattctggaaatttccttggaaccagttcacacatagacccttttcattcgaaatttcgttttatctgtgggtaccggtagggagttcttccgatcgaaattttcaattcattcgaaatttcgttttatccgtgggtaccaatagggagttcttccgataaaaattttcaatatgatttgaatttagaaaaaaaaaatagccgtgtcagagtatagaactcctgtaatggggaagctaagtactccccctttgtgagttcggccgaggtgcaagttttgagatcgagtgtttgatcgcacggtaaagataaacacaagcacatatacaggtttaggccgcggtggactatggatgattggaggaattataaggtgacgtaggaggagaaactcaactccttgcttgctgaattctcggtggcatgaattctacttatatacatgaaggagagtccacaataccgttgcatgcatggagtggagcctactcctctaaacttgatatgcttagtcttgtaggtcttgacactcttcttaaaaccttgaagatgtagatattgtagatctcgataatcttcttgaaaccttgaatatgtagatcttgtaggtctcaaactctcaatactcttcttgaaaccttgaagatgtagatcttgtacatctctatactcttcttgaaaccttaagtgcttggtggggctcgcagtgccccaagcccccctacaccttgagctctccagggtaaagggaacccctgctcccacttctccgacaagcagaattcctaaaattttgccaacaccgcccctccccctaggtttatgctttttgaaatagtgaaccctagtacaccttgttaatgcttttttttttgtcacatcaccaacacaattggagatccacctaaagccttgtggtgtgataggagtcaccaaccaccttgaccttgagaatctccttgatatccccaacgagctgctcagcgaccttaaacttgtgctcaaatattcttccattccgctcttttcaaatgagccaacaaaccatcaggaagaaagaatcaaaagcgttcctatagcttggccgaaaaaagcttcgcgcttgctgcgaacactctgctagctgcaaaccgctgtggcccagtgggtcaaaagccgcattaggacaatggtattatttgtcatgcacagcagatcttgcaaataacgtcaggtttagtttagtttcaaggatttctgaaccagcacagttacaacaattggtttctactctgtatccgctaaaaacttatgggcagctgcttccaagcgtaaatgggggaaaaaacttttcgtgtgtcttgcaattcagagattgaatgttcaacatctgaaaatctaagcaaagagtggtcgatttggtcaagttctggtggctacaaaacaaccagatgtgtgtcatcaaacaagaaaggtgcagaagaacatctcaaaatgttaatcatatgttcctaaggacataagaaatctgcttttgataggtgcaacagctttttgttggtccatttggctaaacagaaacggggtaatttttgacaacaagatggtgacttctcctttgcaggttattgctttagtcacccagtggctatgcatctggtctatcctccacaaaccaggtctttaggatactattgtggtggtatcacgtcgtttggatcaagtggcacgggagttttttttaccctggagcatgggtggtgatctagtctacggcttgatagtcactaatttctttgttttgtgttgagggtctagttagatcatgttttgtagctgtgtgcatttcatgcagaggccgggagtgagctcagttagaatgtatcatcttggtgtatttgactgagttttaataaagcttccattatcgaaaaagaagaatatctcgaaattaagatgatcatgcattccacatagaaggcgatggtcgaaaaatcaatggaatagttcagagaaatcaccttttgctcaaccacatatcctgattgcaggtgcattcccttcgtccatgtgagcaattgagcatatatcgacacgacatggccgttttctgtcgaaataatgatctgagagcaatctagtagtgagaaacataaagcacgcaaccgatgaacgcactgatcttcagcaaagtgtatagttgaagagcttttcacaactgattcacaaacatactgaaatcaactcaactggatatattgcagaacagtatatgttgagttgggataatacctcccctcattgaagaagaagaagaaggtgcatttctccagtttgggattccttctacaccttcactcgcgttgcaggttcagctgataaagaacggcggaaggatcccgcgagattcttcgacgaggacccggccacactgccgaggaagaaagatcttgcgccatggctgacgcatccaagaaccagtggtgcctgactgcctggaatggccggtggtcaccatcccatcccataatgcccctgtgctcaacaaacagcgcactcgcggcggagcgcctcggcggctcggcgccctcaggatgccgtagtggacggacggccgcggtggccggcgaggcggcggagctttggctgtggggttgagaagcggcgggtggacaggtgggggccagaggcagggcggttgacctagtgcgagggattcggaaacgaaggtggtacaagcggacggaggtgccccatggcgtccctgaggctgagggtggtggccgtcgccggccaggacgccgtcgccggtgaacgcggaagcccggaatctcggcccggtccaagccaaaaaaatatatgggccgtacgtacgccggagtcacataaatgggccgcacgtaggcggcactagaggtgaaaactgttggaattgttagcatatcttcagaaatgatgctagatcgatcgataattaaccatatttactatttaaattactcagtattgatatttatatgatgaaaaataaattagaaaaaacaaaaattataaataataaaaaacagcacggtcggaaacagtgttaagtcgaacgggaattttcatgaccgttttcaccccgcaccactcttccgtccgcgctgctgtctccatttcccaactccgcgcgctggttgttcacaattgctaactatttatttatgaaagacataccggaaattctcgatagatcgagcgtcatttctgtataagcggtgagacgtcatggtactgtttttcgattccattcatgtataaaatttgaattttctatttatttttaagcatcatatttttatgcacgctaaatattggtaaatgtggttaatttcatatcaaccaagaatctctttttttaaaaaagatgctcaacatgaatcttttttctaccgatctggaccattctgctagccgatgtacaagtaggttgctgatgcgacgacggcatggatgcagcatcacatcacaaagcttgagacgaatcatggtgcaaaatcccactcagcaaattaatggaatagttctcttacattggatgtgaggatcctctcaaattccccacaggcactgatttttctcaattatacttctgaacaagcacaaaaaattggaattgggttgcagctagcgatcatcgattcttgagaaactaatctcaagacgtgaaagaatcaagttgctagaagcggacggaggtgccccacgtctggacgtcgcggagggtggaggccagccagtcgaggccgccgtggaggccgtcgccggtgagcgctgaggctccctgacagtgccacctccggttcttgagctcctcgtacgcccccagccgctggcacacctccgacgagctcatcgcccctttctgcatcatgcatccacatgtcaattgttgtataactaatcgccattggcaaattgttcattgattcgtcaagcttttagcaattaccaggtcctgcttgttggcgaggaggaggatgacgctgttgagcatgagggggtcgcggatgatggcctggaactcctccttggctactcctatcctttccctgtccatcgaatcaaccacgtagatctgcaactccccacacattcagtttcagacattcagatttcagaagcaaagcaatgatcgatcgagagagagattcagaagatgagatttaaccagggcgtcggcgtttctgaagtattgtctccagagaggtcggagcttgtcctggcctcccacgtcccacaccgtgaaggccacgttcttgtactccaccttctccacgttgaaccctgatggaattcgttcatttcacaggatgaaagaatgtatgtctgtcaatgcaggtccaggaatggattatgtcatgcccatttcggcgatgaaataaatgacaatgaacacgatgtatcactaccgattgtgggtatggaggacagaacttcgccaatgtgcagcctgtacagaatcgtcgtcttcccagcagcatccagcccaagcatcagaacctgattaagcatccatcagaagagaaaaaaattctgaacctggttaagcatcagaaaggatgaaaaactgagaatggtgaacgatttcagaatgctgacatgatgttaccttcatctcctttgtgcagaagctgtcgaacagcttcctcagggactgccccatgcctgaatatgatatatgattatgatctatctaccattagttctttcctcttgattaatctctgcttcttcttcttcttcttcttctgattcaggctgccttttattgctttgagaataggaggtagttctcatcgtgcaaatcagcagatgacaccccattactccgattgtttttgcaatgcgcgcgttgccgtttgacttgcacctaccgacgaactgaataataataataatacttgctttgtgttgctgggatgctggtcgatctggagatgatggaaccaccagacagccacaaccgacagtgtttaatctaatttatttattgccggattctacaacattacaacgtaccctgtttcaactagacatagtaaacttttgtttggatctaagcatggtgattgatcatacctcttagtgaaaccttggaataaattacactccatgccggtcgaactattagtatttttaccttcatcctgtacaaaaatgcaattgactcttcgtaatcatctgtttatgaagtataaactacactgtgaataaatgattaacggttaatttaaaattgatatattacataatcaagcaaggtcgttgtagtatagtggtgagtattcccgcctgtcacgcgggtgacccgggttcgatccccggcaacggcgattttactcctttttttaatttgggccatattagattggagcccatatcgatcagcccacgggccgaaccgctatatggcgcccatgttgcccatattagattggggcccatactcctatcggcccacggcccgaagagccttatagcgcccacgacaaagcgttgggtcgtcgcttgctgcttctagacagttctacaacggtcgaggctgctccgtgctctcctccgctctgctttcattctactccccggaaaaatgtcctattcactttggtgcccctgagtccgagatgcttgctgattctccctctttttgtttccacagtttggctttattttgttgcttttgtgttgttatgaaaaggatctactatacttctttttctttccacagtttggctttactttcctgcacattgagtaggattaaaagaagagctagtaatgatgcaatacatgtttatgtacattatcacattgggtttattcaaaagagctaactgctgcagcgctgcagcaatagctatagtggctatattagtcagccagcaatgggctacaaccaacacaaaccatatgcatatgtaaaagtattgtatttaattttattcaaaatgcagcctagcctaaatcgctgccactgaacggttggatgtgcaacacagtctagacaactgctattaagagctaccgaacaatcattaaggccctgttcggctgcacatgcttcaactgtggtacagccaattcgaatagtactatgtgtctgtagctgcagcagcaagggctgcattgtagtgcagccgagcagaacctaagtgattttgtacctatatacttttataacttttgctctatagtttttcatcgagagtataaaaccttaatagtagttccatgtacggtattgaccaagtttaaagatctagtagaagaattcttaatttaaccatactatgaaatgaaaaccaaccactgggtgtacatgttacataattgaagcttcatactacgagattttgtacttctacacctttacggtttaatacgttctatagtttttcgttgaaaaatatttaaactttattagttttgtgtacgtatgacagagttttaagatcttatagaataactcttgttttaaataaaccccaaaccaaacgttgagtgcacatgttacatatatagtcaaaaacaaaaacaataaattgaatacgatttacaagtaaacatagtgtatagaaagttactagctcagctgtgtgttgctgcggctgcaaagcaatgacaactacggtatcaacatgagcaccaccaatgctaggtaatgcagctgttgcgtttgtgtaaaagtagctagcagaacctagccatgtcgtgggagcttttggcaaccgtactgctatagcttctttcaaagtatcaaatttcttgtacggtctaaattatcacctgaactttaataattcatatttttagattttataaaataaactacaagacaaaagataggaaaaacaaactttcgaaattctcatcgtatgcttctcggaatttgagctgctacaaacattccattttttgcctataatcgattatcatttcagacttggaaaggtattataacggcccatcgtctctcctgcttatttaacaaccattatttttaaatcttatatacatatatgtgtttgtgtgttttttagcaactttattaacttttatgtttttttaattcaaatttaaattatggttaacacgctaaaaagaaaatgatgaacttgtattgtgtatcactttatttgtttcaaattatgaggtgtttgttcaaatttatatgggtgtgaataaatctagacgagagataaataaaccaaaatatcttataatttagaacgaaggaagtagttcacaatcaattctcccaataagaaaagaagtcaatactcatgttttgcatgcacgagagactgacaacatgatcacacttagactatgtttaatttctaatataatgcacacttcttaaacggtttaacggtgcatatttttgtaattttttaaatgcaaataaacccttattcagggggtcagacagaaaggaagcaagcgcttttgcaaaaccctggcgtgtatttaagacctcatcccttcccctcccccttcccccaaacccctcctcacccgcagcgccccaacccaaccctccccgaggtcgcagccttatcctctcctctcccctccgcgaggtcaggtgagctcaaaccctatcccctcctcctccacctccgccgctcctccccgccccggggcgctgggttctccctcttccggtggcgacgtggtggggtgtggtgtgttgacccccgcacgattcggttgccgcgtggttggaggattcggtggatagttctcgccgcgcgattcgtggggggcggagagctcgaggtcgcgccccccgcttggttttgaggggggccttttgatggttgctcgtgcgggctaattttgcgctagaactgttatatcagtggaaattgttggtttagttagcacggggactacagaatgtatcagtggaaattgttggtttagttagcacggggactacagaatgttgttggctccagcgttctgttcgtctggttgtgacttttggcatggggtgttctaattcagccaagtagagtggagtaggagggtgcatgcgatattctgtttggcagttggaatgctagtgttttcatgtatgctagtgatggccagccatttgaagctgacgtaactgttagggtggttgaatggcaaacatttaaatttgaaggtgtagtttcaagtgctagaatgtattggttggccattcatgatattcgagaaggaatcctggcagcagagatgctttagttggtctctttttcgttcagttttagctatctcatacatatgcaggttatcaactcactgtaatataccctgaagtccagttgttaattaatcttctaccttgacactgtaagagatgtagtcaatgataatatgtggtaatatgcagagagagcacaaaaaggaaaaggggaaagggccccaacccaaaaaaaccttaactatgtttagcttggaaaatacatttgcacagaatgcacaacaattttaagctcttagctttggttggcaatacatgaactttcatgtgggacctccacctcagcttccattttctgaatagaagcttaagcatgcttatgattgttgctccatgttaatgttgtcattgctgaacaggaaatcatggcttcaacattcggtgccacttctacggttggcctcatggctgcgccaaccggaattgtatcagacaagaagccatcttctctatcttcggtgtcatctgtttctgttgccagccgaccacgcaatgcacgccttcagaggaagtgcaacttcagggtaaaagctgccaaggagttgtacttcaacaaggatggctcggctatcaagaagcttcaggtgagctccaaagttcttggacacatcttatcaaattttggtcactatgattcttagccttgaccaggcactcattagttatttctacatgtcagactggagtaaacaagcttgctgaccttgttggagttacactgggaccaaagggaaggaatgttgttttggagagcaagtatgggtcccctaggattgtcaatgatggtgttacagttgcaagagaggtatattacagtgtttattgcgtcagaacgcattgatttccctacaattggcttgtttgctgtatgctatactccaccaaaaaaaaaatgtttgtgttgatatgtaaaccagtatgcacatttgctcacaagtttcatgcgcaagtgtatttctgtttactatggctggttgcatttttgcacaccatgttctatcataattacctttgtgggttctaataaatgatcctctgccaagatgaactaaagtttgatagctggtcattgacttaactatagtgattgtgccccatttgttttagtcatgatataaagaatttttcaattttattttcttattgaacaagtcaactggaggtttctggattatctgtgtaacttagttccagaatttgagcagtattttcaagtaacgatctctgtactgcaggttaaactggaggatcctgttgaaaatattggagctaagttggttaggcaagcagcagcaaagaccaatgatttagctggagatggcacaactacttctgttgtgcttgctcaggggctgattgctgagggtgttaaggtatgctattagttgagacatgagacctctattacttgtatggtcaatctgttaagagtcgttaatttgtgaactaagtgaaaataattcatttgctctttttcaggtcgttgcagctggtgccaatcctgtgcaaattacacgtggtatcgagaaaactgcgaaagcactagttgaagagctaaagaaattgtcaaaggaggtaaaataatcgtcaggctctaatgctttcagaatgttttagttgtggttgtggcaacctggtgtttgttgcaacaatgcttagctagactgagtcaaatcagatgatttatctatgtagtatatgcttttttttgttctacttataaaaaacattttcttgctttaggttgaagacagtgagcttgcggatgttgctgcagtcagtgctggcaacaattatgaaatcggtaatatgatagcacaggctatgagcaaggttggcagtaagggtgtggttacccttgaagaagggagaagttctgagaataatctctatgttgtggagggaatgcagtttgaacgtggttatatctccccgtattttgtaactgacagcgagaaaatgtctgcagaatatgagaactgcaaggtagtttcagcatgagcacacatacccctgctgtatgctgctttaatctgtttcagtttcttattgcactatgtttcccctatttttcagct

SEQ ID NO: 4518 - DNA, 34044 bp, Oryza sativa
ctcatcactgctagatccatcgccaccatccgctccaccgtatcaaacccgctgccgccgggctcccaccccccctcccgcgctctcgctcctgcccgccgccgagctccccaccactctcgctccctctctcgtccaccgccagagaaagtggtcgtcggccgctcccgagctcgccactcccgctcctgcctgccaccggcagaagtggttgccggtcgctcctgctctcgcctgttgtcggccgctcctgatcccgtccgccaccgaaggagagaggaggaggaggaggagcggaagtggaggaggtggaggaagtgatgggtggagagcggagaggatgagtataagagagagagaggacttgatattttaagggtaagcttgatctgatgagctggtggcaggcggggctttgaacatgccgtcttacgaaaatagatttattttcacacgtgatttttgaactgtgtttgagggaacgatttttccataggaaagcagctatggaccacctgcaacctaaagggattttataaaaaaaaaatcgattctgtggtagcgtgcacgtcgatcgtcactgctgatcccattgagacttgagagtcacccactagctaacgcaatctgctactcactagctagtagctgtttctgcagctgcaagaacctattctgctccgacccggcgaaaaaaaaagaacctattctgctcacatgtcgcagctgagatacaaatattgttcattaagctatctcatgcatgcatgcatggtcctaatagtttagttatacgaacagctaataataagtttattcgaatataattcctactgacattagcgttcctgcttccgatctgaattcagaaataatgcaaattaactgcctaataactttattcgatcgaatccattcaactgatggaggctgatgagctgctggtccagtggcgtcttttaattctagttgcatgcaacgtcgcttgcacatttggtagctagcaagaattgagctcagctcatgcacgtagctgtgtcaagatgggcgccatggccaagatccatggtcatccgaggcggtgtctcctcggtgctctcgtcggagccatcgccgccaccgccctcgtcatcgccgcctcgttcatcctccgcccgccgccgctcgccttctccgtcgccgacgcgaggagcggcgccactgacgagaacaaggcggcgttcctcaacctgaccctggtagccggcaaccctagcgggcgcgccgccgtggagtacgaggcgctggacgtcatgctctggtacggcaccaccgactacatcgagaccaacaccagcctcctcctcgtcggcctcgccgccgccgacgaggcggcgctgctcctgcagccgccgcgcaacgcgacggccgtggaggtgacggcgcggacgctggacgacaggtttgtgcaggagatcgtcgccggcgaagggaggagaaccgggctgtcgaaacatgaattcggcaataataaaagggggtagcgcacgagacctaaaagtggatggatgcggagacaaaggatttagacagattcaggccctctcaatgagagataataccctactcctgtttggggatttgaatccgccgagtgtgtattgatctgacgatcaggttgtgtcatgccccctagagggcctcctgcccaccttatatagggtggggggcaggattacaagatagaaaccttaaccaatacggtatcggtttcctaaatctactttacaatattatcaaaccaggactttaggctgttccgtaatatataaggaaacgtaatacccgagtcatgacctattacatattccatagatataagttattccctatgactagtcggataaccatgccgtatgggtatggggtacccataatatccacagtagcccctgagaccttcgcagtcgaaaagataatcttctctcgaaccagattactccaaagccgagtgcttcaatcatctttgtcatggtctcccgagtacttttaccaaatctgaagactgtggagggctggaaaataaagtcaggtgcaccgactagatgcacctaataggtgcagcccccgacaatgtggttaattgaacaaaccaagcatatagtcaaggaataaataatccaaccaaccgagtggttttgataatcgtaatcaatcaagtgacttgatatcaatatatagcatatgcggtgtgaatcctccaaataacatgatccgagtgatataccaactgctttgtaaaatatgatgagtgatatagcaaaatagctataaagaagcttgtatattgtgaataaagaaatttccaaagtattgggcatacgccatgcgcacactgctttaacagatgtgcttaagtccctagaagacacatggtttcaccacacctggaaatatatggcatatgtggtgtaaaatccgagtaaataaactcataaaggatttaccaaccacctagaaaatgaccacaatatataatcagcctaagccataatattggtcaataaaaatgcacacttacgtggcgaaaagcaatgatattgtatctaatcaattgcttaaaaacccaaacagcaccttgacttatatataaaaaagtcagcgggacagctatataaagctttactgtttgacaccttttaagatgcattgtaccaactcctaaaaaattaagtaactgcggtataaaaggattttaaggtattgggcacttgatcacgcgcactttggcctaagcaaaaagtgcctaagtccctaaaagaacgtgacaggccacacctgaaaatatgggctgcagacatattaggcttaggccaaaaaatatgccttcgacaccctttaaaggatgacgcatgtgacatgctcccgagtaacaaatcttctgggtaatatagaccaagtgtagctcatatgaatagcttctgatctgaatgattatcccttatgggatactccaaaataaatataataattgaatcccgactggcgcaagtattcggttgatagcccttacggggaaaaataattggtccagtctttgagcatagaaaatagactcatgactatgaatccatgtggaatgtatccgaaacaagtccaaattggagatataatcctcacgcttgagttgatgagcccctgagcatatagcttgtccttctgtcatagtcaaaattgtctattggcaatagctgacgcagtcggcatggagatgaaatgaccaacatgaagacgaaattgctcatcagaagtaacggaagatgtcagtggtagtaaaaacaatgacaccaatcaaaggtaatgaagttgcataaccatggaggcgaagaaaccagtcggctacagccaggtcagctagcagtgaagatgtaggcgcccaacaacaacgaaagaacagtcggtggtgacaaaagcaaaccgacgatgaagacgtagacgcgcatcaacggtgatggcgaaatccaccaatcatgaagatgaagaaaatacttgacgacgacaaacgcaaccgacatgatgaagatgacgatgtcggtgatccagccaatagcagtgtagcaaccaatgataatgacaaagacgctcatcagcatttgcatagtaggtcaaccgtgaaggtgaaataataagtcggcgaaaacataatcatccattagcaacagcagagatgtcagggccgatgaagcagaggtgctggtgatgatgtcagtgacaataatccatcaaattaatgttatggctgttgtagatgcttcacttggaggagagttgatgtcaaattaattttgagccttgtatttgtgtagcccccgactctttggttagttgggaaacaactgaacatagagtcgagaattatagcttcttgtcgtcgagtagttattgcttgattgaagatatgtgttgaagatgtccaagtagaaatcatgaatgttggagagccacttgttgtagtaaaataacacggcatcgcatgccgagatgtcgagattcacaacaacgtcgtggttggtgaagtagtaaaacttgcgaagtagcaataatagagtttgccggtgccgaagataataaagatgaagtcgctccaccatgatgacaaagttgtattgccgtaatgaagtgaacataagtcggcggcaacagaagcaaaccggtagtgaagacgcgcagttgtgaagataaaagcaccagtcggcggcggcataacacgagtcggcggcggaagacgatgatgtccatcagtagtggtagctgtataaaccagatgtagaggcgagggcactagtcagcagcagacgagacgaccagggatgaagatggtaaggccaatcaacactggcagaatcatgcagccatggaagtgcagaaaccagtcggcagccatggcaaacgtaggcagcttgtgttgaagatactgatgcctattagtagtgacagcgatgtagccagccgtgaagaagatagcatcagttggcgttataataggccagccgtgcaggtggaaacaccagtcagcagcggcgaaggcaagccggttggtgaagacgtagacgcccaacaacggcggcataataggccagccgtgcaggcggaaacaccagtcggcggcggtcgaggcgagccggtggtgatgacgtagacgcccaacaacggcggcataataggccagccgtgcaggcggaaacaccagtcggcggcggtcgaggcgagccggtggtgatgttctgactgatccattcctggagcgtaagagataagcttaaagccatgaatcccttttatgcatatctggatctggatcctgcagaacaaacatataggatgagtagtatctaatataaatataatactcgagaaaaaatcaagtattttaaaatatgtatttcttctcttgttaattttgatttccccgagcagatgactcattacgtttaaacactctgcccgactagtcatagccaccaagcactgggagtcggcctaagcacttcccaaacatgcatatgagtgacatgagttcgtcattaatggaacaaagtttcacggatcggagtttactactcgggtacttttgcaattattaagagcagaaaataaatttatctcatctctatgcttttgatttattccgaataatacttggcaccttgcgttactcggtccatccaacgagcccccgggtgctaggaatcggcccaaaggcaaccatccattggcaaaccaaacggaaagcataggaagatagaactccataactcgataggtacttttgtactcagattatgtcgcaagcaatcaagataaatattatgaaaattatttaaaaaatacgatataacatctatagcccccgactcactagtcaacggcgaaccagttgatgtagtgaggcgaaggaaaagacaaaatatcatataaagaataaaataaatgatgacttagctttgtaatattccccttggtgatggcagaagtggccaatgtgggaacaaagtcgtccatcaataacaatgaagacaccagtcggcggcgacttaataggccagccatgcagacggaaacaccagtcggcaagagtagtgccgcggcgttacatgcaaacagcagaaaataccaagagagattaatctgacatttagagatcaatctaataaacaacaataagttgaaaaggaaaaaacccggcgaagtcggagattaaaaggaaaaaactcgccgagattgatctcttcgactgactccgagacggagcggaggaggcggaggtcgcagtcgcgggcggcgttggtgtccatcagcacgacgcaggacggcaggaaggcatcggcgtggctgcagccgtctcctatggatccgattagatcggttttggcatgcttcgtgtttgtagatccatcttgcaacaccatggcatcctcgttgggtagattggaccagtaggcttggtggtggacgaggacgaccatcaaatccgtcgaactgtcgttgccccatcgttgccgtcgtgctgatgcgaacaagatcaggcagagaatagcagcgacgattcgtcttgttgaagtcgtcggcggcgaggaatcaaggagctcccaaagtgaagacgaagccggcgactcataaagttgattccatcgcactcgtcgtcaggaaactcggcgtttacccctacctggcgcgccaactgtcgaaacatgaattcggcaataataaaagggggtagcgcacgagacctaaaagtggatggatgcggagacaaaggatttagacaggttcaggccctctcaatgagaggtaataccctactcctgtttggggatttgaatccgccgagtgtgtattgatctgacgatcaggttgtgtcatgccccctagagggcctcctgcccaccttatatagggtggggggcaggattacaagatagaaaccttaaccaatacggtatcggtttcctaaatctactttacaatattatcaaaccaggactttaggctgttccgtaatatataaggaaacgtaatacccgagtcatgatctattacatattccatagatataagttatcccctatgactagtcggataaccatgccgtatgggtatggggtacccataatatccacacgggccattcaacgtggcggtggcggcgcaggtgcggttcaaggtcgccggcgtggtgtacaccaggccgtacaacgtcagggtgtcctgcagcgacgtctacttcgtcgtcgccgacaacaagagcgccgccgccaccgcttcgtctacgcccattgattgccatggctgatttcatgtgtttgtgttgtatatgcgtgtgcatatggtttgattttgggttgtgtgattggtatattgcgaggtctggtctgaaccgtttgtgacgctacctcatattttgcaaatatgattgaaattttaatatgtataacatcaataacatgtttggtgtaatgcatgggttgatcgatgatgtgtaatgtctacatttgtacgaattgtagtgtgactagtaactccattccatgtgtacaaatgtaaatcaattccattaaaacacacgcatttatatgtacgtatcatcaacatataacatgggaaaactcatttcatcccttagagtatcctctcatttttctaggttattaaatagtcactatttgttttttttttaaaatagaatgatagatatatttcattacacaaacatgcaaattcaaattcaacctacaatacaagtacaaaaaactgtgaataatgtgtataagttaaatttaaatttataggtttgttgagcatatatcaaatattggcttatcttgtttttttttcaaacattttgatggcttttcggaacatacacaacatgatctttacatgaaaaaaaacacagtaacacacatcatgtatgtatgtatatatcacatgcatcaacacacagatatatgatgttacaccaatccattgggatgcaaattaatcataatgaagtgattaacaatcaatcaatccaaaaattagccaatccatgcatgcaaaccaatctttactgtaccactccaaccatcagtatcctcaatcaccatccgatcgatgccgcgatcacaccgacgcggcggcggggcgggcaatgccggtgtgcgtgacgagcgcccagagcacggtgacgaactcgccgccgcgcgccagcgcctcgccgtgcgccctcacctgctcggcgtccctcgccggcgccacgtacacgacgatctccgtccacacgtcggccaccagcttccacaccgccgcctcgtcgccgccggccgcctcgtccatcagcgccttccccagcctcgcccccttgcgcaccaccgtcgtctcctccgccgccgcctcgtcgtcttcttggccgccggcgatagccatcatcttcccgtaccgggtggcgtccgtcgagaagtagtagcccttgagacccagctcccgcttgagctccgtggtcatggcgccgtacacccgcgccgtgcagtcgacgtcgtcggggagcatctcccggcggaacgccaccaggtaggcgcagtagcgggacagccgcgtcgccaccgtgctcgacctcgccgccgccgccgcctcctcctccgcgtgcggcgggcacctcacctccaggaggctggtggcgatgtgccatgtgagtatcacctcggcgacgctgccgctctcgcatgccgacgagatcagccgggacgcgttgcacagggcgttcctcgccgccaccgccgacctgccggcgctgagcggggcgacggcgccgtcgtacgccgcgaggtactccacgatggattgcttcgcctcctccggcacggccgccgccggcagcttcagcgggagcctgcagaaccagagcacggagtactgcttgacacggaggtaattgcggcggctcatcctgttcgtcacccactggacgccgcggatggcggcgcggcggagccggctcggcggcttgacggcgtagtcgcagaccatggagacggtgagccagttggagaggaggaagacggcgagctcccacgcctcctcgtagaggatggtgaggaagaggaggaacgtgatggagaggtcaatggaggagaagagcgcgacggcgaccggagtactctgctcaggaggcacctcgtcatcctcagcaagccgaacgacacggcgtagttgtccctcttgatgctgccggcgatgaaggcgatgtagccgttgccgcagagcacgacggtcatgaggcagaggccgagcacgaggacggggaagacgatgtagttgacgaggaggaagaaggggctcgcgagcatcacagggaggacggagtggtagtactcggtgacgaacccgagctcgtcgtcgatcacctcgaacagcgtcgccgccgccgtcgcggcgccgccgtcgttgcacaggcctcggaagatgagctcacggcagtcgccggcctccgcggcggtcaacggcgtctcttcgaactcgcggcgaagcagcttgaagagagcgtaggagaggcagagccgcttcagcttcgggttggacaccagcagctggtcactctcggcgagcgaccacactctgcccacggtgacgacggcgtcgtcatcgccggcgactgtcttgcgcaggtcgacgaggtagccgttcggcccggcctccctctgcaggttctcctctcccatgacggcgtacttgcagctcgtcatgagctcgtcgtctcgccgcgggcgccgctcctgctgctccagcgtctgcgccatgtagccggcgagaagctgcggattcttgccgaaggcgaaggagcgcttaacgaactcaccaatcgcgacgcgctgcaccagcttggcagcggcgacgacccagagcgcgccgaacaccgccttccggccggcgccgtggacgttgaagaagacgaggtaaccgaggaaggcgacacggccggcacggctggtggggccgccgccactggcgcccttagtgccggtgaccgtggcctccaccttcttgcggagcagctcgacgagcagcatccatgcgagaatgagccgcgcacgcagaggcagctcggcgtcggtggcgtcgccggcgccggggacgtcgttcttggcctcggagaagaggtaggaggtgacggggaggaagagggcgagggagacggagaggacgaggcgcgcggcggggcgcagcgtggcggcgccggcgaggaggtcgaaggcgaggaggagggcggcgaggaggagcatggtgagggaggtggcgacgatggagacctcgttcttctggtcggcgtaggaggaggtgaggttgtagacgtaggagcccatggcgccgacggcgccgccgcagtgcgcgtccgtcccgttgaagtagtccatcgttgattgcgacgacgagctagcagatatgatgttcttgctcttgcagctaattaaattaatcaatggatgtaaacatggatcgatgcatcaacaacttgttaatggagatcgagctaattgatcgatcgatcaaataatggatgcttttgttcgaattggtaggtaggtgatctagcaagctggctgagcacacacagagagagattcagtctgctttattcgatttttgtatggtgattaggcatttaggcccaggtgaacaagtccctgggctgcggctggattgggctgaattttctaggattctgctacagctgtgctctggctggcagtgggccttgtatatatgcctttgagccagacaaatttgtatacgtgccatcgttagaaacaggcttcgctgaaatgctatcgtaaaaagggattcgctccaatgccactgttaagctgtgggcattcgctacaatgctatttttggtgtttgttgtatttgcaaaatattttttatcgaaataattttttgggacggttttacccctgggcgtggatgtggttaagaccatccacatatgcgtttctcagagcatctccaacagcctctctaaatcggactctccaaacacccatataactagctctccaattgatttgtcaagccaaactcattcctcgctccaacagcctctccatctacactctctattataagcttatgacactgggacccacacgtcagtctctcctacaccatcttcctcctttttctcttcctcttcttctcctctcagcgctcttcccgcacgacggtgagcacgcagaggctggcgacggcggcggcggctctctacgacgacctcgacgacaacccgtggagcggaggtggagggggcaatgctggatggccgatgagggcggccgcgtcggatgcggccagggtcggaggcggctggcgcggaggagacagcgccgacaacaccttgccgctgccactcccttcatgccctcgacgccggtggccgcgagcgggaggccttggcgatgctcgccgtcgtgccgccccaccggcgcttctcctccgcctctcgaccttgcttccgacctccgatcctcaatgttgcacggacgaacagcgggagatggcgaagatgaagggcgagaatactggaagggcggtagcgggtcctcaactctctgtcaccgccgtacgggagctgggatgtgtcgccgccgctgcacagaggggcgtcatcgtcgttctcattgttgcttccgcgctgagcataattaatcgtgtgcagtcaatgagtacatcgtgacaaattgatctttgttttcttcagtgaggtatctgtcagatgctaatggtggtgggttcttgtcctgagtcctgacgtgtatccgaggtaggctccatctcgttgctctgtccccgtccgtcgccaccgctccaaggccgccattcctctaccaggcagagcaacgaaaggaagggacaagctcgagctcaagatctggtggtcgccgactctgttgagctccggtcctcctgctccctctgctctggcgggccgcgcgggccggggaggtgccgcctcaccgacaggcgatggcggaagggggacggtaggggagtcagggagaggagacgccggcaatgcagtggaaggggatggggcggcatcgaagtgtgcagagaaagggatacggggaagagaaacggtgtgggccccacggttggccatccgattttggctggccaagtttggccagcgaggaacccagtctggccagccaaatagcttggagagtgagatagccaatttgttggagtctgttttttatccaaaattgctaaattttagcttggagagtgagatagccatgctgttggagatgctctcacactggcgtctgcgaccacatagagcgagagggagagaagggcgaagacagcgacaccacgccgaccacgtcgacgctgccgcccgacgcacgcgtgcattgccaccgacagccgacgcgcgcgcgccgccgccgccgcccgacgcacgtgcgcgccgctgccttctcccctatccgcgccgccgcaacagcaacaacagtacatgcatgctttggttttgcaacagctgatcttggaaagggggtacgttgaatcccaatctgtagttgtgaggccggtgcatggcttttgggttggaattctctgataccttttcctgcacaagcctcaagtaaagaccgtgaagcggtctttgttgatggagcttctgcgatgctgttaactctttctggagattcctcagagtcggatgatgatgattcttaacgttgagcgctcaaagaagtcactgcttggctgaggaatgatgatgattcttgatggggaaagaatgcggcggcgccagcggctgttgaggagacgacccagaggaatggatgctgggcggggggaggctgcggcgccggcgcggttggggaaagaatgcggcggcgcatatgggggaaaggcagcggtaggccgacagcgcgcgcgtgagtcgggcggcggcgccggcaggctggcagcgctcggtttgagggcagcggcggcggcggcctcgtgcgttgggcggcgccagcgccggcggtggccattctccctctcgctcgatctgttcgcgttggagccacagagagagaaaagcacgactcctaggggcaaaacggtctgagaaaaatatattttgagggaaaatgttttggaaatgcaacaaatagtgaaaatggcattctagcgaacgcccacgggttgacagtggtattcgagcgaatcccatttgaacgatggcattgtagcaaagcctgtttataacgatgacacatatgcaaatttgtatatgtgccatcgttagaaatagacttcgctgaaatgccatcgtaaaaatgggattcgctccgatgccattgttaagctgtggaaattcgctacaatgctatttttggtgtttgttgtatttgtgttgacgcgaaaaacacacactagtctgggagatctgcttagctccagtgcaggtccaaaggttggtgagatgcaggcgtgccagtcagtttgaccctgcaactgacaagatatgcagatagtagatcaatgagacgatcggctgacaagccgatggagtaattccagccgatgccgataccagccgatgtcgatagggttttaagcaatcggctatatgtccaatgtagataatgatataaaggcaatcggctgttgataatatgatataacaataatataatccagtataaaccaatcggctaacaacatgatataatataataagcgctgatccgaaggttgaaatatatatcggctggaggtccgatgtcataaaatccacaagattagataaacagtgaaacctttgttgtcatcggctaaatccaacttatatatatatgcaatccttataagccgatgcaacgtccagataacttatcggctagcaccccaataaaacagtagcatgaacctatcggcttaacaagatttatattatcaataacaatctagtaggtcgaacctaaccgatgcagcacgagatttgtatatgataatctaatactcgataagccgatagatctgtctaatgtgatggatataacaaatctatttagaacagcattgtgattgtagagatatatcggctaagacagaagatcggacctaaccgagatagtcccaactaaaccgatgtgtctctaaacacaatgcaattagagatagaattaagatatcaggtaggcaaatatatcaaccaaaccagagcgatccaagagatcgaagtgatgcagccttaaacaacaccaatgtagccgatagattcaccaggaccggtggaacgtaggacttaccccttcgccggagatcgaaagccgatgcagccccgcgtcaggtgccaagttccgccggatgataagtaaaaacctcggtaaagagggtggcgatgcgccgagagtattattgatcgagagattgattacaatgaccccgggtgtacatatttatacccatgggtagatactagtccttgtaggacaagaaatgaacttttctaaagataaaaagaaaacataaagtccttatcggacactaaacacactttcctaaagataaaaggaaactaacaaattattcctaattaatagataaactgccatgccgcatcctctttgaactcagttgcttatggataagcttcctttagtagattaatttccttaaccgaatatagcaggaatccgactattggcgacttgataactcccatcggctgatttcgagatgctgaagccgatagttactctaagccgatgatgaccttgggcttaccaaattttggcgttaacacatgccccccagttttggagtgtgatgactcatgctccaaaattctgttctgtctgatcttgataactccaaaactgatcttcttttgcttcttgcaatcgactttcatgagctgataccgtctgcattagatgagccaggccatcaaactcgtggcaaaataatctatctctgataggtgctgacaacccttggaatgcaagatctgcgagctgctcatcacttagactcaaacaataacatcggctgtgaacatcacgaaatctttggatatatactatagccgattcttcttcttgctgctgaactgatatcaaatctgaaagcttcatctcattgatgccagcaaaaaagtagtcatgaaattgcttctcaagatcggcccattctccgatagaattcgatagtagtgatgaaaaccatgtgaaggccgatccagtcaaagacaatggaaaaaatctaactttcggagcctcttcagccgatgcctccccacattgtgctaagaattggctgatgtgttcctttgtagatacatcatcttgccctgaaaacatggagaaatctggaatcttgtatcggtgcagaagtggaactctatcgaaccactcaggatatggctgccgatacatatggatctgttccttaggtctcattccaaactgctcctctactaattttgcaattctatcggccaaatcattgttatattgatgcccatattgatgaagttcttctggccgatattgatatggctcatcatgttgatactgatatgtttgccccccgagccgatattgttgttgttctgcaatctgccccccgagctggcttttctgaataattaactcatcaactgttaccttgatcaaactttgtattgtatctgccaaaactccagattgattaaacaatgcgcgcgatgaattgcttcatcaactgtatcttgaagtatttcaactatcggcttggggaatcgagtcttctgagttggcccttctagtgtcatgttgaaacattgaagacaacgcatttgaaaatcaactacaaactgctccatctgttgcctctgttcctccgttaaattctccactgtgaccatgatcttggcattgacttcttcttcagacatgtggatataaaattcgtggtcctaccaggtgtgccaatttgtgttgacgaaaaaatcgaacacgccgccctaggagatctgcttagctccagtgctggtccaaaaggttgatgagatgcggacgtgccagtcagtttgatcctgcaactgacaagatatgcaaacagcagataaaacagccgatcggctgacaagccgatggagtaattccagccgatagccgatattagccgattccaattccagccgatgccgatagggttttgagcaatcagctatatgtagataatgatataaaggcaatcggctgtgaaaaacatacactggcctggaagatctgcttaacttcagtgcaggtccaaaaatcttgcctttaggttcgtgagcgttccagttgatttgatcctgcaatcaacaagaaataaagacaggaaaatcgtggttaaatccataaatgatagccgatcggccagtcgctgatgacatatcatttatcttccagccgatgtcatatttgaatcgattggcaattataaataagcaagacagaactaaatctactcgatcggctgtagatattaacgatatataattcttctgtcgatgtatatttaaatcaagtgattgggatagatcggtcgccatgccgagacagtataaatcacttagatcgaagtatacattaacataaagattataaacgtctatagcatagccgatcagatagatctagtatgtaacggctaatactccaatactactctatattaagatattaaaacagctagaatatatcaaacagaagtctaatatactttattgcaataagatcttaacataaagggcatatttaatatatcaatcaagcatataaggatataaagtagttaaattaggtaagatcggctgaaaccccgatgctatctccctagataaacataaaacaaactagatatcatgattatagatattacttaatagatcaaactcaaccgatgcagcattaagcataaagacaagcgcaagatgtaagcaagatgatgagaatatgtaagagatggtggatacacgatataatctagatcgatagcaaaatataactctaccgattgtttcctaacaacaagaatcagccgataacaagttatatagtgcgattaatagagattataacgcatatatgataactcgacgatttacataaacagaattagagtgttataaagatggaagcactaatcccgagaacgcaagccgccatgacaagtatacctctggttgaagatcaaattgatgcatctcgacccgaaagcaagaactcgtcgaaatagaatgaaagtaaaaagggtggcgatgcgccgaagttgtattgaacgtgtgttgttttttacatggtcctcgggctatatttatacccgagatacatagtatgtccttgccggacacgactcctaactctattacaactctaagacaccacaagtctttacggcagactcttgcccaaacatatctctaaggaaataacataaaatatcctaattaatagatacaattgcctttctgggactcaatccgtgcgtggcaatccatatgaagcaccttgtcttaacccgatgacgtgtaccaagtcatattaccaaaatcggcttaatcggctaaccttgtccaactcaaactctgccgatcttgaccatagccgattcggacttcagccgatccttactctgtttccgaaacaacttatcccttggatttcgcttcgattttatctctagctccgatacttgaattaccaaatttggtcattaacaaacgcatgtgaggactgaggtgagagatcttgagttcaaatcccacatctcacatatatttttgagaaaattccctatgtagcatcagaaaaagttgctcttccctctatagcatctaaacttaaaaaattcactacctagacaccctcaaaatttttcttccctatctggcatttctgttactccggttagcctccaccgtcaaaacaagagacatggacccaccatcaagagaccagcacgggcagccagccccaggcttactcggccctgtagctcttgctctcgtgacccattacagtgctcgaccaagcgcaagaggagagagctcaagtggtgacgcgcgacctcgccggcgccgccaccgctgtgccggctgatgcggtctctgtcaacgctgcctcccacacgtccttgttggagatggagcccaagaagtcacacttcgacagcgcgagccggcagcaggacctcgagctcgtcggccgcctcttgggcgtcctgacggcaacgcggagctggcggggagaggcggcgcggtttaagcggcaatgctaacagcggcgcatgtggtgggcggcgccagcgaggtcgcacgtcgctgctcgcagccatcgcctctgctaccagccgtgacccccgaaccccatcgctgacgatgtgctgtagcgtcgtactcgccaacgacggccactcgtctgcgagagacaagtcgccattgccaacggcgtccgctcgcagctgccgagcctgcaggtgcgccgcctgagccgctgctcgtagtcaccgcctccgctccaagccgccacccccgaaccacgccgccgacgatgtgtcgcggcgccgtcctcgccaacgatggccgctcatctgggagagactagtcaccattgccgccggcctccgctcgcagccaccgagcctgtaggtgcgccgccagcgccgctgctcccaactgccacccccaatccacgccatcgacgatgtgctgcagcgccatccatactaacgacgggcgctcatctgtgagagatgagtccattgtcgccggcctccacttgctgccgccgagcccgcaggtacgctgcctgagctgtcgcccccagccgccaccctcaaaaacttaaaaaagggcaaaaccgtcttttctcctgctagttaacaccgtcaccctcaaaactaacggaagtgccaaacagggaagaaaaattttgagggtgcctagatagggaacttttgaagtttggatgcaatagagggaagagttgctatagagggaagagcaactttttttgatgctagatacggaattttgtctatattttttgacttggtatgcatctttagtcctagttattttaaccgggactatagacatctttaggcctgaattgagtgtcccggtttttttacttgttatgcatctttagggtatagacatctttagtcctagttattttaactggcacacatctttagtcctgtattgagcgtcttggtttttttacttgttatgcatctttagttctggttattttaaccggaactaccggttgcataaccgagactaaaggggttacaaaccaggacaaaagatgggttccccgctagtgcctgaaccttagttagtgcatatcacctgttcattctgtatctgaaagaagatttttgcactgcttacttttatataaaacatgcacgggatatatacatgatttctagtacagaattgaaacttgaaagttaaaaatgagagcatatgttcttcagagacaggctagcagaagtgcgcaagcaagttcgaaggcgtattttacgatgaagcatagaagtagagattagtgaagatggagcgcagagacggaggatcagccttaatttggaaaggaaattaagactgagctagtgatcccttccattttgaaacatatcattattactaaaggaaaggaaagattgagcgtacttgattaccaaaacaaagaaaatcccataaatacgatacccatctcacgccgatcgatcaagcgcagccatgcccgccaactccggtggacggccaacccggcgagcctggccaacctggtgagcccggccaaccaggagggcgcggtcgcggaggccgtggtggccgcggcggcagtggaggcgctggcggccgctttggggctcgccgagatggcgcccgaggagggtggccccggcggtatcggcggcgagggtggccccggaggggatggcggcccccacggtatcggtggcagcggcggggacggtggttgcggcggggtcggcggcctcggcaggaaaggtggccgcgggggtcacggtggccgcggcgggaacggcggcttcggcggtggtgacggcggccgcagtggggacggcggggaaggtagagtaagaggccgcggtggggacggcggagtaaattaaattagcaactttacctgatgagtaatgcatttatattttaaaactatactaggccaaataaagggttgcaaaatcgcctctctattgcaatgatagttgcaatatttttctgcattattaagatttttgagaaacaggagaagaaaataagccaatgttgtatttctgtttctatggttgaaattaaacaagcagcacagcatcaggccaatctatttcttttgtatgttctttctatggcagtaatgagaggagataaaagttaattcagaaatcagaactaattagaagattgccacttgttcaaaaaaaaaagagaagcttttcctatcagtacaggtccaagcatggatagatggctcagtgcatgcacaatgcaatctcaagtggaagtatagattagactatctccaacaggctaggcatagcgacacccaaacccaaaatgcgtgctccaggctactgtagcggaaaaaaacagggtccaacagagtacccatactaaggacctattttaggtgctagccgaggcggaacccaaatatgagtgccctctctcctcgaccgaaacacctggcgcaactgtttcgcgggaggtggagagaagaggaaagcgcacctggccccggcgatagggaaagctccgccgccgacgagatctgctctgagctagacttcgcaggtatggatctctctccaacccaccctccttcatccccggtcccatctctcctctctctggacatggatttggccgcggccgctcgcaccctggccaagggcgcatcgcgccgcatgctgtgcctagccccagcgacgccgctcaaatttttgttgaccgcaccttccccagcatgtttgtgccatgtttgattgaatctctgttgtaataggatgatggataaaagtattggtggctcaagtgctcgcgctggtgaatctgaagaaatatttgggacaaatcagtgggcttttggtttttctgccgctttgcattcttttgatgttcctccgaacccccaggtttattgcagccatgcatatgatgattttctttatttacatatcaatacatcgatgattaacagtccttttcatcactagttcaacatgcatggctcgtcccaaatgtcatgcccacctataaatgagcaacctagccaggggttctccattgacaacaacattggctctgaggaccctccatcattgaaatcacagagggctgcaaagaagaagaaggtgtccaggagaggaactgcattcaccaaagaggaggacatggtggtgtgttcggcatttctgaatattagcaaagacgctattacaggtaatcatttgcaacatcttttatgaattctttgatgcccaaataacatggtggcataacatgcaggtgtgaatcaaacttcaggtggttattacaagaggatgcatgattatttcaatgagcacaaacctgaagggtccaaccgtagccagattgctattcagcacaggtgggcattgattcagaaagcgaaacaagttctgtgggcacaaagcagccgttgataggctaaatgagagcggaaaaaatgagcaggatcgggtatactttcactcatattatcctccatctatctaatttacatatggttactttctaaccggtttaatctatatttatttttgatagaaggtttaatctatattcatatttgcagatagatgatgttgtacaaatgtacgagaagacagaaccttttaccttcatgcattgttggaaactacttcacaacgaggccaaatggaacaataagtttcttgagctaaacaactctacatcacctgatcgaatggaacctccttcaactcaaggccatactgtagccggccatgcagaatctgggaatgagaatatagacacagcacggcctgagggtagggatagtgcgaagaggcgtagatcgaagagctatgcagagacatcatcatctagtacagcagttgaagtcctccagcggttgcaggagaaatcagagaagaccgaactgaagcaagaccagcagatggttgaaatccttagtaggaaggacggaaaaattaaaattcagagggatcttttcaaccttcagaagaagcatatgaagatgagtgtgaagcagcacaagaaggaaaatgagattagggagaagcagactgaggctcaactgatgtcagctgagtctagtattatgtccattgacattgagaaggtccccccttatctgaagaactattatctaggcatgcaacgacaaatcatggagcgcagaggattcagtagtcccttgaacaacggagactaaggagcgtgtgtgttgaatatatgtccaacttggttcgcttgagttgaacttttctattgtgtgcaactttgtactattatctattggagtgatgtgtgtctgttcatgtagtgactattatctattggagtgatgtgtgtctgttcatgtagtgactattatctattggagtgatgtgtgtctgttcatgtagtgacaattgttcatttcagcaacaaaatgtcatatatttcttatcaacaacaaaatgtcatatatttcttaccaacaggcaacaaaatatctttcagccactatagttcatgtgagcagccaacaaaatacaaaggtcttatgagtaggcagcaaaaaaactaagcctacaactaaagactagttcctgtgatttgcagcaaagggaccagagcattggccatatagcatccacatgtgttccatcaagtcattttgaagcaatgctgctgtctctctgtcctgaatgatgttttgagcatcaacaagtttttcaattgccgggatttccctatcctggttaataggtgggtcggacactccaggccattctgatggatggacagtaggtagctgaaccccacgctcatcttcaactaccatgttgtgaagtatgacacaagcacgcatgatggaattaagtacttttggactccataaacgagctggcctatgcaagattttccacttagcctgcaggacaccgaaagctctctccacatcctttctacacgactcctgttgctctgaaaataccttttgtttgttgctaactggcaaagcaatgcttttcactagtgtagcccaatcgggatagatgccatctgctaggtagtatccaagggaatagatgttgtcattgatatggaactcaacagagggtgccctccctttagccacatcatcaaacacattggaacgatgcaaaatgttaatgtcattgtgagaccctggtaaaccaaagtaagcatgccaaatcctaagatcctcggtcgccactacctcaagtattagagttggcttgcctttgtgccctctgtacatgccttgccaaccagtcgggcagctagaccattcccagtgcatgcaatcaatgctacctatcattcccggaaaacctctggccaaattgatgcttaatatgtgctctatctcctcactcctgggaggacgaagaaattctttgccaaacaccttgatcatagtcataacaaattccatcagggtcttcaggacagtactttctcccattttcaaatgatcatccaactcatcagccggtccaacatatgctagcatctttagagccaccgtgcacttgtgaagagcagagaatcctaactgcccagcagcatttctcctctgtgtgaagaacctgttcttggctgtgacctcatccactattcgaaggaacaattcccgtctcatgcgaaacctacaacccaaaattacagttgtttatcaaattaattcaatatatctgcaagaatagtgagcaatatacaattgatcatgaaaatgttggcatttccttcaacacaaatatttcatgaaaatggaaactgggccaaagattctaccttctcctgaaatgttcttcattgtacagtggacgttcaacgaagtagtcctgattcaattgccagtctgctgcaattcgatcacgcttgtaagtcttgtgaccagggactgaacctccccaagggcgttttcgtggcgtctgggtgaggatgaccactgcggccatgatctcatcgtcctcggagtatgctgcggctgtcccgaacattgacattttgacgtaactccaagccatggccaccacaacggaagtgcaggtctaaagccaagccaatttagggacaaattagccacaaattaaaagggaatgtgacatcgaacaagcaaatgctagaaatcagattacctgtgttctgattgactctgctgcgccaacgttcggccttgtccgaacggtcgctcgccggcggctacctcgctgccactgagactcccttctcacatgcagccggggcggcaaaacaatcctgccatcgagccaaccccacagtcccgcgccccgcgcccggtatatctcgcacgacaccctccgtttcccgcgtaaaaatttcatcgcgggcccgcgaaggaaactgtctgcattgcagggtttccatttgcgttcgctgttggagaaggcaagaaataggtgcatgacccttttgccgcaggcgacgcataccgtccaatgggtctcctgttaagggtattattgttggagatagtattattcagcaatataatgcagaaaaggcgagcagaaacatcatatgtccaaaaactatttgcccaccttgagattaattatgtactgcagagcttcatggtgaaacagttggctgaaagtttgaattatttggcccttttaaatggcattgatttcctataaatgataattaagctaactaacaaaaaaaatatttcctccgttacataatgtaagactttctagcattttctaaattcataaagatgttaataaatctagacacatatacaaaacatatgcattgattaatagatgaatctatttaaaaccaaaatgtcttacaatatgacacgaagggagtatccttttaaagtacatctgcaagacagagatcaggtggtttatctctgtaccaaactacaaatatgtatgatccaaacatatatgtatgatctgcaacatgtactactgagtggttgctttaatttgttaataatatgcctagctaccaccatacaggccacatgtgttttaaatgtttataattcgcaagttctttaaatttgacatttaaatgtgtgaaaataacatatattatataaaattaaatctgttcagttcacaccttgcggccggctgatagtttcacccacaaaaggaaaaagttcactgcttgttttcgatgtaatctaaatactccagacagatagcatgataactcactgctacagaaattattttttcagatgagaccccattagattgcaggcgggccataaataccagcgccagcaaaaatcggtcccctggggggtcagttgatggacaggaaaccggttggtggattgcatgcgataatgcattatcgtatgcggctactacctaagaggatactaattaagaaggaacttaatatcatattcttgcataaagcttgatcaatcatagccgtaaaaatggtgagatagagatacagtgttaagtgcagctctccaatactagctataagcatatgaaagcgagttggtttatcgttgagccatggatgtgcacgttttttcgcttttcgcagaaagagacggagtgtgatcctcttttgtatgttggtccatatacatacattttatttggacgaattttaaagggtgtggagcaccaaagctggtcatataaaggcgtataaagacgagcactgtctgaattcaggatcctaggccggctaaaccgacactaagatactgatccctcggatttttaatgcatgacacatttacttttagagacatgtttgattatttatgttattaatactttctctgatttttaataatgcatgacaccttcaattttgaggacatgcatgtttggtcatttcttatctttttattaatttctctctctaattaggccaaaaatgtcctcagcaaattattagttgtacttgtgtcgtgatacggtttttacgatgtttgtcggcaaattacatgaattttaaatgtcatgtagcaaaattcatcattaataaattatgttatttcattcattttatttattttatcattaaaattactttaaacataacatatatattttacctaaacttttaaataataaaaatggtcagatgtacgttaaaaattaatgacatcacacattaaaacctaaaaaaaggagagtagttaaatgtgggcgcacaaacagtgaacaaatcatgtaaaaaggctatagatatgggaaaagtagtacatgacttgataagatggacataactcgatattacaatctcacacgagcacaaatgacatcaagataattaactaattattgcagacaacataaacaaaagagctttgctagctagcctaaactttagcagacaatgcatgctgcaagccagctactttaatccctttccatagagatcatagatgctctactagtactgtaggataaacatgtcatgagaagataaacagcgattaaattgactaattatttcatcaaccaagctaattaataaaccaagctagtttggcaagcaagcaaattaatttagcaggcggcgctccggaatcgaatggccttgccggggacgtcgtacaccacctcgagcgtgcgctgctgaacgttaccgatgaaccctggcatgcggtcgctggcggtgggcgcgaaggcgaggcagccttggagcaggatccccgccgcgtcgaggttgacggtggccccgccgtcgaacaccagggcgatgctgggcagggtgatgctgcggacgccagaaaagtcgtagcacgtgtcgaggatggacaccggcggcgccggccggtacatggtcatcgcgctcctaaacgccgcgcgcagcgcctggtacgccgtcggcggaatccgcgagatgacggtggcggagtcgatcacagagctggcggagaagacagtgggcggcacggggagcgggcgtcccgccacgatgatggagcggaggagcaccctgtagaacgtcggcgacatggtgctgctgctcagcaacggcgtggagacgaaggtcgggacgagcgcggcgcgctgcggcggcacgccgaacatgatgaacccgaaggagctcgtcgacggcgggacgcagtacgagaacaccctgctgtactgactcgccgtctgctgcacgaaagactgtgagccgccgccgagagccagggttccggcgacgtcgtagctgaaggtgcttccctggtcggcgtgcgcgcagccgaagaggaagcccctgacgacgtcgtaggggcccagtgtgaggtcgtcggagctatacgtcccggtcgccgtcgcgccgttggcgtaggtgatgccgaactggcactgcgagttggccaagcagccgcggcggtaggggccgagccgcgcgcaggcggcggagctgcaagggacggcggcgtacgtggtcgaggtggccgggtcgaacagggggtcccgctgcgggtggcacaccagcagcgggcatggctggcattgcacccatggcacgtcgctgcccgagtcgatgatcaccgtctggctcaccgccgacgtgccatccggtgccgaattagtcgtcgccgtcgttcctaacctcgtcgtctataataacaaatcaatcaacttatatatgtataatagtagagaattgaagtacataaaaatatacgtagtactataaattcattcacatatacaggatgatgagatatttgttatatatatataggagtatcgagcaaggagatggggcttacagttagatggggcttttggccaatgccagcaccagtagcgacctggaggctacttaccacatgagtgtctccaccctcaacaaacttatgtggatccgcgccgtcgccggtgtcgccagcgagcctcttctggatataggcgacgcggagttggtcggcgtcgagcgccttgcccatggaggccacatcgtcgtcggtggtgctgttgtccgtgtccgaatacgccggcgagcatggcccggtgcccaagtgctgttaaccgacggttcgttacttggagcaactgtgcatatgacactagtccgttcgtcagaggtttaaaaaaccttcttatgaaaaactactccagtatgatgtgtagacggttaagatatttaattatttcattagaaaagacatatatatatatatatatagtagctctaatctacacccctctcttagaataactattctacacccctctcgcatcacggcatcacccaacccactcctccctcccgtgggcctcctcccgcgcgccgcccctcccctcttcctcccgcacgcgtcgcgtccctccccctcctcatttttctgtcgagctcccctcccagcgccttccccctctcgatcccctcctcctcctggcgcctccctccctccctctctctttctgttccctcctccccctccgtgtctctctctctctctcactcccgttccttcttttcttttttttttctatttttccaccaggatcgatcccttctctcttccttcttttctttttttttcctcctatttttccaccgggacctcctcccggcgcttgatcgatctcttctttttttatctcatattttccctcctcccaaggtctattctctttcccttcctttgcttcaccttaaaaagaaaactaaaaattaaaatagcaaaatcaagacttgaacacatgaccccatagtttataataagctctcctaaccaatttacccaataacactatgtgattaggggttatcgcttgcttgctttctacctctatataaattttatgagaacaaaccagttatattactataggaatcgtaccttgttactatgatttggtagtaatattatcgcagaagtgcagtaacacggtacgttactgcgaaatttataggttattactgcgaaatttataggttgttactgcggtttttacagtaacatcatgatgaaactgtagtaacagagaacatatgttattaatggtactactacaataccactacttgtgcatagctaaattattaaatctcaatcttgtgcaaaatacaagtgctaaaaatacatgtgcatatgcatagtcacaagttaacacaaagtgctaaaagtacttttcttcgttcatataaagatacatagtagcaagcttagtacaagtaaactattataatctaatctttaaacaataatacaatagtcttgttactacacgataatcgagacaacatgcttaacgaaactagatccatcatgactattttataacgttgttactgcggaaagtagccgtgttactatatattgactgtcgcgttattacgccgttccagcgagacgagaactaaaaaaaaagtaaatatcaatctttagagagcaatatctctcactttatatattatttttctaatccgtctgcaccataatattcgtaaaaaagtgctcaacaaaactagatccatcatgactattttttgatgtcgttactgtgagaaagttgtcctgttactgcacgatgaccgttccgttactgcagaattcctgtgagacgaggacaacacagtggtgggcgggggagggagtcaatggacgggtttgaccggcgggagggggctttgaccagcctttgactgaggtgggaggggggatttgggccctatgaagggtgggggaggtgggattggcccatgggagaggggggggtgtagaatagttattctagaggaggggtgcagaatagattcactatatatatatatatatatatatatatatatatatatatatatatatatatagacacacacacactatatactatatgtttattatgagaactttgaaaaattaatatttaagatgctctcaggaacaggaatttgtacaaaaatttgcacatttcagcttcatcatatatacttcctcagttttttaatagatgacgccgttgactttttctcacatgtttgaccattcgtcttattcaaatttttttttgcaaatatataagatataaatcacacttaaaatactatgagtaataaaacaactcataacaaaataaattataattacgtaaattttttaaataagatgaatggtcaaacatgtgagaaaaagtcaacggcgtcatctattaaaaaatggaggtagtatatagaagaaattatacccttgtggccagagcaggaagcttttggtttcatggagctggttgctatgaccatataggcgccgggttcagcgtctccgccatgagcaacaagattaatggagctagagaggacgaaaagcacaaccagtgctgctacaaacggggtcatggtcactatgactagatgtgcttgccgatagctaagctgttgatggctactgcctgccttgcattgcggatgtggaggctgcacgtgttatatagggcatatacgtacggatgcgggtttgaacagtacttgacagcacaggttatatatacagaataatatatgtatataatgcccctcgcttcttaaaatgccaactaattaaatacttatgtgaaaaaaaatgctgaaacattgatgtcataaaaatatataccgcatgtctcgcaatattattattcctagtatataaccataaactcgatttaatttatcttatgtatcgactaaaaagcatttgcagttggacttgacgtttctttttttaaagcaaatattatcttacatgtttattattattttaaatgaaatgaatttgaaaaactctttgttctgattccgatccataggtataattgtactttacatgtacaacatactcactactttttcaaaaaaagatttttcctgacacatatgttttacattttcaggcaaattaaaaaaaatcccgcttgtgaaaataagaagaagcaccatagatctagccccgtctgtaaaaatcaatttttacatgcgaaaatacctttatttccataggaggacctctttaagtccctttttttacaggcgggacataaagaggtccgctcgcaaaaaaggtagtagcgctattaaagccacgtggcacaactgagctcgagctagctctttctcatgtctctggtcctccctctctccctccatcactctcagccaaggagcaaagggtgttggcagtgggggcgagggcagtagaaggggcggtaaggcggctcgggacaagcgcagcacggtggagggaggagaggggacaggagcacggctcggcggtggcaatcgcttctccctcttggctcgacggagacggcggcgaagggaatagtggagggtcttggcgtgggcgatggtgtagtggagggagaggtggctcggtccagatctgctaacttctccgctcccctcccttctctctcttctcctagatccggcgtggcttggacgacaatcgagctcaggcgaggcggagaggcggatcctcctacgacgagcccaggagtggcgaacctaccgctagcaagcttcggcttggcgacggcaaggacgaccacggctagggcttcatctcggcaacggcaatgcggtgaggtagcttctacctggcaacggcgacgacgactgtggcgagctcgtttgattggttttttttgctgtgaaattgagctgaaaaatcgattttggtttggattcagttttgtttgcaaaattttaggctggattgtacgattggccaaggattttagcggtcagccgagattgaaatattttttgtagtcggacaatataacttagccgcctgcgaaccaccaacgaaaatctatttccgtaggcggctaatctccgcttgtaaaaatactctattttcactgacctttagttgcaagtggcgcggtcagccaccagcgaaaatcgattttgaccgcctgtgattaccctttttctagtagtgacttatcaaatcaaattgaatttgtgatacaactcttagcatatgttttcgtagaaacagtcatattttgtatgtaataattttctagaattatttggactaatatattgtcgacgttgtagatcctgactacgatggtgctggggtatacacgagatcgaggtaaaaaagacagagacaaggattttatactggttcaggcaagaagccttacattcagtttatatgtaattatgagaataggtagcaattacaaaggagaacaactgagtcacggaataccgacgaactcccgtcaagatcagtctgacgagaccaatcggtgatatggctgtgggtcctccagattgctttggctatggcgagatcaaagatagcgctagatccatcttgtcggcctccaatagcactagacggggtctgtttaggtttatctctaatgtcgatatcttgcggcgagtgttgatctctctatgttcgctcccctctctcctcctaaggggctttatatttatacccacagatatccctttgtctaagtaggactacggagacaagtatggatacgatccgaatagttcatgtggaactctgcttctccctccttatccgaactccttctatatacgaggtaaggttccgtataaaaaatggtatatggtgggtcccatcgagcttaattgactagtattgggtatgtgttctctataaccctgacatatataacttgtaacttctgtagatacaatcattttttttagacaactaaaaaaccgacatacaccactataattttgatctactacaagggaatggtcggtgtatttcctttttctattaaaatgttaatttcaaagccttagaaaaaacacggtggtggctttttttcaagctattttgataatacaaattaaatactttccctgcatgcatttgtatggaattataacttgcaaaatacaggtcatgcatgcaactttttcagtaaattgtgcttgtaacatcattattgtaccacggttggatgggactccagaggagcaaagctcatgccgtgttggcatttgcaaaaaaaaaaaaaaagaataagaaaagaaaagaaaaagatctcctgggaagaacatattcatagttttgtttctgtttacgtacaaaacatgaagtcatccaaaaaaacacgccggaactaagaatatcattaagaatatccaaaaaaagactcagtgagagcgatgccaagatgtgtgattgtccgtcttcgccatgtttattgtctcacgtatgcaaagtataaactggttacaagtacccggtccttattagctaaagtataaaagaacatggtaattattgcaatttgcaagcaccacatgcacagccttgggagtcggcaatctattcagaacaagacatcgatacaaattaagctaccaagtacgaactgatcctatttaattacctatatatatccttttcgcaagcaaaattaagcaccaccccggtggcttcaccactgaccatataagttaaaatgaatcctcatgaggccccttcatcactactcccaacctccaatgacagctttggaagtagggatgaaaacggagcggatacggacggataatgctcataccgtattcgttttcatattttttactggatacagaaacgaatacggatagctcgaatacggaaacaaatacggattatctcgaatacgaataagaatcgaatatgaccggacacgaatacggaaacaattttttctcggaacacgaaaaccaagttaacttctaatagaaacaaatatcaacttatataattagctcactttatattaaatgtagtataatttataaatatttttaaaaatttaaataatattaatagtgtggactagtgttaagagataaaccactattaaaatctaaaaatgtatattgaaggtcatagagttataaagaaatggggtatgtctcatggcttctgcggatatccgaatagcactgttcactggatatccgaattattatccgtatctgacggaaatcccgataccatattcgtatacgtatccggcaaaaaatatccgtatcagaactatccgagaattatccgatctgaaaggtatccgtattcgtttttcgccggagcggacggaaactatccgctccgttttcatccctatttggaagttcccaaatgactgcatgggaccactttacctcgttctcttagagcaagtttaatggtatagctaactattgactattagtctatattatagctaacttgg

SEQ ID NO: 4519 - DNA, 8651 bp, Oryza sativa
ggagtcgccaaggcggagggcggaggcggagaaggcgaagaaggcgccaacgtggtgaaggcagtagtcggcgccggtgcggtcgaggcaggaggcgccgaggcggcgggcagagccggcgagcgcggtgactgtgagaagggagtgcggggcctgagggagcagtggtagggattctagggttttttttactgggcttattgggcctctaggcctattgggccagttcggtcatctcgggtatttcggttaacggagcccaataaccgaaatactcgaaataaattcggtcttttgctagctgggaccgaatagctactcgaaataaattcggtctcggtcttttcggttcagtctaattcctgcccaccccctatacgtagtatatattattccacatacttacatagcaaatgccaatgcacaagctgagattaactgccagatcatgtaactcattaactcaatagctatattatatttacacgatataatatatgtggaaggagattaattattacgagatacattgccaattaaaccagttgtacatgatttgaggcaagattgcataggtaataaaacatgtagtgcatgcatctggcagccctgttgtaaaaatattcaaaagtatactacaagtcacgacaagattaaatagaaaagttcgtataatataactttttagtaagacgaatgatcagacataataataataataataataataataataataataataataataataataataataataataataataataaatcaacggtatgatttattttatttaagaaaacaaaacattcatgaaactttttggctgcgaagaagaatatataaattggcgtttttttccccatcatgtcctagtacgtcagccggtgcagatgggcggtggatgaggcggcggctggttgacggggaggaagacgacgcgagggcagcgcacggcgatgtcgtacaccctgctgtagacgacgccgattttgaaggacacctgcgcggtgacgacaacgttgatggaaggtgttgtgctgatgagctgggaggcgaggaggttcgactttgtgttgaggctgtcccccaccaggagcagcgacgccttgatgctcgcccgctgcgtcgcggcggcggccggcacgtacgacgtgccgttgccgggcagcggcgtctggagcggggcgcggtacatctgcagctgcatcttgtctttctgtatcgtcttcgccaccaggtccacgaacaccttccggtactgcaccatggcgcggctggtggtgctcctggcggtgacggtcaggttcaggtagatgcccgtgtcgttgctgccgatggcgatcttctgctgcgtcgctctcgccaccgcgaactcgacgtgcaccggccggaggatgacggacacggttatcaccacggcggtcgcggccacggttccccccagagctgccagcacgatcaaatggcgccgggcttgccaagatgatgatgctgctgctttattgtcttttcccttctcctcctcatcatgatgatcacccatgcctagctagctagctatgatcactatactctgtgtgtgtgtgtataagctagctagctactagctcaaatgaaacgggactcatcagtagctactacactactactatatataaacgtatgcatgtattgatcgatcgagcttaattaattaatttacagacgactacatatatactccatccgtcccattatatgtgcagccataagttttcatgcccaacgtttgaccgttcatcttatttaaaaaaaatatgaaaaaaaatttaaaagttaagtcacgcataaagtattattcatattttatcatctaataataataaaaatactaatcataaaaatattttaaataagacggatggttaaaattggacactgaaacccacaactgtgcttattatggaatgagggggagtatatagtatgtacttctctatatcaacgcatatatatagagagagaaaatactaacaaaatactacgaatctggacataccatataatattaggtgatgttgaggaaactccaaattggatgcctaatcatctctaaaaaaaaatcggacccggtcaaatgtttcagttaaccaccggtgaaacattaatataagttatacatgatgaaataaaaaaattagccactaaaatatttttctgtgaaacacggtaaagacaaacgttgaatcatatcgctattacgtatgaaacatcgagggttaatagattgaaacatatgctttttttatcggaatatagtcatgtgatatcttgttgtaaagatttaaatacaacgtagaatataacggtgtgatatcttgttgtaaagatttaaatacaacgtagatcgaatataacggtgtataggactgtataatgaagagatagcaagacacaagtaggttgttggttatagggttggagcgctcgatcagatcggtcgaccaaaccaaagcgaatctcgagtagcattagttcctatatttatgaaggaagggaatagcatcctattttactctagaccgacaaccttcaacttcaactgtcaaattatgtgttggccattgcattgagtacccgaatcggaataaagtcttttattacaaaagttgaacaatcagaataaagagtaaacggaccatggaacttttgctttgctatgctgcttttgtgaaaaaaaaaatgctccagggatactcaatccattatcttctttttttttttacttagtcacatctataacatcgatcgtacacatgttttacgaaagttcttcaaatcgagcgcccgatgcgggcacgtatgcatcgggcgcccgcacctcccacgccatccccaccacgcaccccaccacatgcgccgttgcaacaaatcacccgcaaattacgaaaacgttctattaagggaatccgtttcattttttgttccaccaacaatgtttcagcaagtatactcgtgttgtttcactatgtatagattaaatgttccagtgaattgaaacatcattttgctatttgaaacattgtttctatatatggtgaaacagcttcaaaaccgttgtttcatacgttatatcaaaatatttcatgaggtgattcggttgtgtttgaaacatttttgatctaattagtgaaataattccgatctacttggtggaacagcgctcaatttattttaaaaaaagatcgagcacccgatttgtaggcgccttgcatgttttacattgcctttttttatataattacactacatatgcatgcgcaaacaccattacactcacacaaacgaatacaacctctaacacatatttataaaactataattaaaaatgtattatctttttatggcatgtatatctaattaaaaagtctatttatcccttaagatgacgcccccttgttttttcatgacaccttaaaaagtcataaagaaattgaaaaactttgccgcaatatatcaatatatatatatatatatatatatatatatagagagagagagagagacacacacacacacacaatatgagctggcgtgatgtgtgtctcatgcacacccataatgtgattcataaccaatcaaccataatgttattcggatccctagatataaccgaaaccaaaaatataaaggtctatgggtttgtacaggatatggattttcatccctcaagtgaatatcccctcgttatttgtatgtcatctaaatagttataaaaatgtttaaaaaaattgacaacatatatagattaatatgaaatatatcactccataaacatgcaagaccaaattcaacttctacaagttgcaacaaaaagaacaaattaaactgaaaatagttatggtacaatcccatttatatttattatttttgttataacttgtataagttgaattttaacttgtatgtttgtggagatgatacatttcatattaattaatctatcttgccaatttttttaaaaaaatttattactatttagatggcatgtatgaaacgagaggatatccccttgagagataaaatcactttcctgtttgtacaacccaataaactagcctaatggtaaggaccaaactatgttttaagttgtacttgtttattattaattacaattgtgagactaaacctaatactacctccatcctaatatgtgtcccatgcatcctaccctccgttcatagttagagtttatcttttttttggacagaataatatctatcaatatttttttttggggggacagaatagtatatatcaacatttagggacggagcaagtagcttctttcccatgcatccatagctggaatcagatgctatatatattaacagaaagctagcttgggttccatagatagaagctagctgaactgaagaagtagtacgtagctagtgatagtgaagctagcttgggttccgtagatatccatatatatttaggcatgagcacggcatcggcaggcggcggagcgaaatcttcatcgagctggagtagtagtacatttttccggtggatcaaggcggcgaggtacgtagttgcggtggcggtgatcgtggcgatcgtggtgatgatagcgtacgccatcaagatggtcgggcgagagaggccgctggtggtgagtgtgaccggtcatacggtgaaggtgcagcggccgtcgaacatgtccgggaacctcaccttcgccttcaccgtcagggccgccaacaccggcggcttcggccaaatatactacaccaacatcaaggcgttattggccggcaggagcgcgtcgtcgccggcgtcgccgacatacttcgtcaaaacgggcctcttggacatggccgtgataccgcggctgacggccgtctcgcagtccttcgtgatgtccggcatcggtgccaacggggacgggacgatgagctccaaggatctcaggccctacttcatggacttgtacaagggcaacaccatgcgcgacgccgtgctccggcttaacggcacgctcatgaccgagatctactccggctacaacagcaccgcccgcaccgttgtctactgctgcgagcccatcttcgtcggcgacgacgacgacgccccggacacgcctgagagaccctgcgtggagcagaacgaccattccatcgacatgacaaataaaaaaaacatgctaagctgcgagctcagctagctcgatccatcattaattattcgatccttatctatatattttcatactaattaatttcttcgtcgttttattatatatttaattacgtacgtatgttccgatgtatccatctctcctgcctctctctatatatgcattccttttgcttgccgtttcctcactttacccacccattcaattaatgaaaatggcttcattttattcacgctaccagtaatatttctttttttccctctctatctctcatttttatataaactagaaaaaatacccatgcgttgcaacgggtaaacaagagcttagcaataaattaaaatattaggatcactatacattataattgaaaaggttaatgaaaattctaacattagaatcgctatatatagattataattagtgaaaatcttttctgggttttgggccgaaagctttccttcctttttagccctaggcaaatctactatctccctctgtttggcctgcttcccttcaaccagggagtagtggaaccgtaaacccaactcgcaccgtccactaccatcttcaacctcccgaagatagtcccatacggttgactgtcacccaaaatctcctgaagatagaaccatacggttctgtcacccaaaatttgttgatgatttttgaaccactcgatctactctttcccctttttttttccaaaatcagagcgtaaaactcgtgataaaaacgactgggaaagatcaacgtcatcattggtaactgttaaacggagattaaatccagcaaattaaagccgagtcgaaagtaaaaatcatggagaaaatgatgagggggagggggtgaggaatcgatttttgcaatcaaattggaggagatcgaaatcgatatggcggcggcagaaggcgtgcggcgaacatatcggattaaaaaaccggatgagtaaaaaaagcgcacgggagaaaaaatagcgacaaaaaattgatgaaaaaatcaaaagcgcccaagaggcacgcgttgaacagatcagaataaaaaaacagacaaaaaaaaccataagagttagggcgtgggcaaaaaaaaataaactctttcgtgtgctaaaaaaaagtcgggaaaaaaactggtgccaaaaaaaccaaacggactttttctttttttgttactttttttagtcggaccttttttcctttttttacagacgaagaaaatttattgttcttcttaagtaacgtagagatagagattgaaaacaaaacataaaattaaagccgattcaaacatagatgatgtaccaaactactagcaaaaatatctttaatttttataatattagagaagagatatatatacactccctccgtcccacaatataaaggattttgggtggatgcgtgtgacacatcctagtacaatgaatttgaacatatcatctggctagattcattgtactagcatctattacatccacccaaaatcccttatattatgggacgtagggagtatatatgtcctctcattgtttgcatatcacgcaaatggttatgaaaaaaatctaagaagatgtattaacatgtgatatatcactccacaaacatgcaggttaaaattcaacttctacatcttgcaaatttgttttttttttgttacgagatgtagaagttgaatttgaagttgcatgtttgtggaccaatatattacatgttaatacaagtcaatagtattaactcatctagggtttttacttctactaatttaaatataatatatagttttcctatcggtttagtttaaaagaacaccatccattgatttaaatattgacatttaaaacaagggaatgcctataccacattcaaaagaaaatccccctcaatttcaatcagattttggtctctaatatttgtgctgccatagggaaccttatttctttccgttcttccccccccccccctacatagtcttcttctcccaaattgcgttctcgcgtacgatgcttctgccacctcctccccaccccagcgcgccacccatcgcctagccctcaccggtagtcaaaaggtacgaacggcgctgacgaggcccaccacaccagccacctaccccttcccaactctctcttttctctctctccaacttccattgctaacccaccaccctccttcatccctgtggctctagcattgccactggcgcctcggcgcccgcccgtgtccaccacccaccaccgagccgctgcctctccgaccattcctttaagtctggagaaaccccctcttccctatcccccaaccctccttctacccccacccccaactctagaccctaacttggtcagggtcgccaccatcggtcgctggagttcatcaaggtcgccaaagttggagaagaagcccacttgagcacaaatcgtgaagcagatgtgaatgtaaaaaatttgcaagatttggttctcatttttctgtcaaatgtagtttagcaattccgttaaaacaatatatgcatgcagattcctctcgctctctcgtcgcatagattatgtcatcatcgtctatagctcaatcaactttcaaattacgatacaacattttacctatagaagtcttaaaaaaaggaacaattattaaaaagttaaacatttgaagttggactgtatacattctaggacagtgtttaattaaagtggtacatggtagtactgttactactacctgaaaactcggagcttataatggtagcttatgagaacttggacaacttgagcctcccagcctcagtgcctcacatctgggaatatagagataaacatagtgtgtctaaaccatatgtcctggtactagtaggtccttgatgttttgccttttttaatttggtcatcatatactaggattctttttgagactttgtccctttcatttacatcttatcataccaaagtatggtatatatgtgtaggatttctgtacgtataatactccctccatcacaaaatgtttgacgccgttgacttttttaaacatgtttgaccgttcatcttattaaaaaaatttaagtaattattaattcttttcctaccatttgattcattgttaaatacacttttatgtatacatataattttacatatttcataaaagtttttgaataagacgaacggtcaaacatgtttgaaaaaatcaacggcgtcaaatatttagggacggagggagtatatttttattctttttggaaagtatacagctttatagttatatcaacatgcatggttgcatggaccattgcaacaatacacgggagggatatatgcggagcggagcgagcaacacctagcttacacacacacacacacaaagcttgctaccaacagtgtgtaaagcgaaaggtttgcaacacaagatgtgcaacgaaaggcagcgtgagtgtggatcaggggcggatccaacgtgggtgc

SEQ ID NO: 4520 - DNA, 13686 bp, Oryza sativa
  unsure (1)..(13686): unsure at all n locations
aagaagattctcattctgattcgaaaagaagattttgcacttgatttatttaaactataaacttgcaacttaaaagttgcatacaatttcgagaggaatagctgaagagaaagcaaaattacagcattattcagatatcgcccaagtgcgtaagccaagttcgaaggcgtattttagaagcagcagcgaaagcggttttgtcgtccacgcgtgctctcccctttcgaaccaaagctagttccctcttctggtcttggaaggcgagggaaacctcgcttgcagcggcggaatgtcggccgaggcggcggcggcgaaggaggaagaaccgtgctgcatctcccacgcattcgaccgcgccgcccgccggaaccctaccgggctcgccgtcatccatgcggcctcctcctcctcctccggctccgacagcgagcgccaatttacttgcgccgacctcctcgccggcgtctccaccctctcccgccacatcgccgcggagctcagctcgtctacctcccgccaccgtgatgaatcgcctggtgagtgagcggtgacttggttcgtgttttttttaattaactcgtagtttcgtcctctgatcgaagggggaatttggaaccctaggctgttcgggtcgccccgtggaagccgccgcggcgcctagggttgtgggggtttacgcctcgccttcggtggagtacatcgccgccgtcctcgccgtgctcagatgcggggaggcgttcctgccgctggacccatcgtggccagaggagaggattcgatgggccacctcgtcgtcgaatgcggtgctcgttgtatcatcagggggtttgggagcagctcatgtgtttgcgagcagctcttgctctgttattcacatggacgacgacttatggcaagtgtttgaggatgaaaagggtgggattggtcgagatgagcttgcttggccgtgcaagtacaagaagccgagggagttctgctacgtgatgttcacatctggttccactggaaaacccaagggtgtttgtggaacagagaaaggtaacgtcactgcaccttgcttctggttcactgtttcttctatgctatcatttagaaattttgcttctgacatggcaaaggaattggttgacatgtctctagatgctcttcttgagaaagagtagtttagtatactgccgtcatggctatcttatgccaatgtttacaatatccaaaatgctagcctaagcccaaatgtttactatgccaaactgcaggcatagagtatctgaaattacatggtagcaaaaatatatgttaccagcgaaacattaaatggctcatgtttttttatcttttgctttgtaatttcttatttaaggtctgttagattgtctttctaggtttggattgggcggacagctcattaagatctcttattttgctattattccttaggtcttctgaaccgctttttgtggatgcaaagatggaaacctctatgttcagatgacctgttattgtttaagacatctgtcagctttgtagaccatctgcaggagttcctttctgctgtgttgacttgcacaacacttgtcattcctcctcctaatgattggagagctaatccagcatccttggccaacttgattaaggttacctagtttaatcattgttttggtggaaatattgctattcttttttaatgaaatagtaggggagagagagttatgctttcattgtccaatttgtcttctccataaaacattatatccaaggcttctgcttgttgaaataaattgcagtagcgttcgggaacagcatctctgatgaattttgcaaatatagtcctttttgtagcagtcattttgaaattttgaattacaatttaatggggcaaactaggatgaaagtggactgtgcacatgttggcacggttgtacactaatttgcgataaataggcttaccttttcattttccttacattttcgcaggtaggaattttttttttctaatacaagttatatttgcttaattgtgtccaaaagtgggtaaaatttaatgtatattagtacatttttgtcctctttcaaatatcattggaaagagctactgctaagagatatagttctacattattcttcttccgaagcaaaacagtaattttaggatgctaccaatgttgtcagaattggtactatagtttctggctcttgtctattttagattcaattgctttgataaaaaagtagcaactcatataatgggattttcatggtaaatcaatacatattacgattatagctattacgccatgttcttcttggtgggcctgattttttttttctaattttttcttaggcatatggtatatcaaggatgaatttggttccatcattgatggagataatactaccttccctggagaaaaatctttcatggggacataacccgcttaagatgctaatatttagtggcgagaatctatccatattgttgtggaagagagtgcatgaaattctgccagagactactattgtaaatctgtatggaacgacagaggtgagaaaattaaccacttgcatttcatattatgttatctttgttttaataatgtattcttataatcatatggtttacaccatttatcttactggcttctggcgatcaaaatcaacagtacattggccggccatctggcttgacttctcctaaaataaatattggtgaaaactgatttgtaccacatcttttccatgtacacagaattgagagcatgacttgtgtcatctttactattgttagcataaattacagtaaaatattcttgcaatattaagcttgtgaccatgagtggtaattcatggtttggttgcacatcatttcctaaccatcattttactgattcctgttatactaaaactttaagggagttatgatgaagagcacatgtgccataagggttgagtagttaaattctcttacacctttttattcagcatgaatcaaacttgatatttgcttcatgataatttaaattggtcttgaattatgatatgaaaattgaaaaggtacagttagtgttccattctgaaacacgtgttacggtgttaggtaactcgtgtagcaatatagcgtacttatcattacttggtatatgaaggccatcgaactgtgatcttgaaactagcatgtttcatttatgctatattggtcctgttctcctcatgcaaggagctgaaatggcagtggtgatatttcttctttagctaataaaatgttgcgcttgtgattcaggtttctggtgactgtacattttttgattgcacagatctgcctatacttttaaagcgagaagaattaactagtgtaccaattggatttcctatttcaaattgtgaagtttgtattgcaaccgacgccgaggtagcagatgaaggagaaatgcatgtcactggagcatgtttatttgctggatatttagaagagtccatggcgagtaatcacactgaagacaatggaagttcaacatactacagaaccggtgactttgctcgacgcttaaagagtggtgaatttattttccttgggagaaaggaccgtactgtaaaaatttatgggcagcgtttttcactgcaggaagtggaatctaccttaaatgaacatccagatgtcagtgctgctgctgttacttttcaaaataatgaatttctggattttagggcatacctggtgcttaagagtagcgccgcatctgtggaagactgtcagcggcgtaaaagatacaaatcttttgaagttatcatgccatcaattcgaagttggctcataatgaagcttccaccagccatgattccaaggtttttccttcccatggaatcattacctctgacttcttcaggaaagattgattatatgaagctatcaagcttgaagtgtgccttggagtcctgtgaaactgaaactgaaagaattacagttaatccacatttgcaagttatcaaaaaggtctgttcaagcactctcttgtttttaccgtctactctactgttaattttgtttctgtttgtttctctttggagctattgtattctttgagtattcattattataatgatcattttttactgatgtcatctcttatctactgtaggcattttctgatgccttacttgttgatgaagtttccgagtttgatgatttcttcaccttgggtggtaattcaatttctgctgcgcacgtagcccacaagctggagattgacatgaggatgctttatatatattccaccccttctaagctcttggatgctttatttacaaagcacggttgtttactttcttctagtcatgagcctcaccctaagaagggattggacatatcttccagcatacatagctcatttaatccgatcgctacaagtgtagatgataactttcctgaagtaaaagcacatataaatggagatggagagtgtgcacatgatgccatttcagggaattatgcaaatgaagtagatggccagcttaacagaaatgtgcctttatctaatgatagataccagacaaaatccctcttgttggatacatgctcaaatgacagaaacagtgtcgatgtcagtccatggatcttgaatttttgtttagtaaagaaatggtctattggacgttgcaatagatttatgcatggatacgaagataagctgcaaattgaagatgtttgctcatatgttccctacaacaaaagaggttatcttcaggccctttggaacattcctctcggttcatgtgttgacgcgtcacctttgcttgtctccaacaatggcatgctgagtatatttatcgggtcccattcacacagatttctctgcattgatggctgtaggtgagttttccttgttgcaaggagttttttttttatcttaactagtcattgtttcttttgcttttcctgatttactttgaagttgaatctagaacaatctaatgtgccacatacgctctaatgttcttatgaaatggcatgttgtgtatttaatataaagtaatttattattgatttgtttcattttaatttgattcaatgaagtatttaggttctgacctttgcatactaactgttgtttgaacttgctcccaacataatatgaagtggttctgtgaggtggagtgtcaaattggaaggacgtgtagagtgttctgctgctataacaggtgacttttcagaggtaactcaacaataaacaccagcacgaattcacttagcattcttgcagccagttcatggtagtacatcttttgggcaggttgtagttggatgttataaagggaaaatctacttccttgatctgttaactggaaaacaagcttggaccattcagactgatggagaggtacagctgctgcaattttctcattcaagacatcttttaagccttatagtgacatagaagttgtactttcatttcagaataataccgaaatgacgctgaactgattattataaattatagatatactcctagtaaatttagggtttcggctataatccctgttatattttcatattattgaagtggctatactgtaactccctaattgctaatggtaaataataagataaggggacatttatgtagattgtagaagttcctcccattaagcatcagctggaaagatatatagtggcaggtgtctatctcttcttaaagaaagagcatccaaaaaggtgccttcatttaattgatttattacggacagtactttatttttcgtgaaatcaagggtttgtactgcctaataagtcttaatgtcttgctatattgaggcttatgagtcctttttattgagtttatttcagttttttcctactattaactagcaacatgctattgggtgttacaacgaatgcaagtaaaatagtaaatgcattagaagagtgacacacatgtctacgcatatctagccatgcaagttggggatggaagtaggcaaagcagtctcgaagttatgccatgactagttattagttctgttggattttgttccaacaagttcagtatggctttgatgctgaactttcgaaaaacaatatgctattattctcctggtcactatcacctcacagaatgttgtcactgttcatgtctcacaatctcagattgaggtatctatcttcttgcaggtaaaaatgcaaccggctgtggacatgataaggaacttaatatggtaccattttactgtttcatccatagtacattagtactcgttatcctttgcactttatactttttctctggtctgatcaaagcatgtttgttccaataatagcctctctactttcaactagaatgtggtagtcatgtaagggggcttatggcattctagtcttagtctagtgttttgtcatggcaatacatatgtttgtctttgacctcttaccatacatccaattggtggtgtctcgactaactttacaggatgatgagaggaaccaataccaatagtctctcatcctatgtcctattcgatcatacagatgcatacccttacacaaaagatgagattcagcttgtagttttttattaattctatgtggtttataatctgcaggtgtggctcttatgaccaccatttatatgcgttaaattacaaagatcgttgctgcacttacaaaatttcttgtggtggaagcatttatggttctcctgctatagacatggtattcttcctcacagtatggttatttatttcatctaggctatccacaaatactttgtcatctatattgctccttgcagacacacaacatgatatatgttgcatctacgagtggccttgtgactgcaatatcacttgaggtgagttttagtgtgataactttaatttagggaaaaaatacagccttttccttctcatcggtatttctttccttctttgggttccatgggagatgtctttgtgaacttggtgatatcaacgaaaacatcattagcagcttaatgtttgaagtattcactggtttgtggtttctttgtggtaacaggtatcgtcatttaagataatttggcaatatgaagccggggcaccaattttcggttctcttgctatacatcatcatggtggaaaaggtagtcctcaaacatgttgcaatgtgcattgatatccttcaatatgcacttacttgtgtttttattatatttcctcacaaaaaaagatttaaagaaatgcaatatgtacagcgtaccacaggatcagtgaaaactatatcatatgtatagtttggtagtatatgtgtgtacacggatcaaacatacttttatgattcgatcaaatatatacttttatggcatgcagtttttgctgatgattgtagttgcaatttacagttatctgctgcctggtgaatggtctggtgattgcattgaactcacatggctctgtcgtttggaaggtgcaacagctttatacagtacagttttgcaattgaatgacacatcatggatgtagttgttgatcatctgtaaaatactagtggaaattcattattcgtatttggtcaaacttataagcaggtgtcattagagcacatataaactgagtacctcttatgatagctatggcagtatgccactattaattctgctggtgccagcaagtggtgggttggataaatgggttagaaaatggctcccatgttaggcaaatggggttgggcttgggtctagtgccatgtgagcaggaattggtgtaatgccagatgatagtttggttggttaggcttataaaaaaaatcaagcttagattaccaaagtaaatccagttttattgtggtgtgccctggtgctttctaaacacattgatgttgctttcaacaatgtagtaactaatttttaaaaccacaggcatctgttggtggtcctatttttgctggtgcatgtttgtcatctggccttcctactcaggtatggtatcaatttatgtgtcttttcattgactaatgatcaaaagttacatctgtagcttatggagttccatgtgaagtgtagtgaaaatcttttacatatatgtcatttgcaggtgttgataccttcccgtgacggaagattatactcttttgatactgtaagttttgatctcctgaattttgaacctcttatgtgagcagaactttagcatagagtaatgaattatgcatggtattgcatgaatgctgcaccatacaataactctgtatttaaacaacagtttcaaaatatatttggtgctcgtgttttcaaacacaacacacccgaattacaattactgatcattggacacctctcactgccatgctcctgtacttgtttcctgatgctaatttagccatttcagggagtcctcaacgtaagggtggtcaatgaaactaattttagaaagggattatctgttaattaaaacagaactcttcaatcgttgaactgtgtcataatgtgtttctaaataaccagaaaaacaaaagggtatcttcacaattgattggtacctagcaatttattacaattctgattcccatcttttagcaaagactagcaaattgcatgtgcactgcaacagcaaaaaataagtcatgttgtgcacactcattctttgaagaatctgcaaactggccctttccaattccttttaactatacggattacttccctacatacttatcaggtcttaccaaacaaatattaacatcattttgcttagacatgcttcttgtgggggccgtttgaatttagtgagcacgtatgtttcaccgaggaggaggccccatatgtcagcgatataggtggtggtggcagattcacttccgccaccactactaccttttaaagtagtgtagaatacaggtagtggagtgatttttttttcttacagacatctggtgctcttctttggaaatatgaagttggagaccctattaccgcatctgcttttgtcgatgaagtgttaacagcaacctcacctggagcatctgaaaggtatttcatatattgataacatagttacgcagtgatcatgtatcaagaaaatgaccacaccttttcttatatatagattcgcttgtatctgcacgagttcgggacaggtccatgtcattaggattagagctgatgctaaggaagagaaagttaatggaagtatttgtaatgacttggtgcaaggatttgctgcaatagatcttcctggggacatcttctcatcgcccttgatggttggtggacgcatctttgttggatgcagagatgatcaactacactgtctcacaatcagctcatagcttcaagccgaataattggagggcagatagtttgcttcgcattgctgtaccgagagctcagctagtcagcatcatatccatcctgctatgattatacaacgagaacattttccctcctggtaagacgcacatcatttactgttctgagtgcaatgtttacttttgaagtagtcttctgaactagccaacaatggaagaattgcagaagctgctggtcttcctgcaaattagcaacagtgaagaagtgcaaaatgaaacaggacgacgtatggactccggtaactaggcacaaggttttgaacgtcaaaaattcaatttcacaacatgagtgttttccccatatgtaaaaccacttccgttactctgcagggctatcaagcagccgctgcttacttcagttatgcattcttaaggctgtgatttgaccaaacaaactacacactcaactggggtcttgttcagctttgccttacccgggcagcttggtttagggatgcaaatggcccgtattaattaaggcctgttgggtttagaggaatttcgcgggaattttgaaggaattgaattgtttgctgtgtaaatcatgtaaaaatttctgcttttcgaaggagcccttatcgggggaatccttgctgcacgggaccgaagtcaccgaacctctgctgtattggtggtgactgagatgttgtgcagtatgccaattcgtccttgtgattcagattaaccgtaagctctccagttcaaatggtcttctcgtgggcctctgtttcaacagcattttgggtagtctctactcaaatccgagtaccatttgcgacaacgcgctgtgagttcgttaagttgctcccaaaaatccaagggtagggtccgaatgatactcaatgtgagtaccatttacgacaaaaaggaaaagttaagttgcacccgaaatctaaatgtttatgtagtagtatagtatacactagtaacttgctaaccaactcgttcgcaattcacaaagtgctaaagggtagcacaaagagagagtagaagcaagcgaatgcaaaagaattaaagaagcctttataagaagagaaggccaagcttgtgttgggttggctaaggtagcagcagtccaaggcccaccaaagcccacaccaaatagaatagcagcctctctccatctctctcacacactcaactcaactcgactcaaccaagccaggttgaggcggcgcggcgaccaaacccccacacccgcaaccacccaccacccgccgccgatgcccggcgggccctcccgcgccgccgatgcggacgacgacgacgacgacgagctctcgcgcctcctctccctggccgaggccgacctcgaggccggccgcctccgcgccgcgcacaagcacgcccgccgcgccgcccgcctcgacccggactccacccgcgcctggctcctcctcaccgcggtctcggtcctagccgccgaagactcctcccaccgggccaccctcctcttcccggactccccccactccaaggcctggcccctctcaccttccgccctcggccgccactacaaatccctctcggaatccgtccgttccgccccgccctcctcttcccccgcggtctcttccgccgtcaagaaggcgctccgccgcgccgcngacgcatacgccgcgctcgccaaccaggccgccgcccccgtcccgcccaccttttgaacggcgtgcgccggctcccgcctcctccatgagttcgaccgcaagtacgtcggattccgcctcatgtgcccctcctgccgccgcactttcctcgcctccgaagtgccccctccgccggaggctgaggcgaaggcggagccagacccgctgccgccggctaagaagaagcccaaaacccagaagcgtgagatgacgctcgccgagatgcagctccagctctccaagaaaagagcaaccaacaactcatccagactcgacgaggatgacgacgatgacaatgacgatgacgatgacgatgatgagggagaggagcagcagcagaacaacgactctgagatgatggatgtggaggactcagacttctacaacttcgacgccgaccgctgcgagaagtgcttcaagagaggccaggtgtgggcattgtacggtgatgatgacggtatgcctcgtcactatgcgctggtggagatgattacaccagggggccgattccgtgcacagataaggtggcttgatctccagccagatggaggggaggggacgccatgtggggagttcaaggtcgggagaacggttaccgtgcattcagtgaacatcttctcgcatcaggtcgcctatgagagggtggcgagggaggtgtaccggatttaccccaagaagggctcggtttgggcgctccatggcggaaaggatgccgattcggggaggccaaagtatgagtttgtggtgttcctcagtgggtacagtgacctttatggtgccagcttcggctacctggagaaggtggaaggtttcaggagcatctttacccgccaggatgtcggtcgcgatgctgtccagacccttcacaagggagatatggggaaactctcgcatcagattccggcgaggagagcgcccaagggtgaaggctcaaccctgcctcctactgattgctgggagcttgaccctgcatcattgccttctgagttgctgcatgacaatcagcagaaatagccgatgtggtaacttcgagaaagtatcttagctgataggattgttcatactgtagaatttgtcggaggtcataggtctgtggtggtctgcctagtgaaatgatccggtgatgcatttgcttcacctgctttggatgtatgttcctccatgcttatggctcctcgtcaaggtagagatttagatagcgggatacttgtacctgatgctgtgttcaattccaccatcaacaactttcagtgcatgaaatgaatcatcttttggtattgatggtagacacttctctgttataacttatatgaatgatattgaggaaattactctgcaatgtccatactatctgttgcatttcaaccaaactagtgtctatcgtggtgagttttgtgcatataaaagggtgtaaatttttatctggaagaagcaaaaagcaatggtggttgcatctagcaagtggtgccgggaaggcagtagaaactgcttggcgtagtccagtttggacagtgaaagtacaaccacgatggatgaaatgttgtgtgccggtcaatagtagcatacttttaagtgatgctttgttcaattccaccatccacaaattgcacttcatgaaataaattatcttttggtattgatggtagacactactcttatcacatgaatgatatttgaggaaattactctgtaatatccatgttttaggtagcattttaaccaaaccagagtttttcttcttctgaaaggtgcaagcgtggggtaattttcatcgagaagaagcaaaactgcaaaagcaatggtggttgctctatggtagtattgtgcaagttttgctgagagaaggcagtagaaactgcaaaagccagtttggaaagtgaaagtagaacgacaacgatggataaaatgttgtgctgatcagtagtagtagtagttgggagtactttgtactagtagatgacatgatttttcctcttttcttcagtatcgttttctttcagttgtgacgtgtttttgaaagctcacaccgctgtacggtatagttgacccagccagtatggcgtcagtcaattacaagtagtcacacccagaaaaagaggcgaatactccttcagacaataatgattctccaaaaatatccacgtcagaagtcacaactgaaagcaatgctagctaaaagcaacactcgaacaaacacagcaagaattggtctttgccttgcaggcagcacaagctctgaccgtgtcatgcaacactttctctgctactacaccgtcagagaaatttccgtgttgaaaaatactaagccattcttacctgctcgtaacgaccaagtgtaatgaaaaggaaagcatcaagaatgatagtactactgcaaagtgaaggattaagagtaggcaaatgcaatacaagtagacagcgcagttatgcagaatggaagagctccaaagaagtgcaggagtgcaactctgaacttcctagtctccgaatttttgcaattgattgatgttcaggtccaaacagaacctcttctcattttggcacaaaaacgaacaaaagaactagtatcatgcatgattcataatagtatcatcttcgacccaaaaaaaaaagaaaaacctaagtaaacataggtaaagaatttacttgtccaacagcaaggacaactgctactgggaccactcttataattcatcatacaaaaggttcatg

SEQ ID NO: 4521 - DNA, 8913 bp, Oryza sativa
atacggattatctcgaatacgaataagaatcgaatatgaccggacacgaatacggaaacaattttttctcggtacacgaaaaccaagttaacttctaatagaaacaaatatcaacttatataattagctcactttatattaaatgtagtataatttataaatatttttaaaaatttaaataatattaatagtgtggactagtgttaagagataaaccactattaaaatctaaaaatgtatattgaaggtcatagagttataaagaaatggggtatgtctcatggcttctgcggatatccgaatagcactgttcactggatatccgaattattatccgtatctgacggaaatcccgataccatattcgtatacgtatccggcaaaaaatatccgtatcagaactatccgagaattatccgatctgaaaggtatccgtattcgtttttcgccggagcggacggaaactatccgctccgttttcatccctatttggaagttcccaaatgactgcatgggaccactttacctcgttctcttagagcaagtttaatggtatagctaactattgactattagtctatattatagctaacttggagtataatagattaattataaggttggctctattttttatattctctttttctttccctcactatgaatttaatgtaaatatcttggaacatgtgtatagctagctcttgcattagagccaacacccctcatttttctttatctctctcttccacgtaaacattggcatatagcccactattatccttgctcttagttgtactaaatggttcaattttcgatttgttatactaaaagcaagtttaatagtatagctaattattggcttttagtctatactatagctaacttgtataatagattaactataaggttagctctatttttttattctctttctttctcttattcataatgtaaatattttggaacatgtgtatagctagctcttgcatgagaaccaacacccctcacttttctttatctctctcttccacgtaagattatagttgacatatagctcactattatccttgctctaaattgcatccacacatctctcactatgaatttaatgtaaatatcttgggacatgtgtatagctagcttttgcatgagagccaacatccctcacttttctttatctctctctttcacgtaaacttatagttggcatatagctcactattatcgatccttgctcttagttgtactaattggttcaattttcgagttgttatactaaattgcatcaacgtatcgatcaaacctgcagtgagctattgatgtagattatagtttttttatacaattattagtgtgcggtattttctctctctaaccttttagtccatgaaatactttttttcaatcgcagactcaacttttcataactaagatccagactagactagctagcatcatcaacagcgcggtgagtttactagccattatgcatctgaaaaaataaccactagcggcaggagggaggcaagcctagagtagttagggcttgagctctaggcttctccaaaattataagtaaattaccatgtaattttagagaaaataaataattcattagttgagtcctagctaggttagtcctagtgtttagtaattatttctggttttgccactaaccaccaggctttagtaaatattgtagacgttgtgagctgtatagctgtcgtgacgttaattctgtgggtcaaaattcactcgctgacatattgaaaggtagatccggctccttgtgtactccctccgtctcaaaaaaagaaaccctggttttcgtgtccaatgtttgaccgttcgtcttatttgaaaaaattacgaaaaaaattaaaaagacaagtcacgtataaaatattaatcatgttttatcatctagcaacaatgaaaatacgaattataaaaaaatttcatataagacggacagttaaagttggacacgaaaatctatggtttgccttttttttgggacggagggagtatgttaacatatattggcaaatgtggtgtagcagaaaggaacacctggccagctgcccagctcaaaaggagctagctaggatacagaacggatccgttgtcaagctttggggttaggaccattaattatattggttccttttctatcttttccgaagcatcttacaaactttaatttactttgtgtacaccttaattaaaagcttccatccgctttggatcttcaccatctgatcttgtgaaataagagattttgccactaagcaatgattgtaccatctcactttttctagttctggataaaccaataattcagagtttccgataattttgttcatctcaactcacaatatataatcaactaagacaacatgcaatgcacaatcacacgaaagtgcattatatattcatctcggtcaatttgttcacaggaatccacattgtttcttctatgccctagctacctatattaagcgcttcagtcctaaggacttctttgtttggtggcatatgtaccaatggtatatttcaacctaaatggtttttgcggttgcttttgttgatgagttccatggtttctccccctatgaaacgtagactcccagcccatcccatagcttccgaggtatctagctaattaagagaacttcaaagggaaatttaactattggccactattaggtttgccaattatctaaatacccttattagatttgtccttattttttttacccctctaaagtggtggcatcttaactatttgtcacttttgcccatgtggtatgccaacatagcaacacagtgtaaaaatcgacgtgggacccacttgtcagtctcacagctctccccttcctctctctccggtctggctagccccgtcggctgctcctctctttcccgcggcgaaccatgtcggtggtggcggcggcgtgccggctcgtggctgcggagaaggagggggagccgagcgccaccgggagtccgacctcggcagttgcgagtgaactagctagatggattttcgcttgtgaacccactgctctatgataatgtgttagtaaactatatatcttcagtctgtgcaatctttgatcgcacttgcactatattgtgtttctctgtaatgttcttgtctgcttatctttgatcaaatagtcgatagaaatgttcatgtataacccacctttttctgagtttttttcctccttcaaaaaagcggttgcaagtttactgccgaggaagagagggtggtgatcgagttgcaggcgcaattcgggaacaagtgggcgaggatcgcgacctacttgcagggcaggacggacaacgacatgaagaatttctggaccgctcggcagaagcggctcgccaggctcctgcgcgggcctctccctgctgcacgatcaacagaacagcggcaagggcaaagcgtcttcttcatcttctctcgcggctcacctgaagcatctaggcccccgattgttgattttggtaattaatgacaagcattatttgtggactaacaatttccttgagttatattttttaagttaggttcccatattgtgtgcacatggatgattacggtggattaaattggatggcgcaaagctaaaagatcgaagacggtaaactagaggccttaaattttaaattgatcaaggagattgggcgatcaaattttgctagtttatttatagctttgtcgtactatcaagaggggttatgacctaaacaaagagatgatcaaaatgccacattaggtcatattgcatttggcacactttattttatcaaaaaccctgagtttccgcctgggccggtctgaccgggcgtgtaccgccggtctgactgcaggcatggcgccgatttgaccggccaggtagcccggtctgactggccggctggatgccagttgggcgcctctggatggccgatccagagccgccagagacgcagccggtcagaccgagccgatggcggtctgaccgagccgtggccggtttgaccggcaactctgctgcggtctgaccagccatgtgtgtcaggtgtattaaatgcacggcaacggctagttttctagccgttgcagagtagtccggtctgaccagccactatatgggggtctgatcggcactgcagtgaggttggggatttcgaccccaacggctagtttttgtgggttgggctatataaatccccccaccagcagcaagggatctctcttggcacttgcttcacttgcatacatcccttgcacactctctcacacactctagagcttgtgttcatctttgtggtgtgattgagggttgattagccaagagtcaagtgcatttgcttcattctagagctagtgtggcacttgaccaatctccgagccgggtcatcgcttattactcttggaggttaccgcctcctagacggcttgtggaggagttgcccgatgaccactccgagaagattgtggagaaggcccggcaccgtttgtgagtggtttggagttcaccaccttcggagtgaaggaagaactaccctagtgatcgaggcttgggtagtcctctccgtgggccgggtcccaccttgcccaccccttgacgaagggggtgtgcggtggcttcgtggttgagcggtagagttgggctcgtggttgagcggtagagttgggctcgtctcaacagggacgtaggaaaccggcaagtttccgaacctcggtgaaaaattctgtctcttgtctcatttatttattgcatttacatttgtacaatttactttattagagacatatttgaaccacttgcaccctaggattgcaaaacttaacttagttgcttagttagacttgtcccttaccaagactagcaacttaggttatttttgattagatgttaatttttataatcgcctatttacccccctctagtcaacatcgttgatcctacaagtggtatcagagcttggtctctcttgattgggctttaccgcctagagagaagatgtcgaacgaggtgaaccatgtaggaaaggctcccatgtttagtgacacaaattattctacttggaaaattaaaatgtctactcacctcaaggctacgagcttccatatttggagcattgtggatgtaggttttgttatcacgggaagccccttgatggaggttgatcatcgcaaccttctactcaatgctcaagcaatgaatgccttgttcaactcattgagccaagacgaatttgatagagtgagcaaccttgagacgacttatgagatatggaacaagttgagtgagatacatgagggcactagtgagtacaaggatgcaaagctccatttcctcaagatccaatatgagacctttgccatgttgccggatgagagcgtcaatgatatgtatgggaggctaaatgtgatagttaatgatctcaagggtcttggggccatctacaccgaccttgaggtggctcaaaagatgcttagagccttaccggacaagtataagaaccttgtcaccttcctcatcaactcggacatgtcaaggatgacacccgctagtcttttgggcaagatcaacaccaatgacatgtacaagttgaagaagaaggagatggaaaaagcatcaccatccaagaagactagcattgcccttcaaaccgaggtggaagacaagggaaagggcaaggtaaatgaaggcaaggatgacttggatgaagagattgctcttcttactagaaggttcaatgacctcttgggaagaaggaaagagagaggaagagggtcaaacaccaatagaagaaggaatagaagacccaacaagactctctccaacttgagatgctttgagtgtggcgagaaggggtactttgcttccaagtgtccttccaagggtgatgatgaggacaagtcatcaaagaagaacaagagtggtggatacaagctcatgaagaagctcaagaaggagggcaagaagatcgaggctttcattggtcaatgggactcaagtgttgagagcttcgattctcaatccgggtccgacaacgagagtgatgatgatggaagctccaagaagaagaacatggccggagtagctatcaaggaggctccatcactattctctccattttgcctcatgccaagaggctccaccaaggtaacatcaagtagtgatagtgaaagtgatgatgatgttgatgatatttcctatgatgagcttgtgagtatgtttgaggagctccatgcttatagtgagaaagagattgccaagtacaaggctctaaagaaagatcatgcttctttggaaaccttgtatgaggagctaaagacttctcgtgagagactcaccatttctcatgagaagcttaaggaagctcatgacactctccttaccactacccaacatggagctcacattgatgtttgcatatcttgtcatttgcttgatgatagtgcttcttgtcatgctatatattttgcatcatctagcatatctacttcatgtgatgatcttatggatatgcctagctctagctctgtgcttctatttgtgatgtttcacttgtggttgtgaacaatgagctcaaggagcaagtggccaagctcaacaagagtttggaaaggtgcttcaagggtaagaccactcttgacaaaatcttgagtgagcaacagtgcatccttaacaaggagggacatggattcattccaaagaagggtaaaaaaaccttctcaccatgctcctcgttttgttaagagcaatggtaagtattgccataagtgtcgtggggttggacatatggcaaatgcttgcaccggtggtaagccttctaagacttgcatgtttgattctcactacatgcttaggaaggttcatgatggtcgcattgttgctagatatgtgggttcccctatacttggtggtaaaaagaattccatttgggtctccaaagctttggtctctaacctccaaggacccaaacaagtttgggtatttaaaagagcttgatcttcttttataggtgaactactacaccggtggaagccattgggtgcttgatagtgggtgcacccaacacaagaccggtgatagaaagatgttcaccacatttgaagtaggaggcaaagatcaagagagagtcacttttggtgataatagcaaaggaaaggtaattgggttaggtaaagatgctatcaccaatgatctatcaattacaaatgtctatcttgttgaaccactaaatttcaatttgttttccgttgcacaaatttgtgatcttggtttgtcatgtactttcaaccctcaagatgtgattgtttctagtcttcatgacaaatcttgcatcttcaaagattttcgttataaatatctttatttggttgatttcaactcaagtgaagcaaatttgaaagcttgtttggttgcgaaaatttctttgggttggctttggcataggaggctagcccatgttggtatgcatcaattgagcaaacttttaaaacatgatctagttgtgggcttgaaaatgtgaagtttgaaaaagacaaactttgtagtgcttgccaagccagcaagcaagttgcatgctctcatccttccaaaagcattatgtccacatctagaccattggagctcttacatatggatttgtttggcccaacaacctataagagcatcggtggaaatagtcattgccttgtcattgttgatgattattctcgttatacttggatgttctttttgcatgacaagtctattattgccgagcttttcaaaaagtttgcaaaaagggcccaaaataaatttaattgcactcttgtgaaaataagaagtaacaattgttcggaatttaaaaataccaatatcgaggactattgtgatgatcttggtattaagcatgagcttttcgctacatactcacctcaccaaaatggtgtagtggagaggaaaaattgcacattgattgagatggcaaggactatgctagatgaatatggagcttccgattccttttgggtggaagccataatgtaacagccctggacccgaaaacggtattgtgtccatcatctcatttagttggaccacacctacactgcaacacaccgcatttttcgtactcgcttgtagcgcccgttccgtcgtggcgcctagcgggaaaattatctcttaaaaaccctaattgcgaaatttgtttctttgattgttgtctagtgtccgtgccatctcaagatctcaatccccgatctatcgtcgagttcaattccgaatcaaatccctccgcaaaagtttagtttgcctccccggggttcgatgggccgaattccgctcggcccatctctctcccgggctctctctctctctccccccccggggcgctcctcccccccccgtcagcctcgctcgcacgctgctcgcgcgtgcgagagccgccccgagcgcctctctccctccgctccgctccgccccgcccgcgcgccgcgcgcgcgtgtgcgcgtgtaccgccgcgccgagcgccccctcgctctccgtctccccatccctcgctgccgctccccgcgtgccgttgctcgcgcgcgcccggtcccgccagcccgcgcctgtcgcccgagccgcgccgttcaaaccaccgcgcctcccgttgttttcccgcgcgcgcgtgccgagtggccgaccgctcggtcgccgccgtcgtcagcgcctgcccgcgcctgtcgccagtgtcgccgctccgctccaaaccgccccgccgtcatcgccgtcgtcatcgcccggcccccgccactccgcgcgcaacccgccaagggacggaggccgagctctccctttccctctgccgcgtcgccccgcctcctccttttcccgaaccggcaaaggggcaagccccctttcttcccct

SEQ ID NO: 4522 - DNA, 30557 bp, Oryza sativa
caactcccagtctcaagcattagaaagcatgccaggtttaaaaataacagcccaccagccataccaggcttaaggtcgcggtgaaaatatccacgctgatgcatgtgactcaaagcttgaaatatctgaaaacaccaatttcggacttcagtctctgaaaagggcttccccctgctcttcatcagctggtagagattgcattcctaaaatcaccacgtaaacagaaaaaacttcaatcacttcagaggtcacaaatgccaaatcaaaagcgtctaattaagaaatacaaaccatgtattcaaaaacaaagaataacatatcattctcccttatgacttccttgagtttcacaatgttcggatggttcatccttcgcaaagactgggatgcgcacacaaaaaaaaaatatattaatgaagtataatagatatcatgatcaaacttgattacatgttgcataataaagcaccttcacttcacggagattgatgcactcctcccatgaataatattttttcttcattttcttgattgcaacctgtcaaggccagatatgttaataatatgtcaaaaaattatgccattgataaggcagatcaagtcactgtcacttcttttcataagatagatcatgacggtaagagttagctccagtttaattcagatttaattactactaggtacaatataaagtaatcacctagcatactaaactccagtgtaccaataaacaagcagccaaactgcttagctactgaaaaaaataataagtcataacataaacaaaattacaaatattggggcaagtagagtggcataccacttcaccactctctttgttgatcgcgcgccaaacactcccaaatgttccgtcaccaacttccttaataatcttatacctgaagcatgatgcaggaaagaagttagcactcagcaggtacaagctcttgaacatctgagagagcccttacacacacatacacacacacacaacatctgagagagaaggggtgttatttacctctccatttttactagctggagagtaaagctggtcttattctagaagagccctgttgtgaacaagactcatatgtgtattgctgaaatgcctttgaagggtagatcagcaaagccactcaacgcttctggaaaaactctataagcaatacccatactctgacaaaaaaacttgaacaccttcactctgaaagagcaacaaatagatcagaagatttggaagaaataaaaaatacaaataggctgagtaacataataattacatgtaaccgaatcatgaacaatgcatgtcatgtagaaatttcaagcataccggtttgttacgccatcaaacacaaagcctgacaaagaactgcgtagtatgcaccaaatcttgggatgatcaaacaaaaagcaagcagtgtaggggagaagagagcaaacggaaagtaagaaaaccaggacctgctgagagcaagaaattcatgagaacaggaacacatgccatttaaatatcaggcaattagcttctcaaataaaagcatacctagagattaagcctgacaatgaagatctaatgtcagatccgattgtccaaagaagttccgatggtaacttttgctggctgatcagtgccacaacaaaaactaccggaaggatgcaagaggatgagatgcaccatgctcgaagaaatgtgctacagctgcactgtaatcaatagtcgactctaatgtgcaatagcatgggaccaggcaagacggctgctgaatgaggtgtgatcttcaggtgcagttgacaaaagagataacgaggaagtctccgtaaagagaaaacctccagccaagaacttcctcgagcagcgaaatgtgcaatacagaggaacttgtggtgtagagggtgtactccatatccttaatgagaatgctagagccctggcagtgcacggtgttggaacctgcaaaggcatgcaaaatgaatataaataagcagcaaagcaatggttgaaaacatgtgtcagtgaagtaacagggaaaaacatagtcaaagtgagaagagggcatttatcgattcatgctaccaaggagcaccaaagcacccatgaaattagacgtcacatgcatgtgccaattcatgttacctacaagcatcaaagcacagagcacccgagatgcactaatttactttcgtcccagaaacactatgagatttgagtctatggatgcatgtgccgtgaaacaacgttaccaaaattaacataggacctcaacagtgataaattgatactacaccatatctattgattgcaacgaattgattgaattctcgcttcctgcacaattaagacagtgatcttgctacagcatacatattactggtaccaacatgatgccaagtgatgagactagacatgaaaaaagtattgagaactagagtaagtttataatcagttgccagtaaattaaacatcagacgcataacatgtgcaacctagcataaatcggcatgatggatgctcaggaactgcgattcatgaatagacgtgaggaatatccgtgactgatgaaccctagctcacacacatcggaaccaacaactcctccaccaaatcccgtagaaatcatgatgcgccaatcccccaaatcaaccctgctaaactccctcgaaattcgaaccaaaacaattcatccacccccaacaaacccccgcaccgatccgaaattccgaatcaatcacccgatccccacccccacccccacctcccccggcgcccgcagcaaccaccgcgcgatccccaaatcaaactcatcagacaccccaaccatggcacagccaagccacgcgtcgattcgattcgattcaccaccaccaaatcagcccaaaattgaatcggaaagtgggacgacgagcgagcgagcgagcgagacagacctgggtgcctctcggcataaccgtgcgccaccgccgccgccgagggatccaggggacgccgccgccgccgcctccagcgctgaagaggggggagggggagggggggaagggtggggatcggatggcttcgtctcgtctcctctcgcgtcggggatttttttttcttcctctcgccttcctgtcctctcctctcatttatctctcagtcgtccaatgtggcggggcctttttgcgatacggtccctgtactactcggttatacctagtccaaccttgccgcgttttctttgttctttactcggagtagtttttttattttattttatttattttttttggaatcgccttgcggttgccgcggtttcagacatgccgctttatttgacgtgtctccctgttttgagtgtgcagagaaattaattgcaaaaatagtgttttttgacttgcgttttatgtgtttctttaagcatcagatagatcgactttgttctagttcattgattttagttaagtcatcttattagtgtttttttttctggttaagatgttaaggtggttgttcagctcacttagcatgtgttcttttgttgcatatgattaattaactattagctataaaaacttgaattgattaacataatttttatagcaacttttctatataattttttaaaacatgccgtgtagcaatttaaaaagcatgcatacaacgaataatggagcagtaaatgagaaccatgagtagtagtaggtctgagcagacccttagtaaggtggtgtttggatccagggacttaactttagtccctatatttagacattaatttagagtattaaatatagactacttacaaaactaattatataaatgaaagctaattcgcaagacaaattttttaagcctaattaatccataattagagaatgtttactgtagcatcacataggttaatcatggattaattaggctcaatagatttgtttcgcaaattagtccaagattatgaatgggttttattaatagtctacgtttaatatttataattagtgtccaaacatccgatgtgatagggacttaaaagttttagtcccatctaaatagggtcttactttctttgtgtgcgaccattttttttatgtttcttatcacacgacatatatgcatatatacaattaactagcacatactcctctttttagtttatttttctaaatcatttattctcaatatctatgattctattgatcacatgaatttatatttattagagtgatccaaatgagaatatgataacaattattttgaggagacgacaataattttcttagtatttacggtagtagagatttgtttctattttttttaagaacggaaggagtattatattaggttaaagagttcgagcaaacatgtcgaaagatcgggctacatgttatagccggattatcttgttatcttagtcggaaagtcaaaagcaagatacgtgagatttgagaaccgtcatttgaccatgtcttttaagaaaaactcatggtagttatcatgttacactgtggatcctaaattgcctatccccacacttgaattaatatatttttctctttctcttaacagcattgagcttgaataaatttccacttttactatacatgaagcaattttgtccctgacctgaaaaaaatataactttaaataaacaatttagatgtggtaatgatctactccttggtaaattaataacgggcaaggtcagtgtgcatgaccaaatatttggtctgattaggtgtccttccagagtggcagaattcgttcggtccactactggtccatgtccctcttgtccaagacacctaattaaactaattaacaaatgctattaatcgtgattagtacactgcatgggcatcagagaaagcaatgggtaccgacttgcgtacctaaaatgcctaatccgtatcgctgtaaacacaatgtattattggtgccacggtgattagtagtaggagagatttttgcttgaagcaaaaaaaaatcgcacatggtacgtgtggtcgtgggtgcattgcgaatacattaattgattggttcatgatttctgtctatctcaatccgattgttcgtgcttatatcgatttagagcaaggctaataatatagccgatatgttagctataaggttttttttttgtcttctctcagcctacttacaattaatatagttagctctttacaattaatataggacccacttgtctctctcacatggtttattggttcttatatccaggccgcctctaagtttacagcccgcttctcctctccctcctctcttctctcctctacctcggcatttagccgacttataacctattattatattttcttataggtgaatatcacccacgatttaggacttgatcggttgtgctagctgctgtagctgcaacaagcaagccattcacaactgccgcaaagctctttggtttggattattggggctggtgcagcagcgcgccagcccgcactttcgatcaggaccttaattacagtggtctcgttctcttggacgatgttaactctaaaaataattatcacaatgttgtctctttcgtgcgaatagtgttatcttaagattatgttattcctcctctttcccaactcacattcatttttttcgcatgcacgtttttcaaactattaataaaagtttttttatagaaaagtttactgaaaaaaatcatattaatccattgtattaaagtttatttcagttaatacttaattagttatgagctattacatggtttgttttgcgtgctgaagagaagaggttcccgaatacagcctaagggccaagagattaaaattttgagaagcagctggttagtagctggcttctgagagtctgaaaatgctgggtttttcggtttatgatttctaaatcattttctagattctacgactacatattattagaactatttagagaagcttataattctgacagaagctacagccaaacatgtcctatgtagtggtcgattcaacttttcatgacttatccactgataattttgtttttcctttctgctagcatccatttgtgtgtgcttatcggtataggcggtaccgtccatgactaattaaagtggtttcgacctcttggatgatccggagactaaagataattagcacaaggttgcctcttttgattgcaaataatgttattttaagtggtggtctccctatttcgatctaaatagcagccacaataattgctactacatccgtaacgttttatattataagactttctattattacccatatacatatatctggatacatatatgcctagatttattaacatatatataaatatggataatgttagaaagtcttataatataaaacggaggaagtagttgattaagtattaatgcaacgtgatgggggtcgtcattacatttgcagacaagtagacaacaataatggcgatgcaggtttggattatccgtgtatttaggtgccatgcttagcttaatactactccactttacagtcatagccacgtcagcgtgatatgcttctcattttctaagtaaattatagtgtgatttaagttacaccaaaccatagtaattcgagaacttctacggtatactacagttttaaggctttgttaactacggtatactacagttttaaggctttgttaactaatcactgtagcacggttaagagcaagtttaatagtatagccagctactggctctaaattatctgtagttaatttaatagtcaattcatacaatagttacctacaaacatataccgcataattaatctctggtcccacctatcatacacatatgtatattggagtccgtgctgcagctggctataaatctgtaacccgctactcttatctctcctcttttatctctttaaaatatgtttataactggcttataatttgctattatatctgctctaaatgacatagacggtgcattaaatgaacttataatttcgatacataagtttagaattgatatgtgaccatgatatgtatcaatatacgtaacacattgcgaagtgagtgtaactcgagaagggaggtcggactcccccatgactactgccctctgccacctccatccatcgatcctgagttcctgacaagcaggcgtagcaaccacccttctcggcccctcttccctgcatttgctgacgttgttcttgtttgcactctcaaggtgagcctcgtatttccccttatctcctccactgtcacagattccggataggctcgtgtttcttgattcgatggcggatggatttggttggtggattgtgtaggtaggggaggatatttctcggttttgccatgccgtacaacagcaagatgggagcgaggaaggacagcgaggcatgagggtcgttgtcgggttaatggtgtcgtcgcaacgagagaggcggggctcgtcgtactccaatgggagcggctcggatgacggcgacggtgggggtgactccgacaccacgtcgaccctctcgaggaagaggccgtcatcggtggtgcaggtgccactcaagaagcagcactagccagaagaggggcgcggcgaccgcagcggtggtggtgggtggcaggagggcggcgacgacaatgatcccttattaattgttgtcgtccgtgggcccatcacgttggctattggctactccggcctcttcacatcgcccgcagtgcgccaccttgaagatgggaagagataggaagagaggtgtcgatggcgctcttcagtgccgtgctggtgccggtcgcgttgcgacgttgatgcgtgtggcgtggatgtactgctcgctagcctcttcgccgagctagcctcttcgcctccttcctctccatgcacgctcggccagcttcgactcgccgatggagatatgagagaggtagagaggggcgaggtggacgaagtgggactcactgatgtgtgggtcccacagttttttttatctttttgtttgacggacatatgtgcccgtatttttttttagtttcaattttgctctttttttatcaagctgtcacgtaagcgtcacgacattaccacgtgagatgaaaacttagtcaaggagccatgaaggcaccacgcgagttaaaaacggggacaatactaccgataaacctcgtttacactggttttataagttggggggctgtatcagatatttcggttcaaaggatgaaaatgggatttggtgtcaagttaagggacctcaaatgaactttatcgatgccaaggccggcccatctagttattacccaggaagacctccggcccacgcagcccgtcgcgtggcggtaggtggggagggggcaggtgggtcccgcagtgcccccggcgtcgcggggtcgtcgtgtcgcgtgccggctgcgctcccctccactcctcctcccctccccaccccacggtgccgtgccctccacacgatcccccccccctccactctctctctctctctctcgcccgagtctcctcctcccgcacggaagcagtagtcccgcaggcggagctctctctctctctccggcaaatcggcgaggtgagctctctcttctcccatcgctgaatgaatccgcgcctaaggctctagggtttcgtttgcttcgactatcatccaccctgctcggatcgccgccggttttgctcttttggttaggggtgtgtgggtgcagcgagtctaggcggatctggcggcgatcggtgtgtacgggatctcagcctcctcgttggggcggatggtcgccgggccgccgcggcggcggttgacccgaatttcgtgtcgaattttgcgtgttagtgattgatctcggtctgcttcccctcccaattacttggaggttcttcagagttggggttgctggtcttcagaattgggtggggcatgagacaattcgcatggcatacacctctttcgatttgtgttgtgcgtctgtgttagttgcgccatcaacgaccgggaaggctttggtgaaatgccgcgccccactttgtgggggaatgagagatgattgcggtattgacgcgtgcagactgatcttagtgctttgttgtcgttgaggttcacgaaacatgagcgaagaggtgaggtgaagaataaccgagacgtttatggtccttatcatataatcttgtctaactagtggtaactaccatgatgccatggaccaataacagctactagaactcataagactacgtatccatccacaataggaatatacgcgtgaccaactcttagttagcacacttttttcctaaatgcacacatcatgtttcagtcctttatggtaacatcttgaccttcactgagccatttctctgaccaagtggcaaccttgagtccttgaccatacaagaagtcgagtgtctcttggtgcgccgttggccaccaacatagatagacaatgccattcatgtagcaggggcaaggaaactcttgtaagaatctgatatcatttggttaatgaaatgggagaggagctcctctctttctcaaaaaaaaaaaaaaagtagcaggggcaatggcagcatctccattttttttcccaggatgtactcatctagcttgactttgtaagtggttttattccttatgatgtctaatagggttatgcactgtttctccgcccttttagaaaatctagtttgctaaaaggtatgaatgctgtttttagtagaacaaaaatgattgatctagcatggcactgagtaagtgtgttatgttatatttctcactttgtaaagcaaacactcctgaaagtactatactctattgcccttgtaattcatttagggtaatgtagaatcacagaaccagctaaattaatgtcctccatgtctcccccattagtaaaggtacaatgcgttgcttcaacttaccaggcttctcttttgctctcacatgcgcatgcatgctgtttgtttgagggtgatgtgagtatgcttaattatcatgacggtattatttatttcctcatgctcaagtgtgttgcttccacgatcctcatttctgcttttttaaactacatttactaccataagattatttatgttcatttggcatggtttctccaggatggaaatgttctttggcagttttcttaatgaatcagcatcacaagagtacttctctggtcgtccaaatgtcgagagatgcccattcctgagaaacatcaatggagctacaacattttcattttcttctgctttgccagtagctgtaagatcttctttacatgacctctggtgatggcattatcaatatcaaaagtgcatttgatccttaatctgtgctattgtgcaggcccgaggagccaagggtccaatttttgaggacggaccaggctttgattcagcatttaaacttttccatggacgggatggaatagttccgctttcaggaaagtcatatgtacctgatgagaacaacagcgagagcgttgatgccaagcctgaacctgctctgccgtttaacccattggctgctagagctgccacaataagtctatctgcatttgggccattcggctttaacttctttaatggcaagggcaaaaggcagaacaagaagctcaacaatctaaatcagtcaaacaagaagcccagcaatccgaatcagaattccatgaaagtttgtcctcattccttccttttattttctttcttttcgcatatggatatggtgctatgtttgtgaagtcctatctagtttctcgctatcatgtcctaatagcaatgcaaactttaatgtttctcgctatcaagtccgaatagcaatgcaaactttaatgttttgtctattattccaagtaagaatgttccgtctaacagttttaccattttattataaagaactgatccagattttgttcagttgaagttaagtgatcgtgattttggttcacaagtaggcattttggcatttccctgggtgtttggctatatgttatttctcatgtatgatgtatccaagtgcacagtgttcttgattggacagcagtagttgcatagctaggattttcatctatccaatcagtttttctcatgttctgttttgaaccattttcagcagaaaggaggtaattcatcatcgcacgaggcaatgagcaacgaatggctggaaaatgggcagtgcccacttgcccggtcttaccgagcaatgagtggcattctgccccttgttgccaaggctttacaaccaccagccggtgtgaagctgaagtgcccacctgctgtggtcgctgtgcgtgcagcccttgcacggactgaacttgtgaagtctctccgtccccagcctctgcctgcaaagatggtagccattgcgttgctcggaatggcagcaaacatccctcttggggtgtggcgtgagcacaccaagaaattctcccctcagtggtttgcagctgtccatgccgctgttccattcattggaatgctgaggaaatctgtcaacatgcccaagactgccatggcattcaccatagcagcctccattgttggtcagacaatcgggtcgagggcggagcgcattcgtctgaaggcactggctgcaaagagcgacgctgattccaccaccgtggctgacatgtatccaaacaagactggaaattgcagtgacaccgagggcaaggcatgggatccgctcgcgatgaagatgatggcgggacgggcttctggtggtgctgctgctccaacaccaagcatgtgtttctgattgctcactgattggaaaatttgtatctaccagtatccctggagagtggagagttgatattgagtctattttatcttgtgatgtaattgcctttgcttgtccctcagaagtattcgtttgtttgtggggtgagacaagtggaataagagtgctactatatacacgatcattctgttgttaagtttgccagttctgcagttcatgtatctgtaatttgatgatgctggatttctactatttatcaatcgtcattatactgtgtgtaacctgttggatgaacgcttgttagctgttctggtgagtgacatgtagccctctttgaatctttttattgagaggataatcactgtatctacttgattgtacaaataaattaaatattttaagaaataaactcaacaaatatcttaaaacaaatggtttaagtaatgcagtaaaagtcctttttaaggaaacatattttttaattgtagagcaaataatttgataaataaactaaaattttaataatctaagagtaataaataagctgaaatttcaataatccgataaatacgctggaaaaacatggcttggacattggctgggtcctaccggcagtgagagagagcagcctgccaagtggggcccagatgtaagagaggtgtgaaagcgagattaaccgggaggaacagcgggctcccgccatttccattcgcgcgtagcgacgcctttcccgcgcagaagaattcccttttcccgcgagaatcctttttaccgccatttttcttggcgccaagcccggctttcccgcggcgcgctcttctccttcctataaactcccccatttcctctctcttctccatcccaattcccatctgctcctccaactccaatccaatcgagaggtcgatctctgaatctgatctgatcaccatggtggtggcactgggtcccggccggttctacggcagcagcctcccacggccgcgcttcttctccggcggcgaccgcgtcgagccgccggtggccgtcaccgacccgctcatggcgtgggcgcacgaggcgcactggtccatgggcggcctcagctccaagcgcctccgcctgcagggccgcatcgagggctccatcgacaagctccgccgccgcgcccgccgcgacgccaggaaggcggccaaggcccgcgccgccggcatcaagccccgctcgctcgccgccctcggctccgacgacgacgactcctcctccgacgaggaagaggaggtcgaggcccagaagcagcagatcgtcgacgagccgtcggagtcggaggaggagcaggaggaggagaacgaggaagaggaagaggaggaagccctcgccaccctcgccgccgcggccaagaggaagcgggcgaggaagctcagcgacgagttcgaccgcgtcgcgaccatgcaggagggggaggccaagaagcagaagcccgcagcaacctctacaccggcgaggacttcaccgaggaggaaggccgccgaggtggctctcaccccggcgccggcgagggcgtcaccgagggggaaggctgctgccgagggggctactgctgcaccggcgagggcgtcgccgaggaggaaggccgcggcaaggaggacatcgccgaggatgaagcactgagagaggtggcctgcttaatgtgaaatcctagttcttgctctgttacattggtcgctctagagaatcgagatgtgattgatggatatgtaatgtgttatgtgtgtgtgctaagtatttagtgatgaaaccattgaaatgtgatgctaatctctgaattagtcatgaattcctgaatcaacacatttccagatctgaattctgaacatcttgcatttcttgtttatgagtgatgacatttttttttgacttgctcttatcagccatcaattgttttgcatgatgaagagaaaacgcgattgtcgtttcaatcaaatgatatcttatgatctgtgtccgtgatagaaaatgtcactgattcgtctgtttcttaattaatcctgaaatgacatgctccccgatctgatttctgaacattttgatgctactccccatctctctagatggaagtagaatgcaattctcaatcctttgcttgctggtagtggtatgtgtttgtgttaagataagaacaggaaaagaatggtacatttaggccagcactgtaattctgcagtccttttggtttgtgtgtttataactttgtatctagtattctttgttctacagtaggggtactaatacagggagatggcctattatgtgttggtatcagagacgattcgttctatctcttctagtagtcgctctttttcttccaccagatcctcattttgcttctgaagctcttctatctgcttggtctgttctgaatctttcctgcaaacacataggatgatttagtagtggcaatagttggatcatgcttatgcgactagcgtgctgagaagcatgagatgtctgtgaagcaatgcgcgtaccggttcatgaaggagaggttaagcttcagtgaccggacctctttctctagagtttcgcagcgcttaagcacaacctgtatgtcagatggtattactggtgttgagcttctttcctttgcttctgccatcctaatcaataaaaacataatccaatgtcactcattgttcaagaaatggcattgtcgattacgaagaaagtgttattgtaggtccaaatgccttgagtcttcagatgtataatagttgtatgtgtaacataccaaactaccctacaaactataagaaccacattgtgcatacatacttgcgtgagcgctcaaccctgcgtttctttgtaggatctcctttatctgcaaaagccaaatatgtagggctttcaggtattaaaaacatgaaaaaaaaggcgctatgtgagatggactacatgatcctttaaacttgtttcatgtttcaccagtgtataagcttttgtctcttcagtaattctttgcagtagtcatcctatactgaacttttaagtttttaaaagtagagttccttgttgggtttacctgcttgttcagatgaaatggatcccattcgagttaggctccctttctgcaaatgagtgaaatgaaccgtataacatctgccatgagaaggaaaataagtgatcagaaatatcagttagaacatacctttctgtcatccttcaaattttcttttagtattctctctctgaaatctgtacaccatgaacaaatacacacaatgttataactagagtagagttcaaacaatttataacagcaatagtgtgctcattgaagattttatatggcctcgggtttaaatttatccttaaggttctattttttttcttaaatgtatacctttgccttttgatctacagtcagctgtcccattgccatttgcagcatttgttctagtactctcacaaacagtcattgcttgcccaatgggaggcaggtcatcacaaacttcaaatccagctgaaggtgctgggatagcagtagatgatccactctgcgaaggctctcgagatgctgtaccaagccaaacctggtttgcaggagcaacaaagttcccactgccttgttctgttggcctctcgactttcggaagcatcaccgagtcttgaatttgggaagttgtcaccagagggaatatatctgttcctccaagaatgttctgttgaaaatgttgactgtcataaaaaccaaaagatatgcctgatgaggtgtctccattagcatggctactaagcttcttgcgctccagtgtatccttgagcatgctcacaactgaggtgatggtatcttgtgctactatatgtggattatccaaaggggatgttgatgaacttgaaggagatacaaatgttggagtctgactgggtgtattgctcattggtgcactgttcacagtacttgcgtttgtcagatcttgtctcagtttgttagctgtttcaattgtttcagttgttattggtggcatgttactttgcatcgccgcatatcttttcctgcacataatggaaaattttgtagatattgagctaagaacatggaattgagctatggattgtaatgcgtaattgcgcatagaactggaaattcctgcctgagttctgaagatctgcttctagtcattggctgagtactatgaaaccaggcctacatatgaagaaaccaggcaatataagcaaattcagccatttactaattataaattcatccatgtattagtagatgggtgatgaaaatgcctaacctttgccaaaagtaggtcactagcttgcattcccttttctgctgcattcctgtcatgggagacaaccaattcagtacaatttggaaaaaatccagaacacaatatgatgttggtgaaaagctatagtacttgagttgttgctggttatggttcattgtaaactctgaatgaactgccaaattctgcggaatcaggttgtcagtaggaaaatgttcttgagcaatttcatgttgctgattaggaaagccagctgcttctgatgacaacctgcatatatttgacaaatatcctattattcacataattattgattttttttttgcatgcagtggtcattaaccataaattgaccaacatacaaactgctagatatctgtacagatttctgattccaagacaaaattttctgagttcaacaccattcacttgctagaaaaaggaatagaccccatgcaaattagagctttctgaatttaccgtaagagtttctatttcatgatttttcaaccttaattaagttaacatgacatggctagtttaatgagggatacaaatctggatacctttgcctgaggttaatcgacattcagttattctagtctatgcaaggcaaccaatccaatcctacatacaattttattcatcactgcatatttatggatactaaattgaatagttagttctggcacaccatgccacaatcttacctagatggttgtcgagggcgattattcatggcactaaatcctggaatctgtgcacaagcaatcaagaatttcaggtaacattaaccatgaaagtaatcagtacatcaatgttcatatctatgtaagcttatgcactatctctaaatatatgtatgtatacaaaaagttgtgcacttcataaaacaacagatgagttgggatttgttttttctgaaacatgaactttcatgtactgagacaaaatcttatggattttcagaaaacttgcctctccattcataagccagctattgaacaactcctcgctgtcttctctgaaaccttgggacagatttctgaaccccatcatctccatgcttggtgccgccgccgccactcccatcgagttctccatcatcgcctttaggaacatatcttcacttgtgttcctgaacagctcagacagacccctgccctccatttccatgaaccctctcaactcaccttcagcccccctgacaaaatacttaaccagattattgactataaagttcctaaaaactgtctttagtacttaactaagtagggtcacaagaggcaatcatatgatttcaagaagatatagtgaaacaaataagataatataaagtagaataccacctaaagcactcactaacctaagaaatggaactagcagaagagttcaagcacacaagacatgatactaattgaatattatactagttggcttataataaacagagtggaggtatcttcccttctgtggaggcaaagattccacaattcttgttttgtcttatgagttgaaaaattggcctctgaagaatttgaccacatttgcaatttcgcatggaaatgagtaaataaaatgcgcaaagaaggtctatgtttaccaggcaggtatgaacggaataactgtacattacttgaagttactagtccttccacttaattaacctggattgaaaaattctgcactatcatcttttgtaaattatgaaaattgcagcagatatgtgagagatctttcacagctgcaatcagaaaaactcttagaatttgttccaagatatctaacatttccataaactcttccaaagttccaatctgcttgtgttagcgataaaataagcccattgatgtaaggaggtgacaccatcgatgacatatttgatgttacttcaggaattcattgatctacatggcatttcattggcatatttgaatcatacacgcaaggctcaaaagtgcagttttggaatggccctgcttgaagcttgacataaacttctcaccagaccatttcttctgcttgtcaggtaaaactactcctgtcttgattaatcgaagatatgccgacggcaaaagctttgttttggacatttctgctgacactgacaattctcatattttcatataattttcttattaactcatcaccgagctgaaaatccctaattattttactgactaggcaacacaattttgagaacacattaggcaccacaatttaaaatactgaattttcatcttcttctctaagactctaagcagcacatgatcacactgatgctgaccttaaactttcctactcttttttccatctagagaagaacaagactctggcgattgaggttctgagttctgactaagacatcaatcaatcaagatctctcttgaccatctagatacatttatatatccctgatagctgattagttggcacatcagcatcagctaacgatcacaagacggttacagtaagtgctccagcaagctgtagctttgcatcctgcccaaaacggctcccatactatagctgttgtccattgcaccatggatggattctctggtgccggcttcacgacgcgcatcgccgatgacgacccgccattgttttctctctttctttttcaaatgttgttcttgccattttcctgtttgaagttttccaagcaggcgatgcaagaaccgagctgtgcctgcctgcacaatcgcaaacatatattttcttaaaacataaacaaagatcacacagggatagtaaaatatgatgaaacaatattcagcatcaacttgattctttaaaatttgggtttgctaaaagtcttcagaattcagggcttatacaaatatacaatatctgcagtcgcttactgtcttggcctatcacagagccgcttccatttccatcgaaatttcgcttcaaagatcagaaagcgagtacaatctaatacgcctccgctgtcacaagcgtattactatctattacgcctttatgcggggaatgcggaagatgggccttatatccggcccacgtagaggatacctttgcttcgatatgggctggcccatgagaaggcccaactagagcggcctcggcttctcttctaaaaccccacctcgcctcgcgtcctcttctccaaccctagcgcgccgccacctcgcgtcggcatcctcctccgcctccgccgccgccgcctcgccgcccaaggtagggtgccttcccgtccatctcctcccctctcgcgcagcatttctggatcagtcgaggcttccagttcgatctagaccttcgtccattcggatctcggttcgttgtactgcgcgcgcgctccgtttcttgtttgtttctggatgtagtgagatgttgtggagctaggacgagagatctcactgttctgttcttatggcagcaggcgaagcgaagctcgtgatttgtaatttgtagcagtaatttttggttgattctcatgcgttttagtgggatctagaacagggtgttagccttttctttcagtaatctggtgtggatttttgctgcaactgttagtaagagctgttaggaaggaatcgcatgatgcttatggtttgtgtttgtttgatttggtgtaggtaaggtaagccatggtgaagcacaacaacgtcatcccgaatgggcacttcaagaagcactggcagaactatgtcaagacatggttcaaccagcccgcccgcaagcagaggcgccgcatcggtaaagtgattgatctcttgcgatctatctaatgattatgtgaatgaatgagcatgttagcttcctacttgctcgtgagattgtgctgtgtaacatatgcgtgaactgcaattgtgcttctaaatgcccgtagtgcttcttccctgggtgttcgtatgatattgactgccgatcacgcatttcttgctctgtagtgttttatttgctggtagctgcttagacactgtttacttatgtacatattttgcttttatgtctatttgatcagcagccatctgcggtaacatataagttaaattgctatgctgtttcttaattttatagtttcttctggtaatgtgttgtgtgatttattggtgctatcataattttagtttgctgcatagccagactagattaaaattcagtggtctggatcttgataaaccctcatctaacaatttgtgcatgtgtttgcgacaaattgtctactttatgctttggtaccagtcacttatcgacttaaactttacatgcttctggattctatttggttttgcatgtacaataagctaaaagatgctttgtgtatttcttttagttctgctccttctattatttaaaaccagccacaagatgctgtgagttatgcattgttgctgtctaaattggaaaaaaaaaaggaatgctcaagtgctatttgtagtcctgcatgaggcattaaattttatgtttgaagatgctgctatttcttttttacccagcatctaattttcttttggtgttggcttttgcagctaggcaaaagaaagctgtgaagatcttcccccgccctacttctggaccacttcgccccattgttcagtgccaaacacttaagtacaacatgaagtctagggctggaaggggcttcacccttgaagagctgaaggtaaatcagattgcttgtttgaatagcaacattgtagctttgacgccataatgccgttgaaactttaccatgtgttatatttggatcgtgattctgatctcaataaacctattgcacacaggcagctgggatccccaagaagtttgccccaaccattggcatctcagtggatcaccgccgtaagaaccgctcacttgaaggtctgcaggccaatgtccagaggctgaagacctacaaggccaagcttgtcatcttcccaagacgtgcccgcaaggtcaaggtgagggaactttacccgccttagccttacacttaaacccactgttctgaagatcccttacattaaccaactcctttcgcaggctggtgactcgactcctgaggagcttgccacagccacccaggtccagggtgactacatgcctatcacccgtggcgagaagcgctcggttgaggtcgtgaaggtcacggatgacatgaaggcattcaaggcctacgccaagctgcgcgtggagaggatgaaccagcgccacatcggtgcccggcagaagagggcggccgaggctgagaaggaagagaagaagtgaaaggattgcaacctgcaacgttaagaatagatgccctaagttttattaccattattgttatcagcttctcctgatgcgagactggcattctgatcttgctgctgtctgtctactcttcagtttgagcttgtttgggtttttgtctgaagtgaaccaaactaagtgcatactacttgtcttaagatgaattcagtcatttcgctacgtctcatttacctgccagccatatggatgatagtagatgcttgtgttttcattcgccatttggctgtcaaattctgttctttttactataccactgaatttgaaactgagtcgtcgtggtcgtgttgcgacttgtgacgaaacagatcgatctaaaaacgtgccaaatcgcaagtaatcacaaactggatcaaatccgaagaattttatattctgcaaaaaaatacaaaatggttgataatagattttttttatttttaattttttaaaaaatatttacagtaatattatactagagaaaatatttacagaaatagactctgcagccctccccgagggcggccagatcaccttgccgcccttcacttgggtgatagggtctattttttaaatatttttacgggtataatatttttgtaaatattaaaaaaaattaaaaatgaaaaaaaaatcttggtaataatgtggcggcccactaagctccagctagaagcccaaagcccacattagtttgggcccattaatatctcgggcggccgcttatcccctcctccaatcttatcgtctcctcgaagctttctcccaaactgctcgtccatggcgttcgccacactggtgggagtgggaggcctatcgcctgccctcttctccccctcccgccccctctcctgctccagctccacctccgtctcggccccgttcatcctccgcgccggcggcggcggcgacgcccggcggcatggcctccgacgcctcgtcaccccactgagagggagcgcctgcagggtaaactgtcgcctcctcctcctcagcttagcatttctagttggtagctcgagctgactgattggcgctgctcgccgttctttgtttcctgtgtattattttggataagtcacactgttacgtgttaattcaccagacttatcaagcgagtagctcttctttatggattcactgactcaagaaaatgcattttcatttctgtagatatttgatttgtcatgacattttcggttggatgtgtgaaatacatttattatgcaccatttctagaataaaagaatcctctccagttctgtagacgattaatttgatgtggaagaatgcatatatctatgtattatttcaacagggagagagtacgaactcacgtgtactccagtgtgccaatgaggctaatgtggtgaccgaggatgacattgtgaacgatggtatcgatgatgaaaccgcttccgatgctgaaatggatgaggatgctgaagcaaatggtgatgagtcgtcaggcactgatgaagatgcttctgtctcctggatagagcagcagcctcttccttatccttcagtaagtacacaaataccaatttgtggttttgcacagagtagtagtgacaactgtgtgatgggaaatgtaggatgccctagagccatacatcagcaaggagacggtggaacagcactggggagttcatcagaacattcacgtcgagaggctcaatggcatgattggtggcagtgagtgggaggggatgtcgctggggcagatgatgctatcctccttcaatgagggcagggaggcaccccatccccccttcttccatgctgcacaggtatcattccgtatgctgagctgtatgtcctccatatgactaattactggacattcttttagatatggaaccatgatttctattggcgatctatgcaacctggtggcgggggaaaacccccagaacgccttttgaaatttatcaacagggactttggatcctatgatggcatgattcgacaatttatggatgctgcatcaactcaatttggttctggatgggtttggctttgttgtaagtgatgtacagatgcttagcgacatacttattagcttcatcgtaccagtttcaaaatttgcatatgttggtgtgatgaactgaactcttttttctgtaactctctccagacaaaacaagcaagttgcctcatgtgaaatcaagaagcccaatcccatctgataattatggtagactggtcatctcaaagtctccgaatgccatcaatcctcttgtctggggtcactctgtgagtattaacttgaaacacttaccctacattgctatgccattcttctgtcatgattcgtatgcaatggctaaagttgaaatgcaaagcatacgcctggcactgtatgtctgctggtttttttttgccgtatgcatatccagcagggatctcatgaggctatttctttttgcagccactccttgcaattgatctttgggaggtatgaatattgcaatcaggtttctctttcttttcctggcatttttattaataaacaattatactaacaaaacctattactttgggcaacagcatgcatactacctggattatgaggttagatgacaagtgatgcttacatttagtacttaaaaaaaacattttgttttacttattttgttcatggctatatctttgcaggatcggagatctgactatgtctccacatttctagagaagcttgtgtcatgggaaactgttgagtccaggcttaagaaggccgtacaacgggcagtagaaagagatgaatatgttagcacaaagcatataaggaagcaacttttagctcgggcaaagagccaaatcagagctatgcctcagcaggtcaatggggatgcaagagagcagaccagcggtcaagagaagtccctaggggtgtgacaacggagccaagtaagctacggcaggtgggtcatgttgccgagttgaaccatggggatgatggacttgtaacacaggaagctagagcagctgatcaatcttcaaggtagcagtatccgaagattgtatgcacatactgtgggcaaccctttgcttaatagcaaatgttgtcgtacaggcagcttcacagtttctgtcgctgtcgatgaatagatctgtagttcgtgacactgcagcaaatacaagtcacaaacccagagtcatgtgcgagctaaattttgataggagtaattaggtttgagtatcatagagatagacaagaattagtcacttggagcaaatgagcctgacatcttgtattcctgtgctgtccatgtttgaatcctgaacttctgattgacaaaccaaagaaaattgtagttccgaagaaatacatcactggtgtcagtaatgtttgtttcgacaggctctcatgaattgccatggtggttgcttggtacttggtaatgaggacctacagttttgtcatagatttccatgagctgtgtgttattttctggttgctcttgtccaggaactcaataataatgtcctgatgcgttgcgctacatttttttagaaaacagtcaactttcattacccagctttgaaaccaaagccaaaagcagcagaacagagcattgctctgcatttacaatctggtttccaaaagtttacctgttgcacctgatgccagagattaacacactgttctctatttctctacttattctagccgtgttgttctacccttatattctttatctctctacttattttccttttatgtcatttgcgctgatgtacaaaatcctcgatttgcaagtcttgcgtgtattcctgaataaaaagaacttttgggagtaaggccgtgtttagttcctttccaatttttttttaagtatacggacacacatttgaagtcttaaacatagactagtaacaaacaaattacagattccgcatgtaaaccgcgagatgaatctattaagcttaattaatccgtcattagcaaatgtttactgtagcaccatattgtcaaattatggtgtaattaggctcaaaagattcgtctcgcaattttccgtcacatcaaatggcgcttagcaaatgcggcggtgccagaattgcctcttcctagcttggttccacggtcacaaaatctagtcagagattaggccttttgctccattctgtgtcctgtaacccgtcctcttcttttattttttagtttttgggtccgttgtacataaactttattcctattaataaaaaatgcgctgcttgcgtattaaaaaaaatctctactaataacctggtcatcacattgacaaaatgacaagtacaaaagcggaataaaatcgagtaaactattcaagcaagccagagaatgaagaaggccttagaaagttcactgttcctccctcaactatagcctcagtttgtttgtcatccctatatcacaatgattttcggcccttaccgttcacaaaaacctcatacgagatgtcatcctgtactgtccatgtttgacttctgaacttctgattgacaaaccaaaggaagaagttgcaagtgagatcgtacggttctcttatggttgctctggtccatgaactcaacaatgtaattagtcaaaaaaaaaaaagaactcaacaatgtccatatccattgctctgcatttgcaattggtttccaaaaaaatacttatttcatttaattgtttaggattcctacaggcactactatagtactacggagtaggagatagacaaaccaatcaaattaattagttttttctcaacagtttgctttaacctattagtagtaggcaacacataaagccttttttattccttcagtatcagggcaggactgtatagcacaatcttggaatatccaaatatctttctctctctctccaagcaaaatcgttgacgtgataaaatctaaaaacattaaataaaacaaccacaaaaaaaaatattttttccttctcatcgaaattatcgccacacacgagaggctttttgtctgtgccatccacgagtcgcacactcgtaagccacgtcgccaccgccgatcaggagtcaacaccccaccaacggccctgatcaggacacgtgtcctgaaaggctaaaaccaacctgcaaaatacccccttcctatataaactcataaaaaacgcttggacatggcgtccattgatcttcctcccccctccaactccaagaaatcgactgacgccaacgagaacgagacgccatcgctgccatgggtttgcaggtaaattaaacgaatcgtcttcctgcttcttcttcttcttttcccttctcgtgattttctttgtgttttcttgagcggatgcgcataggttgaatggatattactcctccgcttgttgaaatcaatctacctgcagatttgctggttgtttatcgtttaggattttcttccctttggcatgcaatatatatcttgtttggagtaccatactaccatgtggtttaacagtatgttaatttgtaattaaccaatctaatctacctgctgttcgttcctctgttggttaatttagtagtgacagtgttctggatcaagtagctaggtaggtgcagtagtgataaaagatcaaacctttttgtgctttagactttagaggagccatcagaaactgcaattgatgcctttgttatcctgttcttctgaactccaaatatgcagagcagtttcctgaggtaaacaaattcaagtcgattctgaacaaattagttgttgttcttgttgtgcaggaggagtttgaggagttcgccgagaaggccaagaccttgcctgacacaatttccaacgaggacaagctgcttctctatggcctctacaagcaggcaaccgttggcccggttaccactggtatatataggccttctgctcttcttgaaacgatgcattcatcaattgagctaattaatttgctgctgttcaagtgctaagattccatatgctttcatgatgatcaggcaagattagctttcatatagttgcatctgaatcactgttttgtgttttgactaaaaaggattatcgatctgcttaagttttgccacaaatttagtgcttgatgagtgtaaactcatctatccttgtaatctgcttgtcaatttggggtgtttaatattacaatttccagaggaattattcacctattacagtactaagtggtggttgtcatttgaaattgtagtaacatatggtattcttatgtttctccccgatggggactttgcttagcagctgttctactttttttttaaatcatgacctttcaagttccaaaggcaatgcttttggacttgtttcgtaatacagacaccaaagatcacattttatcctcgagttatcgtatctaacaattcagtttcatctttcagggcgcccaggtattttcaacctgaaagacagatacaaatgggatgcttggaaggccgttgaaggtatatgccgatctctttaagtcctcaaaaacatatatcagctaaactatataactttgtcatatctgcaaactcccatcaatgcttacaaatccaaatcatggtgaattcagggaaatccaaggaggaagctatggccgattacatcaccaaggtgaagcagctgctggaggaggcttctgcatccacttcttaggctattatgaacaacaccatcaatagtgctgcatatatgtaccaataaacataaatactataccatcatcaggcgctttgtgatcatcccttctctgtacttgtaatagtttcaagcagactcggtcctgttaattgatcatgactgttattaagtttgtccgtcttttctaaatttaacttgttgctaaggctacggtttggagttgttgggattttcttatacgcaaggattctattaagcatataatactataccctgtttagttcacgccccctgtttagttgacgctaaaattggaagtttggttgaaattgtaacgatgcgatagaaaaattagaagtttatatgtgtaggaaagttttgatgtgatggaaaagttagaagttcgaagaaaaagtttggagctaaacaaggccaagttgatgggcttttatgtttctgtatccatgatgcaatgaacctccactgctctttccattgtctatacatctactacaacggtactggtgtaatttaattttgtgggaactgtcatttcagtgtagttggtcagtaaatgcgtacaaaaacatactagcaatgatcaatgatatcgattgcatatgaacagcaagcgaagaagacaaacagtaacaacagtagacaatggaaactgtgaaggcaaaacagtaccaacaattaaatcaagcagtagacaataaaagcaaagaaagtgaactgttggatagagaacaacagttataaacgataaataaaacaaaacaaaaaaaataagtgctgcgttgtatgaacagcgaacattgaaactatccggttgattgcactaataactggtctgcttttaagaaaacatgaattctataggaaatagttcaaaactcgtaaaatccggtaggacatgctttacattgtcagacaacctgttgccgcggcagctgcttactatacaactatttactcaacaaatatttattttgcatatctaaattccctattctatattttttttatgtccatcactttgccaaaaaaaatttagacctatagtaatttagcttcttgaggatactttaaacatggttagacaactcaacaccgaattaattgacacacgccttcctcctatcgaaagacattccccttccaactggtcaatttcttctataaccttcctcaattatatatttgccaatccttatgagagaatttcttactcaatccatactttgttcatgagtataattaagtctgtctgtcttctctgaatttaacttatcgttttaaggctacgcttcggaattgtgggaatttttcctagctgttgaatgaaccgaacaatttgccttcaaattcctacaattctacgaagtttgtctgtcccttttgtgcttgtttaagccaacaaggattccacaagcatatactgtatactgcagccgtcgaccatggcgtgcctgccatactggagtggagtgcacctcctctcctgcagattcatggcatcttgagaaaagaaaagagtcagggagaggatgaggatggcaaaagatgatggtgtttctctctatccatccatctcctcttttgctggaataatcaggatgatgcaatgaacctccactgcccttctcttgtctctactcaaacacatctactatgtactactgaagtatagtttttttttcgaacgcgtaaaaggattgcacgtcaatatattagaagaatagagttttttgaaacacgacgcactcaaatagaccggcctatgccaaggaaggaagaaaaacaaagataaaaaataacgaaaggaaaggaactctgctccaaacaactggagggggcagagccactctacgctcccaacaattccccaaaggaagcgacggccgctaacgaccacagccggccctctgaaaggatggactctaggactactgcgaccgaagaaagcacatagtcaaagaccctagagttataggactctaggactctgggactactgaagtatagtaaagttgcagtagtgtatttagttggacaactgtcattttagtgtagtttgatagtaacaagtgtgtgcaaacaaactgtatgattgcttgaaaagtaaataatgaaagcaaaaggaggaaaaaccagtaaactatgaaagcaaagaaagaaattgtctcattgcatgaacagtgaacaataaaagtagagaaagaaaccgtttgattgcacgactggtaacggtttcttctctcttttgtttccagggtagtaactgtttcaaggcagggattttacatcatttcagcaaaacaagttcagattccggaagaaatgttccgacattatctgttctaagatctacacaacagaaacaaagaaaaaaaaatgttcagtcacctgcaagtgcatttctttaccaagttatcgttggaagaggggttacccttgctagtctggttacgacggttactatgcaaaaccgaaaaaaaaaatcagacaaatttcatcctaagtttaaatttttatttaattttttagtaacttattaaataaacctggtatttttcattaccacgccatggcaaacaagtaaccacccatatcttaaacccaagtcacaagcgctgcccactgacacctcggccccacaggtagataataatattattagtcaacgaggctgtcctgtgtagcaggagcaataggtgccag

SEQ ID NO: 4523 - DNA, 53672 bp, Oryza sativa
tttccgtgttgaaaaatactaagccattcttacctgctcgtaacgaccaagtgtaatgaaaaggaaagcatcaagaatgatagtactactgcaaagttaaggattaagagtaggcaaatgcaatacaagtagacagcgcagttatgcagaatggaagagctccaaagaagtgcaggagtgcaactctgaacttcctagtctccgaatttttgcaattgattgatgttcaggtccaaacagaacctcttctcattttggcacaaaaacgaacaaaagaactagtatcatgcatgattcataatagtatcatcttcgacccaaaaaaaaaagaaaaacctaagtaaacataggtaaagaatttacttgtccaacagcaaggacaactgctactgggaccactcttataattcatcatacaaaaggttcatgttcatgaggaagctcaggggaatgtgaaggagccgcctatctgcgagttctgtgacggcggattgatggcaacccacagcaatgagatggtgatggcaaggaggccagaccagacgaagacgatggtcggtgttcgtcctctccttcccattagccccttggcgaaggggtaaaggtgagccagcacccagaagctgaagaacacgccgccgaggagcttgctccactgagggatttcactgtatattgtcctgctgaacccgacagcgatggcgatcaggttaaccatcatgatgacgatcggtgggatcatgagtgatgtccacttgacgatgtagagatcagcaaactcgtcgtctgcttcatctcctccagatttggatgtcagcgtgaaggagatctcgataccagcaatcaccttgagaagaccctgaagaacagcagcaaggtgggcgctagttcctccgattagccagaactgctcattcctccaccattcctccaagctgatgcctgaccacttgatctcgagcaccgcaagcatgcacattgtcagagtgataacgagcagataggtcaggaaggtcacatttagcgtccgcacaatgaactgtcccgagaagagggacagggctggcaggaagcagtagacaatgaggaagattgatgtgaaggggtaaatgccaacgttcaggtatgcaatcctctgaagaaacttcatctttcggcttgcaagtagtgcattgttgcgggagaagaagatttccactgaaccagtagcccaccggagcacctgatgaagacggtcagtaaggttgattggtgcagtgccacggaaagcatcacgtttggtgacacagtaaactgatttccatccacggttgtgcatcctgtaaccagtgaccacatcctctgtgactgaaccatagatccatccaacacgctgaccccactcagtcttatcttcataccagcatgagatgacactgatagcctcagcaactgtggaagcatcgagaaggtcgcgagggacggtgagagcaccaggaggacgtccatttttgactccaggatggtcagcaagaggtcgcccttggaattcagcaattgggatagagttgatgaggaagtttgaattaccgaacttcttgggaaattgtgacatgttcatttcctcatcatcaaaatctgccattctcaaagcctgcctctcttcagatgcaactgtggaagttttaaccttgcgcctctgggggaagcaacagctgcagcaaccactatgttccttggagcgcggtgggtcaaatccatacaaagcgatgcgacggaaaagacatccagtgccgacgtagactggtcccatgataccatcaagtgcacgcatgttgacatcgaagaagacagtgttgtggttagcatatcgatctgatggatcaatgccctcaaaccgttgagggaactggacatagccaatacggtcaccaccacgatccatcatgaagcacatgccttcacggaaagcttgtgagttgtaaacatagtgatcacaatcaaggttgaggatgaaaggtccatttgacatgacagcagatgagcggaccaacgcattcatcgcaccagccttcttgttgtgatcataaccaggacgcttctctcgggacacatagaccaacattggcaaacggatgtcaacctcagtgaaatcaagaggtctgccttcttcaccgctggttccatacaagggatcatcactaggaggtttcagcattacctgaacacaatacggcaatgatcaaacaggtggcattttcctggttcactactacaagatagatagaggcaagccccatagagatactgctagatattaaaacggtaaaaaggatgcacatgcttctgctcaagggaaaaaacaaaaatgaacagtaatcatttgtgcaaacgtgcaatactgtttatatgcagctagctaatatatttcgattgcaagccatatatgaaaagcaaggagaaaggtgatgtaagaatgtgaaaagccatatatgaaaagcaaggagaaaggtgatgtaagaatgtctacctgaattattccagcatggtcaccccgagcatgctcagcagagggctgaatccaggtaccaggccaatgcgtgccatcagccatccaggtagctttagggattttaacagcctccaccacgtcatcgagagcagcctctcgttgccgcttcatggccttgatttcctccctggcatgatatgcatcggagcggcgacggattgaatcaggcaagctattgatcctgaccttgaactcgtcgtactccctcttcacccttcttctgtccttgacaaaatcagaacggaccttgttcttgtatgggtccctcttcagattaaagtagctctctgggttgcgaggctcaatgtcatgtttgcgacagaaaggaacccacatgtttgcaaagctagcggcttcagccattgcttcaaatgtcaggagagcgcctccatcatcagaaacatagcaagaaagcttctcaacaggataatcagcagcaaggatggacagaatagtatttgctgtgaccaatgggggttctttttctggatcagcagtagacacaaatatatcgagccccggcaggtcagatcttccgttaggatttgatggcgtcggggtctcaaacttatctttcaggacagcaaggtcagttgctcggttaacagggcacaactttggcagctgatccaagagccaagagaggccaaaccagagttcgcaaacaacagacatgccccatagccacattgcatcctcattcttgtgcttaattctccatgcaaggaatagaccaagaacagccatacgaataagaataagaagcctgcatggaacaaccaaactaaggttagcatctataaactgaattataagattagctataatattgtgtatttgtttggaagctggagagatcagaggaaatagaacagatctaacaagtcagctaacatatttatctattgagcagagatctaacagctgggagtatatatctacaaatccaggtttgttttttagtttcatttccaacactaaacaaatcaaatgcatctcaaaacaatatagtactttctaccagatcaacggatccaatcagtcaaatgtgagcacatggatggacatgtgagccattcacctgtatgggctaaggacacccgcaggaatcttgagcttgcgagtgagcggcctccatggcttgctcgtgaactctgccggctggccgtcgcctccacccagcccgccgcctccgccaccgccaccgccattgtcgacctcgttctccttgggccaaatggcattgccatacccgtatgtccccttggtctcgaacagccaccgattgtgatcccaatcgccggtctggctcctggtcatggccttctgcgaccgcattatcgacagccgcctctccatcctcgacgccggcaagccaccgggcggcggaggcagcgacagcgtcggcctcgcaccgaccacgtcgtcgagctcggtggccttgtaggggtccttgcagccggggcaggcgccgccgttcttgacggcgtcggcgaagcagtcggcgcagatcttgaagtcgcactcgcaggggaggatgtcgtcgccgcgctcgtcgctcatgaccttggcgtcgcagccgttgatggcgcaggaggagcccttggcgccggccatctgcgggtggctggcctccgactcgatcaccttgtccatgaggtgcgcccgcgtgacgctgttgaagccgccggtgaagagcgagttggagacgtactgctcctccacgcgcgccgagatggccgggtccatcggctggttgtccggcgtcgccgggatcgtcacgtggtagttgaggaactcctgcccagactccggcgacatgtcgccgctgttgccgagctcgctgtcgaggtcgtcgcgggagtagctcacgtagcgccccgagtgggtgcggcgggcgaacgtcaccatcggccggtcgccgccgccgccgggggcctgagcgcggccgtcctcgccggagtaggacatgcgcgagaggcggctgctgttgctgtgacgcaggccgccgccgccgctggaagccatggatcgatcgcctcactttctgatctgcgaatcgaaggaaccaaatcagcatcgcgaggtggggatcggaaaattaaagagctagtctttatcgcgtacgaggataaaaatggcagatttgtgctcgaagattcccgtctttggaaagaaatcagaatcagacaggcagcgagagaataggctgaaatcccgggacccaaacccaagattcaaactttggaaagcaaaagggaagaacaaatctgagcagcaaaaccttgtcgccgtcgcccacagaacacgaagcaagaagcataaaaaaaatcgaatggaatccgaagagataaattcagtgttcactcaaccctaaatccaacaccgccggcaaacgcagactgaccgattcaaaaaccagagaacagcccacagattcatcagatcagatggatggaaatggttttcttaccatgcgatgcgaccactcgaatcaatcaaactcgaggaggagtaagagagatgggagtaatggcgtgtggtgtacttgttcttcttcttgggccacaacaacacaacaccgtatgaatggaaagacaatgagcaatggaaggggaagggatgcgagttaatgatgatagactactcgtgttagcaattgatgaggaagatttgggaagcgaagagtgagtacaagtactagtggtttggtgaaagctaagctcggagaagacgacgacgaagtctcacaggaagcaagcggctgctgcagcgaggaagaaatgagtaggaggaggagttgtaggcagaggaaatggaaaaaggcagcacagcacaaagacgcgtgctcacatggggatgggggagacttgggaatggggagccaaaatatttcaaacaaacggagagatttccttttcttttttttttttgaacatagacatgtaaaccctatccctatgagtatctttaaagactgggccggcaaatctgaagattgacgaaatcaccacatgcgtttcgctgtcgacggatacgttgcataccattgaaaggacaaagccgttaaattctgaaaaaatcgctcctataaagagtcgaacccttatgagagaaattcttcgtttgtttctttctttgtttatttatttattgttgtggttttttcttaatcttaaagcttctttttaattggcggctgctggcctgctgctgcgtgcatatgcaggaggggaagagctgtaccaggaaggaagcgcgtattacagggtaggatgcagctggccaggtgaccaacaaacacctgccagtgacggtgaattctgcacaaatttattttttttgaatatctgaatgattcacgcgttttttaaaattttaatgccaggctctaggcatcaattactaccaaatctgccgtgagtccccaccagggttttgcaaaatcacgcagctaacacgtgtagtaaatcttcttatttattaaaaccgtgataactatacggttttcatggttatcacaataaacatcatatcttggaatggcgataattttatttaaaatagtttggtaaacccgggtcccactatattagggtgatatgaaaatctcactatcaaaagcacaggtttaagcttaacaacgagcggagcgtgtctgactgagcacgcacggttattagatcaatcaaacacaccaaacccactttgccgtaacaatctgcatgcaggtcatttttaagtttcactttatttatttacaaatggattgaaagtttaatactcaagatagtgtcaggagatgatggtgtgaacgggagcggagggttcagatttcagaatgcacatttctcatttcgcacatgcacggatgcacctgggtccatctgaaaaacaaaattgccaaaccgcattcataaacaccaccaccgccatcatcatcatcatcattcatatcagccacaccgctgtatatgaagagtacaccgtaccatctgtctaaacaagaatcaacttctgtttcaaaacatttatctgtattaacttcagaagttgattgaagggagtatgagttaacaaataatacgacatgtgtttaacttggacggcacataagggtgacataaacaatttggggtgattgagatcactggcaaatttttttccccgtctattcgaacgtttgaaaacatgtacggagtattaaatattgataaaaaaactaattatacagtttgcgtgtaaattgcgagacgaatcttttaagcctaattgcgccatgatctgacaatgttgtgctacagtaaatatttgctaataacggattaattaggtttaataaattaatctcgcagtttacatatgaattatgtaatttattttgttattagcatacgtttaatacttcaaatgtgtgtcagtatatccgatatgacacaccaaaactttacacccatgcatctaaacacacccttaatttcgtttggtttgaggagttgtgtaagtatgttggtgttcggtgttccctggccccaagctggcagcatactagtactcctattgaaatggccaaattaatactggtgttcaagatattgcttcatggaccacaagttttgcattgtagactagttgcatatccattccttgcattgcatctgctaagctatggccgggctgtgtgtcaaccccacagcttcttcttcttctttcttggcctacaaaaatcagcaccaacggttgtgttgggtttggggtttccatgtgtcccaagttattgtggggatgcaccgacttgttcttgtctttggagtttggaacggttcaactaattaattaattaatcatgcagacaccaagtgctcttgttgtttgcttccaaaggtgtactagtacatgtacaacggctagtgttatcctcatcaccggccggttctttcagtttcagctgaatggatagatggacgatggcttatctcattttgtgataatatttatgtcttacatagttgaaaatatgttttaaaaattactatataaggccctgtttagattctaacttttttcttcaaacttccaactttcccgtcacattaaactttcctacacacaaacttccaatttttccgtcacatcgtttcaatttcttcaaacttccaattttagcgatgaactaaacacagcctaaaaaaagggcatttaactatttgccacgtttaatatgtggcaattaagaatttgtcacctacagtctatggcacgtgggtcctcatgtgtctattacacgtgggttcagtggaaaaccttaatcattaattataagagtggcaaatagataattatctctaattcataagaactatactggcctgaattcacaactctctaattcacaataagaagaaaacaacgggcctgaatttggtagagagaggccggccggcgttgagaactatactggccttcaacaacatcagttcagggcacttctgatgctgaataatgctctgtgaagtgagtatactgcaggttgtctgtttgtagatatgaacattttgaattgatccgaagattggttcgtggtagggtcgcaatcacatgcattaattatgtggagattaactagctagtgttgagctggaatgaattcagattggtgagcagtttaatgaaatcactggtgtccatatggcacatatgaatatgatccgccatgtgcacatatgcgtcatccgggccatggattatggagtactactattatttggatgcttaattactttgttgaatggatcggcgaagaagagagcagagcagagcaaacacggcagctaccaagaatttgccattttatttatgatcaattgatctcaacaaggccaagttataggagcatatatactccatgtttaattaaccagccagctgattgcatgcagcctatcacaattcagaggatcgagatgacacgtaaacgtacgaaatacttcttctgatttttaattcataataacacagttaacttttaacacaatgttaaccatttatcttattatagaaaattatataaatatcatttatcttgttgtaatttattttattattaaataacttcaggtatgacttatactttaacatatttatattaaattttttaataaaatgaatggccaaacattattataaaattaatggtgttatccattaaaacatgaaggtagtatatatataagtcattgattaattgttgtgttttgtttagaaattgttgtgtaattgaaatcacagagctatacgtacgtactgtatatcacgaaaattgaagcagcaacagcaagtagtagcataatatagagaaacggtctatgtacttcgtatatacttatgtatgggatgggttgtgttggaattagtctcaagactaaaattaagtgcagtactagcgaaaggtggtgatgattaattcaattgttggacacgatacgtgtacgtacgtactttaggctagtaataataagattagcttatgttccggctattcgcgccggacgatataaaaacgatgaacgcggtggagaccaagtctaaatatggttgaccacgtaaaattcatagaaatgaaatgggcatacatattttttttttgaaactagagcacgagggcccccctttccattactggaacggcataaaccaagtcattacaagcagaaactggagagagaaaaacaaaagatgttaagagaggggaaaaatgtccagcaaagctgaaaccaagtcatcttcgcagaggccagcgcagaagggctggggagagaagactgaactgaaggccttgccatcgttctagcagaagactagagaaacagaggaagagaagacagagagggagcagcaagagagacaacattgtctacacacaaaagcacaccattagcagcttcattccagccttttaacacaaggtctccaaccgtatcttgaattgaaaacatcacttgccacctgctttaccactctggctcccagctccaactttcttccgtttgcctccaaattctgcaaaacagcacaggattcaatcaaatgacagatcataaaaatcacctcaatggggtctttaggaaggatattatcaaaacaagctttgttcctagtcttgcatatggcccaaatagttacagaaacccccaccagcaacaagtttttcatgtttttgttaaaaccagaagaccaggaactaaacagctgagttttatccaaaataggtttcaggtcaagagcacaggtaaccacattccaaattaattttgcgaaggggcaatcaaaaaataagtgctggatagactcttccctgcaacagaactggcaaattttgtctccctttcgccaaccccttttataaagattgtccttggttagaattttatttttgagaaacagccacaagaaaatcctgatttttagcggcactttgatattccaaatttttttaaaaggacaagcagtctgttgcagtttcagagctctgtacagagatttgactgtaaaaaggccatttttttgtcaagttccaccaaagcctgtcttttttgtccacctgcagttgaaacccttcacaatgttgttttataaaattccaatcagcaagtttgtcaccatgaaggacccttctgaatttgattttatcccaaccccccagaagcacttcatgaacagaaatctgctttgtgtttgttaggttatacagggtggggtactgcaaggctaaaggtctacctccaatccaattatcttcccaaaaaagagtttgttttccattccctatttttttggtgcaaaacctatagaaaatgtccctaacctccatcagcccttgccaaaagtgagaatctccagccttaatgggcatacatatgttcatatgttttgatgctaatcgttgctagatattttctccatccgaaaatgtaagcatttataaattaaagttatatacaaacattaagaaattagataaaaatgattgtactagctaatacgatggatatatgtgggtgtactctctcttaaaaagaaacaattcgaattatctgttcagatttatttttagaatttagttttttctttaaagcgtacggagtaaagaagcatcatatgaatgctccatcgatgtcatgtgagctgatgattgtgttcatgttattgttgcagagtgcagacacagggcaggcaggaaccaatcgatcaattgaccaacaaaacgcggtggagtttggttggtactcttttttttctttttttttgtttggttttgttaggcaccgatcgattttgcaccttataattatactgttgcaggtgcagccctgcactagcacacctccgtgtcttgtgttgcacatgcgcaaaataaacatcttgttctatctcactctcatattatttgagtaattttattatccttggagagatacttcgaaggtctcatattctctattgtaaaatttgatacctctagttattaagtatcttaaagtatccaaaattttattataaaatttggatatctcaatgtattttcttaaatactgtaaaattcctcgtattatttgggttttagtctcgcccacaaattttaccattttccttcccttgctacaaatgaaaataaatggatcaaccttggaaaataaatggatcaacctaccaagtagtaccaaagcaccaacattacaacattatacatctttctctatctactcccctgccccttttacatatgactctcaattcttttcataccataacattatcatcatgtaagtgtaaaccaaagtaaagtgcggggatcgataagaaggtgggaattgggggcattaggaaaggacacaacggttgtttagcacatatcaccaccaaagctccatgcatcggtcttctcccccaaggatggcactcgtccctttgtactagtattgcatcttggctgtgtttaattcacaccaaaattaaaagtttgtttaaaattagaataatgtgacggaaaagttagaagtttgtgtgtgtagaaaagttttgatgtgatggaaaagttggaaatttgaataataactttgaaactaaacacagcgcgtgttgctcatcttactctgagttcaggatgaagaaacctcccaccgtcccacattacatacgagccagcttaggctgtgtttaaataacatgtgtgaaaagttttggcgtgtcacatcggatatacggacacacatttgaacaaaacaaattacagatttcgcctgtaaattgtgagatgaatttattaagcctaattaatttgtcattagcaaatatttactgttgtaccacattgtcaaatcatggagcaattagacttaaaagtttcgtctcgcaatttacaagcaatctgtgtaattagtttttttcgtctatatttaatactccatacatgtatccaaacatttgatgtgacagggtgaaaagtttttgcgtgggacaaatagggccttattcaacatgttatatatcgacatcgtcatatttcccatgtcagtttatatgcccccatcatgtttacaaataatctatgttatcttaaaaaaatgtttacagataatccgacatattttctttgaatgtcatgctgctcactatgtacgtacgtagaatcttttgtacaatacgtatgtactattgatgagttgatcattaaaagatgaaatgaatactgtcttcagtcaagtaatgtagctcaccaatcttctcctgttgtacacaatgcttgcttctagctagcttctcctcttctctcatacccatacatatcacatatgagactcttcgtcttcaccagctagaggagtgatcagcaatataatgcaatgcaagctccatggcctattccatgcatgcatttacccaagctaaccgaagttcatatagtgtcttgaatcatccctactagctagcagagtacatggggaaagaaacaagcattgctccgtggaggtagcagccattgataggttctactgtcaagagtccatgataaacttgtcaatcttttgatgccctaccttccctttgtcctcacatgagctgaagacatgtactctgcctctaaattaagatccttggttgacgcaggagatgccattcgagcgcaaagacgccttttggcttgccctctttgcaaaattaataatggatttgtacgtgtagaccgacttgttttttccctttcagcgtgtaattttgagagacagatggcattggttaagaattagtccatgcatgagtgtaaaatatgttaacttcttttttttaagaaaagagagagagagcgcgcgcgcagcgcatcgatatgtgtattgatccattctctctttttattttttgaaacttgtgcattgatccattctaatcaaccaagtaattattacggagtactctttccgtttcacaatataagtcattttagcatttttcacatttatattgttgtcaatgaatctagatacagaggcagtataagatacaaacatcgtcgttattttgttattttcattcgctaatgtgtacacaatgagccaggcccaaacaattaacagtacgtgctcgttcggcccacgtccattttctctctgaaaatgttgctttggcccttgtccattggtgaaactttgtcaaaaatataaatttactcaaatataattaatgaaacaacctaccaatataatgctcctcggcctctatatagtatcatcaattgtccctcttatgcatgtatatatggccttcaattcctctatattataattatacttatagtgccgtctaattaaaaaaaagaataaaaatgtgtggagatcgatcgatgggaggagaggggaagggatcggaatgggaggcatcaggaaattaaggaacaccaattgctgtacctcagttcatctcgcagccgaaagatcagacatatcctttctctacaagatgtcccgtgatgtacattccagttaatcgatcaatgcatgcattcatcttgttcatcagattactgcacttgtcgatcgatgtccttccgttatcgccaccgtaccatcatcatatttgacatactatttcatgtatatgctaatagaaacctctgtatatacctgattaaacatgtatttgcaccaagagaaatcgcagcttaaacctgatctagacataacaacttagtactaacggcacaagctgataatgctacctaattctgaactgtagagggtatatattcactcaaggaatgcatatattgtttgaaaaacctgctcaatattaatgcatttcttcctagctcaaccagtttacaattaatcgtccttgatccgatatataaacaattattcataatgttatatttacactttctttaactaaaatgttatatttacattgatataacacgcactcaaaacgtgtactcctagtactagctagtgctctcaattttggttgttcaattctaaccatgtcatgtatattaccgtgcagatcaatgagagtcggcagcggaaataggattcttctaaatctagagctcagctaatataatttacatagcttttcctttaatattctactttttaaagttttaaagtacaattctaatggatatttagactcagtaatagagctgcagccctagccgtcctactcctgtctccgccccattgagagagaatagtgaagcataagggaagaataaactgttctaccatacacctcgaacccttcaacgatggtttagtaaaatgagaaaacaaaaatatattgcttctgtttcgtttgacttttttcttagtcaatgttttttagatttgactaagtttatagaaacaatggcaatatttaaaacactaaataagtttattaaattcaacattaaatatattttgataatatatttgttttatattgaaagtatcagtgtatttttctataaatttagtcaatttaaagatgtttgactagaataaaagtcaaacgacttacaatataaatcggagggagtacttttttttaaggacgtgactacacagctagtgatagctggtttgtctaaaccagctaccactccatctatgagagactctatccacctatacttcaaataaaattttctcttaaactactcatccgatctacgatctgattacaccgttgtgttcgtaacaactaaatctttataacaagatctcacatgattatattttgatgaaaaattataaattacttttataatatatctaaattacttttagatttcactaaattacttcttcgacatgtaaaagtaaattaaataaagcttaaaagtaatttacatatattatagaagtaacttataacaaaaagaaaagtaactttaatgcataccttttttcattggacgtgactgctggtttgtactccaatagtatgtatcttttttaatctttttaataacttatgtcttttaaatcacatattgtttttaagatatatttgcatcattgtactccactcaaaatatgtgacaaaacgatattcatattgaatatattctcattttatttaatttaaaagtaatttattacatgttagaaagtaactattacatcttatacatggttaattcttattatttattctatcaatgttatttacaatccatcaaaggttttatcttcttttctcattctacataaaaaacaaaaataaaaggaaaaaaacaatcggtgattaaacagatttatagagttacttctgaaccatgcaaaagttacttccaattaatattgaagttacttttaaaaattgttaaacttacgtgtgttgatctgtgctgactaaatttaatgtctagataaagtcatatttttatccctactatgaatttacttctaatgtcgtgacaaagttacttccgttttgttttaagatacttttataatatatgtaaattacttttagacttcattgaatttacttttattgtctaagaagtaacttagtcaaatctaaaagtaacttatatatatgataaaagtaatttacgtatataataaaagtaatttacaaatataaatattttttcatcgtcatataatcatataagatcttgttgtgaagatttaattataacgaatgcaatggtgtaatcgaattgtagatcggataaataatttgagagaaaactttatgagaaggaagaaaaagacatgcatgtctaagagtaaaaatagcatgtacgtcagcacctgtaacagtacctcttctcacaattggttcgtcgctggttaacactaaatagagaggcttctcggtttagattttgcctttttttaagtatgttttgctcaattcattttacaacaaatcaaatcttttttctaatttttgtccaagtgagaaatagctactactcctataagagatagtaacaaagaaagaaacaaaaagggcgcgcgtagcgagtgccagtggcggttgcatgtagagccgcagaccgcagtcgagatggtgtgctccgtggctgccaccgcctcgctcctcccctctcctcctcccaaacccaccgccctcgccgccgacgaccaccacgcccgcctcagggcggcggccgcgcgctccgacctgccggccgcgctggccgccttcgtcgccatgtcctccgccggggcgccacccgtcctccgcaccttcacctccctcctcaagctctgcgccgcccgcggcgacctcgccaccggccgcgccgtccacgcgcagctcgccgcccgggggatagactccgaggccctcgccgccaccgcgctggccaacatgtacgccaagtgccgccgccccgccgacgcacgcagggtgttcgaccgaatgcctgtccgggaccgcgtcgcgtggaacgcgctcgtggccggctacgcgcggaacggcctcgcccggatggccatggagatggtcgtcaggatgcaggaggaggaaggggagcggcctgactcgatcacgctcgtgtccgtgcttccggcctgcgcgaacgccagggcgcttgctgcctgccgagaggcgcacgcgttcgcgatccgttctgggctggaagagcttgttaatgtcgctacggccatccttgacgcctactgcaagtgtggggacatccgggcagcaagggtggtcttcgactggatgccaaccaagaactccgtgtcctggaatgccatgatcgatggatatgcacagaatggggattcaagggaggctctggctcttttcaataggatggtcgaggagggtgtcgatgtgacggatgtctctgtcctggcagcactgcaagcgtgtggggagcttggctgtcttgatgaagggatgcgtgtccatgaactgcttgtgcggattggcttagactccaacgtgtcagtgatgaatgcactcatcaccatgtattccaaatgcaagagagttgacctggcatctcatgtgtttgatgagttggacagaaggacgcaggtatcgtggaatgccatgatccttggatgcgcgcagaatggatgctccgaggatgcggtgaggctttttactaggatgcagttggagaatgtgaaacctgattcattcactcttgtcagtgttattccagctcttgcggatatttcagatcctctgcaggcaagatggatccatggatattctatcaggttacacctagatcaggatgtatatgttctgaccgcccttattgatatgtatgcaaaatgtggccgtgttaacatagctagaattctgttcaattctgcaagggagaggcatgttatcacatggaacgctatgatccatggttatggatcacatggttttggcaaagctgcagttgagctatttgaagagatgaagagcattggcatagtgcctaatgagacaacattcctttcagtcctctctgcatgcagtcatgctggtttggttgatgaaggacgggaatattttaccagcatgaaggaggactatgggcttgaacctgggatggagcactatggtaccatggtggatcttcttggccgagccgggaagctagatgaagcatgggctttcattcaaaagatgcctatggaccctggccttagtgtttacggtgcgatgttaggtgcttgcaagttgcacaagaatgtggagttggcagaagaatcggctcagaagatttttgagctagggccacaggagggagtgtatcatgtcctcttggcaaacatttatgcaaacgcttccatgtggaaggatgttgcaagggtgagaactgctatggagaagaatggcctccaaaaaactcctggatggagtatcattcaactcaagaatgagatccataccttctactctggaagcacaaatcaccagcaagcaaaggagatatattcaaggttggctaagttgatagaagagatcaaagcagtgggctatgtgccagacactgattcaatacatgatgtggaagatgatgtcaaagcacagctgctcaacacccacagcgagaagcttgccattgcttttgggctcattcgcacagcccctggcacaacaatccagataaagaagaacctccgagtttgtaatgactgccataatgcaaccaagctaatatctttagtgacaggacgggaaataatcatgagagatattcagcgattccaccattttaaggatggcaaatgctcatgtggagactactggtagtgaagtgttgagacagtttgaatctgcacccggagatgagggagcttcagaaagatcagagtatcagatctgacaattaggtgaaactaattggcaaagttcttaaggtaattgcttagttttatacgtggtacatgctatgcgataataggattctacatatatggttttctattgccaacgcccttgccaatgagttttaccttgttttattgtagggctgtgcagctgcctcttatatcaacactaaatggctaaacttgtgaagtatctgaaaattgttatagccacttcaccttttcaggaaacatactgcaaattccagtcagtcattgtaaaattgaaatgcttctatttacattaagatactagtgcatagggaacctgttcttcatagcaaccatgactttctcatgtcttatctttggcctgagattagattcacatgttcggtcgaactgtcaataactgaaagttatcattttcttcttaccttttgatcatggattaaaaaaccgtactgatgtaatttgttttttttcgtaaaaagcaacatcatctgctattccatttgcaataaaatgatcgcacatgcatgcttacaagtttcaacaaaataattcaacactaatatcctttatgggagaggacatgcacttgaagctcaggaaagcatcttattctgaatgcagctactgctgtaaaatgttattccagggcattattggatcagcatggatgtgatctttttccttcagttattagcacttcctgctgacattgttgacttctgtttcccgactgtagcaataaactccactgccactttgagtgcattaatagatgccaggttcatcaggcttgttgacgaccatgttggctcccctccagccaaatcagaaactccccggaatacaatcacaggtatgccaggagatgttgttgtctgttgaaattagtatatgttctgttaattatataaatctatcttaaccttcatgattgcatgaaaaatgatgtgtaaatattggcagatatttaagtggaaaccatgagagataaaatacaaaactcaccatcaccactgctgcactctcctcatctactgttgatacaccaaattctctgaaaaggaacttcctatattctgcattgtctagaaacatatcagctgacgatccttttagcccacagactacttttggagttgttggcaagcagaaagtgtcgttacatctttcaagtgaaacctataaaaatttcacaattagtacaatttttcgggcattaatggtcaagcataagctggcatttattatgctatatctcaccttaagtccttctgcgattttgaaccatgctgaatctacaggtaaccagaaaacttctttcataggcttacccactgagtatagctcctcatttctgaatttcagagctcctagaagattctctcctccatttgggacagtaaaatctccaaagctaagttctgtatccgactcttttggtgatttgaacttctaaaataatcaaaaacaagaagtcatataaagagttagtttgaaacgtgagacagttggtactaaaatactccctccatcccaaaatatttgacaccgttgacttttttaaaaatgtttaaccgttcgttttattcaaaaaaattaagtaattattaattcttttcctatcatttgatttattgttaaatatacttttatgtatacatatagttttacacatttcacaaaagtttttgaataagacgaacggtcaaacatgtttaaaaaagtcaacggcgtcaaacatttagggaaggagggagtatgttctaattatcctgtagttgtgcttataaactgtcctctactttcactccaggctcgatgtgtgtttacctactaggctactactaaatgtgattttgatttttagtataccatagtatttaaaactaacatgcttatataagcattgctagtttaattttctctagtcagaactaaatttattaatagattagctgaatgttcattcatttgctaaagattaaaaatgagccactcatgtcctaacattatgcagcaaatggaatttttttttattgaacacatcaaagcagtcagtagaagatgtagtagagagaaggctgggtggtagactcaccaaagcattcttttaaaagtacagtagtgtatatattttgacacgatgtaactaatttaatgattcaaagcaactataatactggatttacagataatcatattccattcttttaaggggaataatcagattccagttgctttgaatctttacttctttgaggttggaaacggaatcagatcacagttggagggtaccttccatgtccaagcacttgtataagcaacaaatttggggacactgacatcgccaaatgacattgaatcattagaacttcctgctgtgccataatgaacaatgccagacacagtaaagacgtcgatgagagtctgtacagtcacagccgcatttaactggaagaacaaaggcatagtaacaatgcataagcatagcgcagtttgtattaaaatcctgcatgtaaatagcatctcacagcagtttcttttggcattacttgtgatatatgaaaatggttttctccatgtatcacaaggcagataatgtaaacgcaaataacttatgaatttaataccctgcgttgtcctgtcagtgcatatataacattgacacctctaatactcccgatgtgataccttcgtcctgaaatttgaagagttcagcattttattcttgagagtccattataagatgtaaaagaattaaggactacatgagatgttctgaatcgaaattgaatgggaatataatatatcagcggaatataaaatttcattaaacctgtaaaatgaatatttgatacaatgaaaatgtggtatattattgtattttttccttttgtgttctccttatggcaaagttttctattttatagtgcatctatcaacatgatgtgaaatcttggtttacggctttacagttcctgtacagctgtaccccgttctttgatgtgttcatccaacaataagtaaatgggacgatgtgccaaaccacattatgaaattgctaattgacaggctaaaccatcacatgttgaattcttcaggtcttgattgagcgcagatcatttaaatttgcagagcaagctggcttcatcacatatgacaaattcaggtatatctaaaacttgtattcgatgtccttaaatgttgaaactactgtccttcgggaaaaaaaatgctgaaactaccactgacttcaatagtagcattatgtatccatatgtgcatttgttctgtttttggtattttggttcacttagcagttttagcagtagttattggatgttggaaatgccaatgaaagacgccaagacttatccattcaagcatgtgggttggaaatggaaggcccagagttaccgtagaggtcaacgaaggggaggacatgccaaggtctgaagtagccggaggattcaagagcagtggcctcatcgatgtacgacatgacgagcccgatggaatggccccgccggttgaccttgtcgacctgccatctcaccctgtccattgcaggatgcactggcaaagccatggaggaggatcctgccagcaggaagagcaggagcagtggcagatggcacctcgtcaggttagagagctccatggccattgatggatgtctggagctcgattactggatcggtgtgagcttagagcagctgagtagcaagctttaaagtccaattaaggagttggtaattggtacggttgatgcagaacgtgatcagcgtgctccaatttagtataatatatatagtatatgagtacggcgatcaaagagggccgccaagtggtggtactaaactactagtaatattgagattgttggatgtgtctgtcatcagtgtcggtttttatcagagaagcttgagctgaatgcaagagagaagaaatcaagcctgcatatgcaaagatttacctccatctccatcccaaagcattgaccatgtacagtaccagtaaaacattgccaaatctaaaggtaaggatttcagctggcccatacaagttcgctgcttttctgactataactgcggagttagcatgacaggatttggttgctcattgctttgtttacttgcagaggtcagaaggaaaagggctgcctgcaattgcaaagcaaccctcggtagttgaagtcacagcgaccgtacaacctcctgcaactgcacctctgcatcagtggtagtagactcgtcgtagatggatcatggatggattgagttgaagcagagagagccttgcctttcaacttctcaccttgccagtatgccacatggggtgaaaactgaaaagtaaaggtactaactgttgactgcggaggcgctgatttttacaactacgatgaccactacagtacatgctctgaagtctcatcaatcatgggccaatggagtgccaaatcattcttatcatatcctggaccctcttgcctgcctgattgtcgtgttcatttgctcccttgtgcacggggccccacctggcagtgacacgtacggctgcacgtcgtcgtctcatccctgtgtgtgtgtgtggacggttggcacagctgcacgtggccctctgacgagtcgctttcgtcgctagctttgctgttccagctggttaaaataaagtttacggccctgctttcggtgcaaagtaaaatggcataagtaacatatgttatttttattacttacagttacaaagttaattagtcccaggtttttcttgtgcaagctcactattagctcccattcaacgacattaaagaaaaactcactcttatgcgcaggtcatcacagcttctactcactagccagtagccagaaaaacaggaatgattaaagagaggatctgtacgtgataaaagccctcatcatgggatcaaacacctattgtcgatcataaggtaatcattatatattttactgcttgctacaatctctctctctctctctgaatctgtttacacacgctactcttgcactcttactccttgttggttgggtcaatatcagacacatggtaaaaaggtgattaggagatcacctccatcaacttgcttcttgcttggtttgttctacagcctgccccagttgcattcacagtagtgactagctacaaaagctgaaagatggcatgcacattggcagtgcttcttgttcccaatataaaagctctataagataaaagaagggagtactatgtactatatatcattcacacgcccatctggctctagtacatatcgataccttttcgtcatctagctagcttcatgtttaatgcaaatccccattcttacatgcatgttgatataggttttcaccgcacacatgtagtagatctcttgccttgtgggcattacgtacagcaaagaaatagttaactagagaaaagaaatcagaactagtgcatatatatattgagtatatatactggtactctcaggagtgatgttttatttcaccaactcacatataggaaattacctcaaaaaaaattatatatagaaactagctagctctagcctctaggtactcgatctcttgtacaatgtacacacattatacaacattaattaagctttcataaacatgttttcaaataaatgacatctctcactgcatgcattgtatgctcagtctccattcatgaaaacaagttaggactgcattcagtaaagatcatccttcatgcacaaattttcttgctttgtggggctctgaaaagctgactctaattgggaactgcacgtgcgtgatgcagcatttccttctttgttagcagtaaaagatgagcccttgcctgtcacgtttgctgcactccatgcatgaacatagctttagacaacatatgactttttcatatagagccagatcatatgctacgtactaacctactttgtctgtctcacacacacacatacagacaagactatattgtatatctatatggtagtgctggcatctcaaatagaatctctttatttctccacaatgccctttatcagaacaaggcatgtgtaagaaactagctaaaatacagtgtctctcctctttttttttaaatctttttgtgccttcacacttcacagtcttattggcttcttatctagccaagctagtcatttcgggcaaatgacactatatactactaactgggtcaagctagctatagcacaccgaaatcaatcaacttagttatgcatgcttggacttcgcggttctgatgtatcattgtgaagccttcccaatcccaagtgtgaactcaaggttcggccgacctggtaacctcaacatagatgtctctaagtccacgctcagttttgtattctgcaacaagaagctaggtaagatcaactgaaattttgtgctatatatatatctgtcacttttgtgctttttgtgatgccttcattaatacatagcacaatataattctatatgaaagaaattaaatagagtcacatacatatgggcataaaagtgggtaaaggttacatattgcttaggtattattttgttaccttgagatatcttctgtaaatttcattagctggttctctgatgggtaagcctaccttgctgcaaatagtccatcaggcaaaatagaaaatatgccagacagtagaggtgttagaatacggtctattcattggtatatgcatttagttttgcaaatatatatatccagtaaatcaaatatatattaaacgaatttgggacagttgttaactatatgcttgcaaatgatgcttaggcagtaggaaattagctttgcctaataacacattaacacaggcaggagtcattaacaaattaaagactaacaatgttagcttagctagagaaaatgaattggctagcttccatgcaaagaagtttcaatttaatttaattaatttgccgtgcttttatttatatatcccatattaatttaactcctagtttgagtttctcaaaagacaatatcgttgacttatataataatccaaacaatgtgtattttcaacagttgttcagatataccttttcccgaaacacatagacttgtctttcctagaaacgatgtgagaactaactcacgtctttagtcatagaaagatcatgcatgcatatatacggtacagttggaactctatccatgaaatcattgcatcatcatgagtttcaaaaaccttggaacacttactactgcaaaatggtccttggttcgacagagctaaaggtctagggtattgcacacgctgcatcttttcaggttgcagcgtgcagacctgatatctctctttctgtgcattgtagtactgtgctagctagtagctagtgtagctagtgtgttgctgctgacattttgaaacacattgtggtacgtgcatgcatgaaattttaatttcaatagacatgcatgcattgatggtttcatcagtagttcagagtactggcactactggctactttactactccctccgtcccataatataagggattttgagtttttgtttataatgtttgaccattcgtcttattcaatttttttttaaattattatttattttatttgtgacttactttattattcacagtactgtaagcacaacttttcgttttttatatttgtaaaaaaaaattaaataagacgagtggtcaaacgttatcagtataaactcaaaatcccttatattatgggatggagggagtactatcgagcaggatacacacttcgctaccattgttcgatcgagtaagattgaaagaagtaccctgacgagttattgctccataaaccactgtaaatattggtgtcgttctgttcagatgctagcatacttttgttttgcctcagaggaccgtcagtaaaactgtcgtcggagatatctccagccgatgcattgtcaaacccatcgttattttgtcctgaaatttaatagatgaaacatacacgcatggagggtgaaattaaaattgtactccctccgttttaaaatgtttgacaccgttgactttttaagtacgtgtttgaccattcgtcttattcaaaaaatttaagtaattatttattcttttcatatcatttgattcattgttaaatatactttcatgtacacatatagttttacatatttcacaaatttttttaataagacgaacggtcaaacatgtgctaaaaagtcaatggtgtcaaacattttaaaatggagggagtatttaaatatggatgtagaatataattctcttcagttcttatgaatctgtctggttgtaaatttccgcggctagcatgggttgggtgtggtcctatggtggagtactataatacaatacatgaattgacaatgtactggaaattaatcattgtgaagatagtacactttaaattagataagtttttatatgactgtttggctttggcatataatctactaccggccagctcgtgattaatggtcgtttgcctatataaatttctcctctgaacacatatatatagacgcatggtctgaaactctctgaaatcaaagctttaactcatcgcgagttcctcacccacccacacacatgtacaccaaataaagggaggaaaaaggaaagaataatcaagagagacaaacaaaagaaggatcgatctagcgatcgagctagtagtggtagagagcaaaaactgcacaacacacatcacctcactttggttggatgcgctagtagcttttagctttcactagtcctgtgtccaacttatttttctgaaagcgaaagatgactattttgttcagatgatcagtgcatgtttgtttgcaagctctcttcctccagccttcttttctcactctctctttctttctctcctttctcactgttacacacttacaccccacatgatatgatgcttgcattgccttcgttctccatctccttttgcaattggtccctttgcattctctgtagcattcatgcattgcagcaaaagtatcaagcaacacacatacagatatgatacagctagctggttagggcagtcctaaccctccacctaagatggtgtttatggcattaactacattgccatataggacttttaacttatgtggcactatattaattaagagagagagagagagtgaagagaggaagaaactatgtctcatgcaagacatagcttcaacacgagaacctatgcactagacactgtcaagttttgcattgggagataatagtgtcttcataatagatgaagaataaatctgattggtagagaagagagatgatgtatttattaatgatccactttaagaaaccatgggttgtagagtgtagtttctattggagaaaatcccctatgtactcataaaagttcacctaatcccttctatacccctgaattttgctcaatcccttacatacccctgaattttagtttggatcccttccatgccctttccgctagttgaccgttaaattcttttgaaaaagtccattttgccctttgctataaagaaacataataaattaatgaagtatattgttggaatgtaaaaatttattggataagactattatatttatgagtatgtgatgcaccatattatttgtgacaaatttacttttacatatgatataaaaagttgatacgtatttattagttattaaaagttcttttatgtagcatatgtgttttcatagtaatacaacagatttgtttattacttcagaacacatatgctaaaaaaaatcttttaataactaataaattagtattaattttttatgtcatatctaaaagtatatttatcgcaaataatatggtgcataactatctaataaacataatagtctcatataataaatttctatgctccaacaatatactctgttaatttatctgttaatttatatgcttctttataccaaagggcaaaatggactttttcataagaatttaacggtcaactaacggtcaactagcggaaagggcatggaagggatccaaactaaaattcaggggtatgtaagggattgagcaaaattcagggtatagaagggattaggtgaactttcaagggtacacaggggattttctctttctgctgtgatgtcttattgacatggcataatagacactacttatagacattatgggttgggactgcacttatacgttagtacagagctttgattgatcgtcatccgatccatgtcttgtcactgtactactgtagctactagtatgtaggtttgctgccctaccgcttgcttgttttctcactttaactaattgcttctaaaacgcattgaaatcgaattgatcttcttggttactggatgaacgtattatataatatgtttgagttaaatgtctctactttcaaaattttgtaagaacaatctgattcttcgtactgtaaaactggaacacgtcaatgcatacagaattagtagtacaaacttgactgaagaaatagtgtagctgaaggttttgatggcaattatatatattctgaaatgtcagatatagatattaatttgtctttttcattcagtgcctgcatgcatgtgtctccggcatttcatttcgtccaggctagcaatctactccagctaataagctagcaagatggtcagataactgactgtctggctcccactaactaattatgcatccacagtccataactgtagcacaagtactcagcaaaacactcatgttgcgcgcggtcaatgctattgctacctagtacctacaggatacttgtaattggttgggctactgagaggagaggaggaagaagagctagcagggtgaagaagaaatactatactccattagttcatttttatagtgtttgtttattttaaaatctattttcaaaacaataccgcgcttatattcacgttcgtacactcacttctaaactcatacacatacactttatctctatgagtatgcacttttaaagactggatcaacgtatcttaaaattgaagaagtcaccgtagacatgaatgtgagcatttgtgctaagtctaggaattgaacttgagtgagcaggtcccatactcccatcccaagggatcttttgagctcagtttcattctttgagaataaattttaaccatccatttgaatttatcatgacatatgtttctaatggatataaaactaatgttggttggaaatactttgaactgtgagtctgatagtgtaagttctatatactaactatactaccttaattaattattgatcaaaatcttttgagtttaactttcggaaatcaaagtacgtcatgtaaaagtaaacgtaaacggaggaagtagaataatttgacaatcaaagaagagagcccaatacaaatacaaaccaaaccggcctcataacgtgaattcacatttgggcttacctgataagcccataagtttgagaggcccatgttggtctatccggtcgaagtcggacggaataagttcactttggatccctctatttgtcgtccagtctgattttcatcccttgatcgcaaaaccgggtacgataggtcccccaacttacgaaaccgtttaaataagatccctcggcagtatttgaccccggttttggccgaggtggcgcctacgtggctaatttgactcggtcttcatccgacgtggcattgacgtggcgcttacgtggcaattcaatccaaaaaataataaaacctatgggacccacatgtcagtttcacacacacaataaaaaaaaatggtggggcctacgtggaccccacctgtcatcctcactacagctctctctatcccccctctctctatcctctctccttcctctcctctctatcccgctctctctctcctgagaatggcgagcggcggcgggcggcgctgaggggtggcgacggagctgacaggcggcaggcggcttgtggagtagcggcgagcagcggcacacgcgcgcgtggcgtgggcgctggcacggtggaggccccgacacacccgctcccccacccccacacacctggcgctcgcggcggccactgacgcggcggccgcaagcaccgcaccgacgtttacagcttcggatggttctcctcgagcttgtgcgcggccgcaagaaccacagcgagcacgtgagcgatggcgccggcgccggcggtagcggcggcgccgccaccggcaaagctcatcgcgtggcacacagagcgactacttcccactcatggcgctggaggggctcgaggcagggtagtacgccgagctgggcgacctgcggctggaggggaaggtggtcgccggcgaggtggagagggtgataaaggtggggctctgctgcctccatgaggaccctcagctgcggccgagcatggcgatggtggtcggcatgcttgagggcaccatggaggtgtgggagccgtgggtgcagtcactcgggttcctccggctctatggccgtcgtacaagtcgtcgtcgcagctctctccggtccaagatagattatacggttgcattgatcattttggttgatttgtaaacagagggattaatttgtgcatcgtgaggtctatacaaattttgatctgttttcccatcggcacacgaaccttatattctcggcgctgttcgcggcgtcgctggcgtacctaatgtggtggtggtgggagaagatctggtcgtcgacgctgctccacgtggtggggctcgctgagatgctcgccatcttcggcctcgtcgtcgtctcttgccgagatgctcgccatcaccgagtagtcgctccgtgcgccgcgtgacgagctgcccattgtcctgttcgaggagttggagtcgtcgccggtggcggcgccgacgccgtcgctcacgtgctcgctgcggttcttgcggccatgcacaagctcgaggagaaccatcccgaagctgtaaacgtcggtgcggttcttgcggccgccgcgccggtggccgccgcgagcgcgaggtgtgtgggggtgggggagcgggtgcgtcggggcctccaccgcgccagcgccgatgccacgcgcgtgcgtgccgccgctccacaagctgcctgccgcctctcagctgcgtcgccgcccctctgcgccgcccgccgccgctcaccattctcaggggggagagagggggatagagagaagaggaaggaaagaggatagagagaggggacagagagagctgtagggaggatgacaggtggggtccatgtaggccccaccatttttttattattgtgtgtgtgaaactgacatgtgggtcccatagtttttattattttttgattgaattgccacgtaagcgccacgtcaataccacgtcggatgaagaccgagtcaaattagcaacgtaggtgccacctcagccaaaaccggggtcaaatactgccgagggaccttatttaaacggtttcgtaagttgggggacctgtcgtatccggttttgcgatcaagggacggaaatcagactgggcgacgaatagagggacccaaagtgaacttattccatgtcggaccatgaccgagagagagagtaaaaaaaaagtaacaaattgattatacttttcactcagtaaaaagaaaaaaacgacttttttttacattagtcacataagcctgcattgcaacaagatttaggaggtaagaaacgtagtttaatctgatattttcttctacaacgttttttataggtgagggtgggaggtgttttatatataagaggatatcttttaatacgtggaggttaggaccggataaaagaaaaaaaatgcttttaaagtgatacagataattctcataaaactattttaaagacttatatctacctccgtcccaaaataagtgcagccgtggatatccgtatccaacctgacttatttaaaaattttatgaaatttttttaaaaaatcagttatgtgaacttatattttatcatttaataaaaaatactaatcataaaaaagttctaataagatgaacagtaaaaaaaatttagatgtgaacaaagtaaaacatcatttattttgggacggaggtattacttagctttagatccatggagtagtttctctaaattttccacatgatcaatgtgaatacagacggagatcatacatacagtttttaaagttaagcattacccatctctaaaaacattgatagacgtgtgagaagtgacaaaagagggggcagtatttaaaatgaaatccggcaattagcagtgacagccggcgctaatcatgccgtcaagctgccctctatctgacgacccacacccaccgcctctctctcctcccccaccacgcggcggcggcagcagcagcagctagggtttagagagcagcccccaatcccatggccccgccctccgactccgacgactcggccccgatccccgccggcgccatctccaagctcctcatcgtcataggtactctcaatcctcatcccctcctgcgcttctgcttcttgttgctaatcccgttgctgttgtttggttggtttggcttcagcgatgcagacggaggcgctcccgctcgtcaacaagttccacctcgtcgaggcggaggaatccatgttagtagtgttctcccgtttctccccccttgttcctcttcaccaaccatttcctatccttccatgccatgctgcacttactgctgttgggtggttataagttaaatccctggaattaggattttttttaaaaaaaaagaaaagaaaaaagaacaagttatttttgtggatggtgatgttctgctttactaggcaagtttagtggcaaccttcgtttaatctgtctcatgaaaatgtcaatgtcagctgtcctcgaaacttttggaaataattatatccaacttacagggatagtctgatacgatccgttttcactattcctgttcctgtgtccttcatacataaattaagctttaaccttgtgtcatcaccctgttttgctcatataacctgtccgatactctcagctctgaagctaactcctacctttgtggcacacgcctaacagatttcctaaaggtgccccatggattagataccatggcaactacaaaggccttcacgttgaccttgtatggcctggaaaagatcctgttctcggtaagttgtcatctataatatgctgctcaccagcttgttgtcaagaatcaagcaataatttgataggtttcttcatcatgtaattcttacaatttatccacaaactaaccttatttctttcaggagttgactgtgttggcacggtatcagcagcacttgtgacttatgcttctattcagtcattgaagccagatctgatcatcaatgctggcactgctggtgggtttaaggtaatgtttcaagatatcacatgtttgatgccatgctgtcgttttattgtacctgggttctgatgttgtttcccttctggtctttcaggccaaaggagcagacattggagatgtctacttagcatccgatgttgcattccacgataggagaatacctatccctgtgagtgttctgttatgtcttgtagtatttttttttgtggacctagtcccatttttctgcagtgtgaccttattcagttcattgatgtgctacattattagaattcagaaagtcatacatgtcttgaacaaaacattgctagtttttatctgtttatttcataatccagtccgtttcatggttttctaattctaccttcctgcaccgtgacaactaattatttataaacttatagtctgctttactcacttgtgcttctggtgacatctgctcctttgccatttattctcaagatattatatttgcatcgccatattttctacaagttctttttagataatctatacacgtttaattgagatgttgacatggaccttcttggcttatccacaggtcttcgacatgtatggaattggaacacgaaaaacatttgctacccctaatatattgaaggaactcaatttgaaggtaagctacagagctatgctagttgatgccaaactgctggaatgaatactgtgtgagtcgtgcttacatgcatatatcttactgtctcctttagcatggtgttgtttctgaaacgaatttgtggattttattggtaaactgtagcactgtatagactcaacaagatgagtcgatcacatgctagtgttcaacattccggaagtcattgtgccttatttgcttcaggttgggaagctctcaactggcgattctctagatatgtctccccatgacgagtcagcaatattgaacaatgatgctacagtcaaggatatggaggtatctatttacttctgctcaagcattcagcttaagaacataggcacacaacagggaaatggaggtcttcaaccataggttcctcttggaagttggaatgagttcatcctttatgaactttaggacaacttttacacatcttgcattttgtgggtcgttatggcattgaagtaggcaaatgtctataggaatatatttttatccaactaattatttgctgatctcttcagtttttttgttaatgcctgagttcaagttaaatcgactagcatgaataagatactttgtgtgcactggtattcatacgaagttatctgctgctctgctttgttttcagttgtaatttgtaggctcaaactggcttcgttattcttgtttttccagggagccgcggtggcatatgttgctgacatgttttcaacaccggcaatctttgtgaaagctgtgactgatattgttgatggggagaaaccaacagccgaggagtttctgcagaacctggttgctgtgacagcagctctggacaaggcagttacagaagtggttgatttcatcagtgggaaatgcatatcggatctttgaatgatgaagcttagaaacctgttcatcaaatccaagctctgctgcttcaatgcactatactatactacatcactgctgtatgatttttcatggggatgcgtatacaatttttaggttcccctgaggccctgatcccccgtatgtacaaaattcttggcaattacttggatcaatagcgtggaattttgtagaatattctgcaaaatgtgcagtgtaatgaaactaaataaggtgatattctgtcaaactaagataagtggtgggcggtggagttattttcttaatagagcattgagaccatcttcattgtttgctctacgattggtaaactgtgaaaaaaaaaacccgaagaagcaataaacatagtttacgtgtagaccttttatgtttgtattcttagtgattaaaaaactcatgctagagaataaatacgatgctataaaattcaaacagtggtgaagaaaaaaaagaaaagaaaaacaataaaacaagaggcaatctgcttctctcactgtctctatgcactagaggtagaggagcaattaagcctcgtgttgtgattggttggctggttggttagttggcgcttttatcgtggtgcctgttggcatgcctgaacctgaagagtataaattgactcctggtagttttgccattggtagatacagcccttgactctgctgcctcttcagttcaggtactgccctctcctcttcctttactctgctctctttttctttatttttttaggacccttctgcagtagtactacatgtttgtccagctgctgctgctgctgctatcagtttcttgtccttgtgatacataattctggtgtgaatcttgctctctacaaattattgtgcacatgaatcttgctcttcagttcctatgttgcaaattctagcacattgcaaaaggttttcgtcatggcatgaacagaaatagttttgcagtacataattttgtcaagtttgctgaagaagctctgaaaattccttgcacattttactaggacaatcgatttccctattttgtttacaatgaatggcagattgatcttgtcagatggagctggacactgatcctaccaagctgaaggccaagcccatcatcaaaccaaaagtagaaccctgcgacgacgatgacgagttgccgccgccgccgccgccggcttcaggatccggcgaggattgggaggccaccacccctctcgccgccggcaaccccttcttcaccgccctcatcgccaagtctcatctccaccccaagttccagatggtaagcatcacggatttatcgctggtatcttctttttcgaaaagtttggacacccagaaatgatttagcaccaatgaagttaaaaaagaagcaataagatattttatcctagcacatcaaacatggtgaaattttgattaagagactcgaacctaggctgatagtgcttgccatcctagccactgcacaatgagctcatctcgacatttttttcttttcgagtgtacttcctctgtctaaaaaaaagacaacatttatgatgatttgacaacatgtccagatttattatccagatttattattttagatagtatcaaatccccacataggttatcttttatttgggatggagggagtacgtgtattaaaaagggaacacacttatggtgtgtgcatgcgtggtggtgatgaacatgcatgtgcattcttcatttaataaaaatgttacttatatcttcgactatcaatttttaaaaattattgtagtttaacatataccttattgtatcattaagattcactactagaaatactttcataatatataattcacatattgttaaactagataaatttgtaaaagtgatgtgctaagatagagcttaggacaaatgtaataattggaaatggagggagtaattaaacggttttcttttaagttaaagagtactctctccatccctaaataagtgaggttttagctatttaaagacatattaagaaatatgttaaaagactactactatgtccttaattgatatggtgagaaaacgaggatagaatactattggttcagttacttaaaaatgagaagaaaaccactctaaaaatacattcatgtaaagataaatttttagcctaaagttgcacttgtttaatttactcctaataatcatcattatgtggataagtatatcatcatgcataattaaatatatatatatatgtctgtgcggaattgatttgattatttaatttgtccgcgcgcgcgcactaatattatttatatgcagtggattccacctcggttccagcatcggctggcggagccggaggcgcgcacggcggcggtgctccactccggcggcaagtcgtgggcgacgagctactgcggccacctcaagatgaagaagctggacgcgggatggtcggagttcgcggtggacaaccggctcctggtcggggacgcctgcgtcttcgagctcgtcgccatgggcgccgccggaggtctggagttccaggtgcagatactccgcggcggcctgccggcggaggtcgtcacctccaagggcctcacctccgaccaacccatcctcatcgtcgactagcttagctatcgatctagccacagtactaaatcatcaaactccactattaattccactgtcactagctcgatcggtaattaaaggcaaggagctttaatttggtgtcaagcaaaaatttatccaaccaacttatgtatgatgtactgcagcagctgcaatggctactgtagggattgtagtttgctactatatctgtttgcaggacggatccaggaacaaaaaaataattagggggactcaattacgcaatttcttcaacctccagccatttaggaacttttagtttatcatttatggtgaaaaaattgaagggggtgctctagtagtattttgggtgaaggggggacttgagtcccatgcacccacgttggatccgttcctggctgtttgttgccatatactccctccgtcctataatatagcaacataataccggataagatatttcgtagtacaatgaatctgaacattttatagttatacccaacaaaccccgatagaaacatacatccttatatggtttattaggcatctccatgcaagtgaatatattatttagttgcaacagaaccgaacaatagagtagtttgctaaaaatgtactagtgatcatcatacccagctcaacggaagttatcttaatccttgtttgcttaacaacacatcttagttaagtttgagatgtaaagcttaagaaaatgaacgaggcaaaccgaaaacaaataatctgaagatgcccctagctttgttctcaaacaaaagttgggattaagctagagaacaatgtaaaaatatctgaatgtaattatttgggtcgatggtactgtcaagtgtcaactgtcaagtactccagtataccaacttgtgagttggttaccatctggtgtactactagtaaaaccggaagatgcttttgcagaattcaaattcaaattctccgtatttttgacttgaaacttgcagcgttgacttaccgatctactaaataaataaatggatcagatcgagaaaacagagagaattaggcccagcagaaagcccaagaagcccaagagcgaaatcagcagcgcaatacgcgtagtctagtctcctctctttctttcttcttctcctccgccgacgccgtcgttttctccgcagttcgccgctgcttccactccgcctccacctccgccgccgccgctgctcctcctcctcgcgcttacagtttcctctacttccccctccttggtcttggtctgcctcctcctcgccatggacgtcaagccggtaagcgtccgtcgatccccctcccgcacttaccctttccttaaggcttaaggtttagcttctgcggtctgcggagaaggcgacgtgttgcggcgaatccggtgctgcggcgattcagatcggaatcgcggtttttttgtttttctttttgccggcgaatccggtgcccaatcggtcaaccgtctagtcatacatagcttaatcggtggtgggcaaatgattttagatttaacaagaagaggggagtgtttacgcagatctagtcatggaagatcgtctggagttaggggagagattatgggtgtagcgtagagatcatcaacacttcctactcctccctcctttcctttccttttaataagcgacctaattgatcccgtctgcatagtgactctgaattagggcaaaattaggcaggcggtttgtttgtggctctgtgcttgggattattagtctataaataagctttattacttccataaacaggctctagccgttctgcgcaagtttttcagtgctgtaagccccattttgtcattttggtcgatggtgctagtttgtaactgcacataatattatattgaccttttctggtacgctcagaaaatacatctttacatagtttaggcttcttcatgcgagtgaagtattattatttacttcattcatcattttaggctgtgaattatttatacagatgaaaatctcaagcttagacttggttagaagttggtcaagggtagccccacttgcatgctctctctataaactttcaaaagaaaaaaaacctttcttatatgtgtacagatgctgatctcagtaattgtgtgctgttgcctttgattttttttttcatataccctgttttctatatccctacatacttgattcgaaaattatagtgataatgttttattcgttacaggtgaggactgtgaaggtcaccaatgtctccctgagtgcaactgtgcaagacattaaggagttcttttcattttcaggagacattgaacatgtggagatgcaaaggttcattttttttaaaaaaaattgcaacatgtacccaaccaaggagatttgatttgccctttactagcattctcatcattttgtttgccttccattggcagtggcgatgagtggtctcaagttgcatatgtgactttcaaagatccccaaggagcagaaactgcacttcttctttcagtaagtaattgaaggacttcgtagcattgagtacacttgttgcatattctgtactccattttcgctgttccttattccttaaccttcattgaactcttgtttccttcatcgctacatgtgtatgtgtgtgaagctttgatgtctgatgtttctgattgccttgtcttgtcttaccttatcatgcttttttttaaataaaaaaaatagacttattatctcaatgaaagcaccttgttacctacaagtttggcatgcttgatgtttcctcaatacctgaagtttagcttttgttgctacttatcagttgtgaattaatacccgttttacccatttttttttgctgatgataggctcgtggtcaatcactatggaacttctagtgcatgcattgccaaaaaaaaggaagcagaagcaaaaacaatatctttagttgcatttccatttcctatagtaggatttgatgtccctgtaacaattgtttgttctgctagagcaaaagctgagatgtcgttctatttcattgaaacagggcgcaacgatagttgatctttctgtcatcatcgcacctgctccagaatatcaaccaccccctacttcatctgctcctccaatggtacacaattcctcagttttgatttaatatgctcatattttgatttttcaatatgtgacccaagtgagatgttatcatcaactgaatatggcagttttgtctgcacaataattctcacccatgttcttgattgcactggattttctgctttcttagcttaaatgaaaccttgtctcatgtgcttttacatattccattttcataaccataagtgcaatctataatttcaaattataggtgcaaatataatttagagtagctcccggtgctaacatgggcatatttgcaacattctgttgatcttatggaatatgaatagcttgaattgaatattgtgttctgttctcagtatagtgcaaccagtgtccctgtcagtgaagacaacaatgttgtccataaggctgaggatgttgtcagcaccatgcttgctaaggggttcaccctggggaaagatgccgttggcaaggcaaaagcttttgatgagaagcatgggttcacatccactgctggcgccaaggtggcctccattgacaggaagattggtcttagcgagaagttcactattggtacttccatagtgaacgagaaggtcaaggagatggatcagaagttccaggtgtcggacaagaccaagtctgcattcgctgctgctgaacagaaggtgagcactgctggatctgctatcatgaagaataggtatgtcttcaccggggcttcgtgggtcaccaacgcattcaacaaagttgccaaggctgccactgatgttggtacaatgacaaaggagaagatggcagctgaagaccagcataagggctcgggtccttctggagggcactcgtacacacccatccagtgatgactccacgctctctcatgtgccgcattgtgttgtattgatggatgtaaaacatagatatagaacagaaaaagtcccctcctggcataccacatacttctatcagtgaacttttcgcattgcaggaattttgtttccagtagaataggaaatatgatggtgatcacaatgtattccgctggtttataaggcgtatgttcaaactgtttctggttgtagtaacttgcatgaaccttggcaaaagttgtggaaagctcctttaataatgtcatgttgatgttggttcatggttttgtatgtgattaccgtgtccattgaaaacatattatggcttgctcagtcataatctgcagttgtttgaccgtacaagaaatgtcccaattttatggggtgcaatcgattgtcagcaacaaagtcgttgtagtatagtggtgagtattcccgcctgtcacgcgggtgacccgggttcgatccccggcaacggcgatttcactatttttttgccagtttcactttttttttgtattcttgttgatattctaaagcttttgtttgtattgttttgttacttcttccgtttgttacttcttcctttcattctactcttgtcggtgctttttcagatactacttttttaatcttttggtattcttgttcatactcttcactctaaagcttttgtttatgttttctaatacttcttcctttcattctgctcctaatgaattagctctatgtttttttatacttcttcctttcattccattcctgttcattctaaatcctttatgtattctgattctacttcctttcattctacccttaaaaaaacgctccatgtttcttgatacttcttccttcacattgcttctttcttattatgggtcatcttagcagattcatgagatcttaaatatccatagagcatccaaaaaggtgggcattcacttgttataaaataatatcaagctacaagtgacatgtacagtatgttatatattgatgtatatattgctatattattggtgtggtgacaggaagagtaacttgccactccatctggtccaccactctaatgcatgtgtcaagtgtcaacttaatctcaagctcaagctgaataaactgagaggctgaagctgaagcctcccttgccaagctacacaaaatgccatcatgtctcaagctacaattagcctggcttgtcccttccaaattagcatcatgcatgtccttgatgcggacaagcctcttgtttcttgcgctggcttcttcctcaatcaactacctttatctactactagctccatgtatgtactatagtccactgtactcttctgcttctactaactgcacacacaagattaaattaatccaacaatcaagtgcagaactgaccctaattaatccttctgtgcttgcttaagctcagcactggctggagtactttttatttttgtgccccaataggagtcaagcactgttgctagtcatccatgatgtgtgtatgctgccccttttttctttggctttctgatgcttctcaactatgcctttgaccaaggaaggattcatctacctaaaaaaaaatgaagctgccgcttgctaaattggttacatctccatgaatgtagccatctgggacagtgtaatgatatcaagggatcaagaatctcaagccacatttttcattggctgcatttcagttgataattttaacttcttgttaaactcctattaatccctcttgtgacttgtggataacggttttctttttctcctcctctgtgtcgtgtacaggtgcttgtgctgaggcacttgcgtaaatataattaattaaaatgacaaaatgcttgctatagtattattctctaggtatatatattccagaaactcccatttgtgtggatgtcaagataaaagaacaggtgaagtgagatcctcctttttaattttaagtgaaaaacaagaacactatttcctttggtgagattcaggcagcactgcatttatatggtactatttagagaattaaaatggatatgcaatctcatggtgtacatgttcttgttgcaattgatacttttggcatgttgattttgtacggattaaacaggtgcctcactaaagcacttcatccagtaccatttctttatgtccagaaagcaactataaactactggattccatccctaagcatcaatcctgtggtcacaagtacatgaactaggatctgacaaggacaatcacaggacaaaagaaatagtactaactacaaatgattcagttcatcagttggttataatccaaattatagatgcaacttgcatactagtaccgtattattttagcatctcggaatctgtgccgagagcatttcagtttcacattgctattggctggttttggatatatggtacagtagcttgtgcttgttttgaggttcagacactgacacacagattcagggttgaagcattctctgaaacaattaagaattgaagatttggagtccttccagttttatctgtaaccaactcttgatacctatagtacaggcatgctctgaaacgaaatggttcatcaattgtgcctaaaaaaagaagaaagaaacatcggttcatcaagaatggtctgtcaatctcagcagcactgttttgtttgatctacacgcacaagcatcaagttgacttttggcaggcattggaagtgagttgtacactgaaattgcgctagttaacccatccattcggagaaaatttcaggccggcttgatttgcctgaccacaaaggcaaatgttgtgtcagttgccacagacagatcacctgcttcttaattatttctagaaccgttgtgagatgatggcaaattagcaatgaacaatccaattccaaacctcgtatggaaaattaatattcttttgcaaattgatctgaatgaatatatagaccaggcccctggtttcagtaaggtaaagtcaactcgtgcatgcatgtatgcagcacggcccggctgccccggcatcccctaacaactcagtttaattagttttaagcacaaaattgtgaacaatagttaagttctttttgcacattttcaggtaaagcagttgtcggtttattacacaataccatgacaccatggagaccacacatgcactgcaagttgaaaaatctgaagatagaatgaacaaaatatgttcaaagccacaactgttcttgttttctatggcgagaaaactaaaaactgttcgatcttataatttataagtacaacatgccatgatcttttttatttatgtcgatgcatcaaagatttaccatatccaattatatatactgagatattaattattaccggcaacctgagacaattgcatgaatatttttactggcatatgacatctgatcgatcagcaagttttttttttcctttttcacgatatgtaactgatgatgtcacaggaagaagagatcaaggaccggagcagcgaactcagtctcgaaacggtcttagttgactcatacaaatttatcaaatatcatattcatttctagtttaatttctacacgtctgcattgcaacagtgtaccgttgaatcaacgctaacacccagcattttttaattaattaatgctagctacgtaccaagatcgatcgatcaatgcattaaggcatcaagtagaataagaagtgcgtactatttgggattaattaacatgtaatatgcgtggagatacacgtgaaggggtagataactaaaatcaacttagaagcttaaacacacaaaggctcaccaaattataacaactaacagtgaccttcggagtggaattagatcacgtaaagatctggtcctatttctttatcagattctgtttactaactactcgtatatttatatagtgggatgcagtctctattgcttattgcatgtaaattaatcatggccctgttgagccagatcagccgtaattcaagtcatcataccaaggaaggacgtacatgcatgaccatcatcatattcattcattcatatatattctatgttaagggtgcacatatactaattaggttaagaccctgcatcctaatcctggctaaaagatccccatggctgtgcagctgtttgaggaatcctcttgagtttctgttcatttgacttaaaccgtttggatccctgttttgttttcatatataagtaaccacatcttgcaccaactagctatttgattagtctctgcaagatgaaacattgaagctagccttaatattattgtggccaacgagaataatggtaaccgtagaagcatttggtttttatagattttttggataatggatggaatccggagtatatatatacatatgtaaaggtttcacgaatacttatattccaggtcttataactaataaacaacaaaaaaaattaaaaaagaaaacaaaaaatactagaatactcagttttggttttctgctgcctgatgagccttgttgtaccaaaaacgtatcgaataaatattgaaatgtagtcaaaactcctataccctcatcctctttcacccacctctctctggtttgttcgcaaacctacccctactattggacagatccatttgatctagatccgaaaactcccagcacttacttccttcgcttgctgacatcatcgagtggaggcaaagaagtgaagaactagtgcatttgctctcagatgccatccagcggaggtagagaagaagaaaactctttggtgcattgagttcgggcacaaacacggaaacaccttggatccatggcacttagaccctagatctagggttgtctgttgctgtcattgctaaccagcctactaccacgctgctgatattgctcctcactatagccgccctgcatactgatcaccactggcaccactaacaagcccgtcgtctttttgtttttctcactgcatccgccttttgtcagggcactggatctgaccattaggccgaagctatccaccctggatgtcgctgataccgcctacaataccatctttgttctaggttgtcgttgccaagagaacgttacatatgcacacccttttgtttagaagcattttatatctccaatcttcatgttattctctccccctaaagctcatatgcgcctttttttttttcttatttcctttttcttttgttaatcatcatcttggggcatttcagtttctgctttgttagttttgagaacatataccagaagtatgtagactggttgcacccactctggtctctaccttaatattccaaataaataacacatcttagtctttttccctatactagaaaagatgtccgtgcgttgcaacagttgaatgctatgttaatcttattattgttatacggtttggctagggtgaaattcactgtaggaatccgcttggattttttttctaaagaattatgagctgcaattaggagtccgacattcatctcaagttagcatgcaagtttttttaaagagatatattatacgactccttttgtatttctaaaagcaaatgaacttaaaattcgactcaaacatggatctatattttcaaaagcaaacgaatttaaaaatcgactcaaacacggatgacgtacgaaaataccggcaaaaaaaatatacagtttagttaagatgaaattcactgtgagaatttgcttagatatatatttttttctagaaaatcatgagttgcaattaggagtccgatcatctcaagttagcatgtaagttttttttgaaagagatttcttatacgactcctgtatttccaaaagcgaatgaacttaaaaaccgactcaaacacggatgacgtaccaaagtataccggcaaaaatatctttaatttttataatagtatagatatagatatgtacttttggttatgattttggggaaaaaaaatcaggaattgaattcccaacgatatatagcttaggccataatatatatagtaagacacctcaacataggaattattaggacacctagaatatgatatacaaaattagcaagtagttctatcgcatttctgacattgttgcttccattggtacgcattaatgatgaactgaaaatgagtgtttcattaataaacatatggcagtacatgatgtccttattggatttcttaccagaatggattactcttcagttgagcgcgagactatcaaagatctctttcatttcaaaaggactatcaaatctctcgtacaaataatagagaaggattataaataaacaaataacaagagaaatctgacggaatgttttgcctgcagtagtattcatgtattgcctgcagtagagacaaccactggtactgtatcttgtacgtcctctgaccatactccaatttaatttgtatgtactgatcactgctactatctttgtatcataatataagggattttgctcatgttgcatttagttatatgcctataatctcttatattataggacattggtagtattaattaatttgtaagacatgttaaaaccgatcagaaaactaaagcaatcttttggttcaaattttttttcttccagtagtgctaatgtaactgtgaataatgctttgaatttggcagttaaaaatagaaatttgcgtccatgccggattggtgtagtactgtgcttcaaatataaaatcacactaaaataatacattctcgtctcaattatacgagcaatagcaagacaaccatttcttgtcttttttccctagtagctagatgtctatctagatttttgtttttagatgatgagatgtcaagctagatactactcatatatctgaattctactgtgacatgcttgccaattcatccatgcattagctagattacttgcacactctaccaaaattaaaacacaatttcttcctgccatgtctactcacattatttaaaaggaaatatgctctcaattatttgcgtgaaaagataataaaagtactacaaaatacaaatactaaaggtgctctgtacgtacaaaagcaaactgatgtactgcttacttctgaacattactctgtgagtgtgtgtctagccgcaagtttttagtgaagattgtattaattgtagcaagttaaaatcagaatttcattgttaattagctggtatttgcaccaaataataatatagtctggttaaaccagagatgcaattttaaaaagaaggtagttgaaggggaagactaaccaaataggctgcttaatgctgcaacactaagggagattagtacagatgaacatagtttaatttcacactctggacagtgatagtgattgtcctgacgacgatgctgatacgaaagatctattgacatatgtacatatactattcaagaataattcgcattatatatatggtagctagtctgcatgattagttattgatacagattgaaacctgcagactacggtacaacagggcctgaaacttgtactgcaataactagatttgtaaccagcagctgcagaaagggttgtctgattaatcacttcactaaactttatgggaaggataaattggcagatgggaatatatggctatggccgtgtctagttccacagtcaaatttttttaaaagtatacggacacacatttgaagtattaaacctaaactaataacaaaataaattacagattccgcctgtaaactgcgagacgaatttattaagtctaattaattcattattaacaaatatttactgtagcactacattgtcaaatcattggcgtaattaggctcaaaagattcgtctcgcaatttacatgcaaattgtgcaattggtttttttgtccacattttaatgctccatatatgtgtccaaacatttgacgtgatagaattttcggaagtttgggaactaaacacagcctatatatgtgcagtagaccaagtgaaaaatgcattctgttcagatgttctcttcctttgtagtttcaaactttcaaaaatgcattgactaccacttctgaaactattcatcctttaatttagggacctcaaagagaaagagagagtaataattacactcgtatagtgcataaacttacatggggtgagtgaaacaatttgcaaaatgtgtttccccccttttctattttggcagagtgcatgttttagtagaacaacttaattatttagtctgtgtaaattagggctaaaattggccacacaaattaatgaactgagactattttgattggaacactcatcattccaatttataattaagttgtctaatctgggcaatttacaatccattgtgtcttggccttatatatatatttccttcatgtgggtagaaggagtactggggacagcagaggcaagctcagtgtaaggtggtcttgcaagccaacctggcatcctagctagtcagtatagaaaatcaataatttgcctcggagacatattttggccttgtttttcactgactaattacaccggaataagaattttgcatgtttttaaacgtattttcacccactgtgcaagttcaattcatacaacgtatttgtcagtatttgtcaagaatgacattagcagttatggcagaatctctcagcttggaattgaagcttccgatgaggtgtttgtacgcacggctcaaacttcagtttgcaaatttaccacagcaactcgatctcttcatgtcaaagaaggtagttgtgcgtttggtaaatgattaactgatgaccgtgtgcattgcatctcaaattaaagtcgctttggtttcttcgatcagtaccaaataagaaataaaaaactgggggaataaagaaaacaagctagtatttgatatagacagaagaagactcagacagatcgagtattattgttcatgtgcagaaattaaaaccatcagaagagtacgtgtagccatgcatacacctacctgcaaacatgcatctaactgctggactccgtgcagagaacacgaatcaaatcactttcctgcaacctatgtgtcctgcaatctctaaaccaatacatgcttgcaatttacatagtaatcaatctgtactgttatcatgtgtccatgtcaaagggtctaacattaattccaattgcacaactaattttctggtatacagttaaacaaatagtgtgcaggtacactttggtcccccttaatactatacaaaaatgcccagctagctagctgtatacgtatacacatttaagctagctgcccttaatacctaatgattcataatgtatagccttttatttcttttgtccaaatagaacactaaacaattcaagaaatgataaagggacccacacatctcctatgaaggtttctgtgtgctgaaaccacgctgtttcatctcccagctagctaggtcttctgatgatatgaatatgaatcatttggacgtggaaaccgcagataattcagcacttgacctttgttttattcttaattacgcatgcaccctgtctaatcatctttgacaggattccagtgtaaattatctgataggtgaatatcagatagctaagcatatatatgcatgttccacaaagttcagagagtttgcacgcgtcatgggtgcaaatattgcctattggccataaaggatgcatggaatcaagggatatcccaacatatagtgcatatataattaagttttaagatcgacattctcatcccaggcaacttcaattcgtctttaatcttgcaaactaattaacacacaatatacaaatttgtgttctcgaaggtacttcccataaagatcaattatacatggaaacgacacatatgactcctcacaaaatggatcaacatctgagcaatatagtgtaagtttcaaaagtcaatttgccttgtgttgtggatatgccattgtattgctaactgtaatgctcatgatctcccacaacagagcgcaaatggtgctaagtcaaccattcatgtgtatgtactatatatgtatatatagttactagctagtatacatatattcttttttgggaaaattggaactatgccattataattttgcaaaattttagatatgccatcctgacccacatgtcattgactcatgtgggtcctacatgtcattgagataccgatggtatatctcaaactttgcaaaattataatggcatatttctaaattcttttttagataatggatgaaactaatacactcatatactattaagttcgtttattagcatatgcgattataagttttaaggtcgatcaattatttttttcattaagtataaattgatgaattaattagttttctttagttcatctacttgcattctaaagcatcatctttgtgagagcaaattaactgaggttgcactatatttaattatttcccatgcatattcaaattaaattatatattcgcgaaaacaaatatcacaataaaatcaatattccatacaaaatggatcaacatataattagcttgagctaaaaaaatcagaattcattttactatatgtttgtggtgaatgctcctatatataatatataatgccaataattaatattgggtagaatttgtcactcccatcccatgcatacgcatatatatagctacgcatgcgtgcatgcagttttcacattttggtccttttaaaaaacttatttcgcaaatagacccctaaaaaaactaatcccagaaatggtcctttttagggcgccagagtggctggcgctgtcatccaatgggacggcgccagcctctctggcgccgtcctcctgccaccgtggcgcacgcgaaccgacgtggcaggaggagggcgacagcatggctggccccgccgcctccattcctgtccattcctgtttctctgtatggagttgcaacggtgtcatttttttttattttttcggatgttttttcacactcaggatcacgatacaaccaaccacaaaaaaaatttaaactcgaactaccacttagctaagtctgaaaatatctagcataccacttagtctactttgcaccttcactaaaattagactataactcttttagtaaaaccctttgatcagcatgttaaacataatgcactctaccactatatgaaattacttaatctaattcaaaatataaccacatgaaatgacatatataagttaaacagtacatagagatgcaatttttttatttttattttatttttttgatatttttttcacacttaggagaacataggaaccaaccgtataaaaaataaactcaaacggacaaaatatgtgacatgtagaattttccaaaactctaccgaaatggacaaaatatgtcatctattaaaataggcataactttctcatacggactcggaatcaggcaaataatatatgcacggacatctacagaaaaagttacatccgtttctccccgctctgccgggttcagcgatattaaaacctccaaattccgcttgcaagattgtgttttcaaggagagaagtttttcggtggagctttggaaaattccacatgccacatatttcgtccgtttgagtttattttttacgtggttggttcctgtgagttcctaagtgtgaaaaaaatatcaaaaaaataaaataaaaataaaaaagttgcacatctctctcctctgcactagttcggagagaggagaggagaggaaaaattctatatgtcacatattacgttcatttgagttcaatttttctatggttggttcttgtgtgtccctaagcgtgaaaaaaatatcaaacaaataaaacaaaaataaaaaatttcgggggggggggggggggg
